United States Patent Application Publication US 2017/0114356 A1 - sequence listing, part 40

SEQ ID NO: 53498 - DNA, 2117 bp, Zea Mays
cgcacgccttgcatttggcttcttcgcggcttcagcagcgaccgcgtccccgcccccgtcgggcaccaacccagcccaacgctctcccccctgctcctccccttttcctctgcccaccaattgatagctcacctcacctccgcgcccgttgtttcgtgcaccgtacttcacctcccaccaacctctccccctcaaaaactatccacccctccacggctccacccctacccgccgacgagcgcgatcgattgattcggttcgagccgggcggaggaggagggagcgccgcggggcggggtgagcccaccagatccgactaccgcagcggctatgatgaagtcgctgctgccgcagagccagctgcggcgctcggcggcggcggccgcgcggtcgtcggcgggcggcgccgcgggggcagacggggctatgtccgacggcggcggcgcggggccgcgggcgcccgcctcctccaccttctggttcctgctccacgcgctctgctgcctcatctcgctcttcctcggcttccgcttctcgcgtctcctcttcttcctgctcttctccaccaccgcgctctaccgctccagcacctcctcctcctcggccgcggtccttcgcgccaccaccacgacaaccaccaccacgaccaccacgacgacgacgaccaacaccttcacgctctccttcgccgccgccaacactcccccttccacccccgctaaccgcaccgcgctggatgtggccgacaagggggcggcgtccgggaacccacagagtcacgtcgtggtggggaggcacgggattcggatccggccgtggccgcacccggaccccgtcgaggtgatgcgggcgcaccggatcatggagcgcgtgcaggaggaacagcgccgctggtacggcgtcaaggagccgagggcaggcggcaccaccaacgccacggcgtcaatgcttgcgcgctctggcctcactttcgttcacatccccttccctgaccgcatgccccacgactgggccgaccgccacgccactgagaaccggatgcgcctccacgccctacgcgtgatccgcgagaggaagatggatggcgtagttgttttcaccgacgacagcaatgttcatagcatggagctgttcgatgaggtgcagaaggtccagtggatgggtgctgtatccgtcggaatccttgcgcatactggcacggcagaccaactacggctcagcgaggaggacaagcagaatatgcctcttccagtccagggccctgcttgcaactcctcagggcatctgattggatggcacacgttcaactcattgcccttctctgggaagacggccacagttgttggtgaagcagcccctgttctgcccaggggtttggagtgggctggttttgtgttgaactcaaggatgctgtggaaggaggctgacggcaagcctgactgggtgaaggatcttgatgctgtgggcgagaatggcgaggagattgagaacccacttactctgttgaatgatccgtcctctgttgagccactgggcaactgtgggaagaaggtcctactgtggtggcttcgtgttgaagcacgggctgatagcaagtttcctgaagggtgggtaattgagccacctttggaagtcgttgtccctgcaaagcgcactccatggcctgaaacaaccaccgagctgccagccgagttattggatgacaagcaagagcaggaggataggcgcttgtcaagagccaacaaatcatctcggccccgaggcaccacgaagcggaagggcgaccctcaaggacaagataactgatgcagaacgtactggccttgtgatgtatatcttacaccctgcaaaaacacagtagcaagcatatcctgttaatctggcggtgtctgtttaatttttcttttcttttctgatgtttttgctcctgtggcgatggtccacgcttgggtatgttatctgtagagggcacatttttaaagtagtggttgtatcttttgtgttgaaatgtacaatgcattgggagctaaaaaaatggtggatgaatactggaagtctgtctatggttctgaagaaagtactcaactcttgcatgccggctgatggctgggtgcgca

SEQ ID NO: 53499 - DNA, 2696 bp, Zea Mays
tttgaaaacttgtgttcctgtttccaacacagtgaggccacgttgtagggttttgcttgcttcgcccggcggtaaagctgagcgcggcgagagccggagaccgaagaagcgccgcgcgcccggtcatggagatcggacagtaccccgcgagcggctgctccaaggagcaccagaagatctaccaggagtggttcgcgctcgcggacgcagatggggatggccgcatcacgggccccgatgcgatcaagttttttggcatgtccaagctctcccgccctgacctcaagcaggtctgggctatcgcggacaccagaaggcaggggtatctgggtttctctgaattcgtcaccgcgatgcagctagtctctctggcacaagcaggcaacgagattactcaagatagccttaagcgagatgatttgagcagtttgaatccacctgtgatggaaggtttggatgccctacttgcgaaatctaagcatttggtgaagcgtgttgatccagaaatggatggatatcctcaggaacaatctcctttaacaaacaaatggtttagctcaaagtcatcaaagaagatacctctgacagccgtcacttctgttatcgatggcttgaaaaaactttacatcgaaaagttgaagcctttggaagttacatacaagttcaatgattttgtttcccctttgctgacaagtagtgattttgatgcaaagccaatggttatgctcttaggtcaatattctactggtaaaacaacttttatcaagcatctgctaagaacaagttatccaggtgcccatatcggaccagagccaacaacagacagatttgtagttgtcatggtaaactgagcagaatttaggatttctctttgtaggtgtaataggtgcatcagattatttaaacttctgattgtgatttgtgaagttttgttgaaaacatgaagcaatgcaacatttgtctcaagagtttgaatatggagtttacatctttagttacctatgggattcctcctaacatgttggctttgttgggaagttagctaatgtaaaagaagcatattgcacaaatctccagtcaatattaagtttatgctcaccattcctaggttttatgcaaaatattgcctgtgaagcttgtaattgtaatggagactacctatttgacactcttcgaccaatttcagttttttcagcctagaccaacgtactgcagtataagcagtatgaactgcctgtgtaccagctattacattagcacatgttctgtacctatactttcccctttctgtagctccagttaacttttgtatgcttgccagtcaggatctgatgaaaggactattcctgggaatactattgctgttcaagctgacatgccttttagcggtcttacaacatttgggactgcatttttatccaagtttgagtgctctcagatgcgacatccactgctagagcatatcacatttgttgacacacctggtgttctttctggtgaaaagcaacgcacacagcgcagctatgatttcactggtgtgacatcatggtttgctgcgaagtgtgatcttatccttctcctgtttgatcctcataagctcgatatcagtgatgagttcaaacgtgtcattggatcattacgtggccatgatgacaaaatacgcgtagttttgaacaaggcagaccaagtagacactcaacagcttatgagagtttatggtgcattgatgtggtctctcgggaaagtattgaatacacctgaggtttcacgtgtttatattggatcattcaatgacaaaccagtaaatgaatcagctgttggtccacttggaaaggaactatttgagagagagcaagatgatcttctttctgatctcaaagatatccccaagaaagcctgtgaccgccggatcaatgaatttgttaaacgtgctagagctgccaagatccatgcttatataataggtcatctaaagaaggagatgcctacaatgatgggcaaagcaaaagcccaacaacgactcatagacaatctgcctgatgagtttgcaaaggtgcaacgggaataccatcttccgtcgggagattttccttacgtggagcacttcaaagaggtgttgagcgggtacagctttgacaagtttgagaaggtgaagcccaagatggtacaggccgtggatgatatgcttggatatgacattcctgaacttctcaagaacttcagaaacccatacgagtgaacccatacaggcggttgaaagatgacttcgatctgcaacagaatgagggattgattgtcaggcgatgtgaatcatagtggtcaatgtctcttggggcgttcattgccatccatgcttagccattgttatataactttatgcataagaatcatagagccattgctcaagctttcaccagacatctgattatgtaaaatcgacaaaatagtgatgttagtgttaaagaatatactgtgatgttgtttcttcaaatgagtatttattcgtttggaacagctggagaatgtgggtttgtcaattatcagcccatgaagaatatttggaccaccgtggggtgttgtcctgagcatggctccttgttttgattttataatgtcatgtatgttgtggcgctgcaaaatctgctgtgatatgttgcaaatatatttttgaaagacgaacttttgagaaattaatt

SEQ ID NO: 53500 - DNA, 2225 bp, Zea Mays
ctccgtccacggccgcacaccactggactactcgagtcgacgttgagctcgctcagggttttgcttgcttcgcccggcggtaaagctgagcgcggcgagagccggagaccgaagaagcgccgcgcgcccggtcatggagatcggacagtaccccgcgagcggctgctccaaggagcaccagaagatctaccaggagtggttcgcgctcgcggacgcagatggggatggccgcatcacgggccccgatgcgatcaagttttttggcatgtccaagctctcccgccctgacctcaagcaggtctgggctatcgcggacaccagaaggcaggggtatctgggtttctctgaattcgtcaccgcgatgcagctagtctctctggcacaagcaggcaacgagattactcaagatagccttaagcgagatgatttgagcagtttgaatccacctgtgatggaaggtttggatgccctacttgcgaaatctaagcatttggtgaagcgtgttgatccagaaatggatggatatcctcaggaacaatctcctttaacaaacaaatggtttagctcaaagtcatcaaagaagatacctctgacagccgtcacttctgttatcgatggcttgaaaaaactttacatcgaaaagttgaagcctttggaagttacatacaagttcaatgattttgtttcccctttgctgacaagtagtgattttgatgcaaagccaatggttatgctcttaggtcaatattctactggtaaaacaacttttatcaagcatctgctaagaacaagttatccaggtgcccatatcggaccagagccaacaacagacagatttgtagttgtcatgtcaggatctgatgaaaggactattcctgggaatactattgctgttcaagctgacatgccttttagcggtcttacaacatttgggactgcatttttatccaagtttgagtgctctcagatgcgacatccactgctagagcatatcacatttgttgacacacctggtgttctttctggtgaaaagcaacgcacacagcgcagctatgatttcactggtgtgacatcatggtttgctgcgaagtgtgatcttatccttctcctgtttgatcctcataagctcgatatcagtgatgagttcaaacgtgtcattggatcattacgtggccatgatgacaaaatacgcgtagttttgaacaaggcagaccaagtagacactcaacagcttatgagagtttatggtgcattgatgtggtctctcgggaaagtattgaatacacctgaggtttcacgtgtttatattggatcattcaatgacaaaccagtaaatgaatcagctgttggtccacttggaaaggaactatttgagagagagcaagatgatcttctttctgatctcaaagatatccccaagaaagcctgtgaccgccggatcaatgaatttgttaaacgtgctagagctgccaagatccatgcttatataataggtcatctaaagaaggagatgcctacaatgatgggcaaagcaaaagcccaacaacgactcatagacaatctgcctgatgagtttgcaaaggtgcaacgggaataccatcttccgtcgggagattttccttacgtggagcacttcaaagaggtgttgagcgggtacagctttgacaagtttgagaaggtgaagcccaagatggtacaggccgtggatgatatgcttggatatgacattcctgaacttctcaagaacttcagaaacccatacgagtgaacccatacaggcggttgaaagatgacttcgatctgcaacagaatgagggattgattgtcaggcgatgtgaatcatagtggtcaatgtctcttggggcgttcattgccatccatgcttagccattgttatataactttatgcataagaatcatagagccattgctcaagctttcaccagacatctgattatgtaaaatcgacaaaatagtgatgttagtgttaaagaatatactgtgatgttgtttcttcaaatgagtatttattcgtttggaacagctggagaatgtgggtttgtcaattatcagcccatgaagaatatttggaccaccgtggggtgttgtcctgagcatggctccttgttttgattttataatgtcatgtatgttgtggcgctgcaaaatctgctgtgatatgttgcaaatatatttttgaaagacgaacttttgagaaattaatt

SEQ ID NO: 53501 - DNA, 614 bp, Zea Mays
aaaattaagccaagaagacttcttaaaccttgagatggtatttgctctagtgaagcaggatgcaatcagttcaactgaagccataaatcgtctccaaggagttatcctgtactcatcatctggcgagggaatgcgtttagaatatgcaaaatcacggatgggccttcggaagcgtgataagcacccctaagtgcagctgaaagacgacacggcagttgtattttcattcagcacaagcggcagctgagcatgctcaatgatgtctaatagcagacgacctgtcctgacacctgagtccaatgtcatcttcatgcagcgaacgttttgctcatgagttaggctatgaggtccttcagctgcgtagcattatgttacttggtctggttgtatcacttattattacatgtgcacctctttttttcctccttcggaccttgcctcctagtcatcttcagattttaagctaggattatcccttatttacagttggagttattattagaatctattgtgcctgaaaggatcaatctgaactatcaatctgaacgagagggtgaattagttttttctaaaaaatctatataaattaaaatctattaatgaccctattttat

SEQ ID NO: 53502 - DNA, 1937 bp, Zea Mays
ttttaactacagcctccaatctcatgcgttcgaggacaagccgaaaaggagaaagtaccccgttccgtcggccgcacctgcacccaccgcacgccgagtcacgccccccccccccccccccccccccccccccccccctggaccagccaacgtgacactccaccgccgccggcgccgcggcagcccgtagcaaccgccaccgcctgcccatctcctctctatcccgcgccgcatggccgcgtacttcaaccactcctcgtcctacccgccgccgcctcccccgccgggcacttccccgtacggcgcgtaccgccacgcctacccgccggcgccggcacccccggccgcttacggcgcctactacgaccgcgcagagcaggccctcccggcgcgggacgaggtccgcaccctcttcatcgctggcctccccgccgacgccaagccgcgcgaagtctacaacctcttccgcgatttccccggatacgtctcctcccacctccgcacgggcaaatcctctcaggcgtatgcgtttgctgtgtttgcagatcaacagtctgcactagctgccttgagtgccacaaatggaatggtatttgatcttgagaaaaattgttctcttcatgtagatctcgcaaaatccaattccagatcaaagcgcttgagatcagatgatacttcaccttattctcctgaaaaaagaaataggaaaccaaggggatttcctgattcaggtatgactcaagtagctttttgggcagaatggcatgaaagaaaccatctgtattttcacaccacgaagatcttggtgcttacagcttatgggaggtccactacaatcacttgaacaatataagatgttccaaatccacagttctccctcctagcaatcacaattgatttctaactttcaggggaattagtttatattgtccctataatatatattctactatttcctttgtgttaataccctactaaatgttatatcagtaacttcatatcctcaatgaagtgcctctttactcacatagctgaaaattcttacaaagcactcatcttgcacatctttggcacactttgcgccctatcaggtgctggaagcaatatttacatatctggaatgggtagtacttcacacagcttgagtggttatccttctgcacaaagttacacaagccttgagtctagtgcttctctcagcaaggacccatccacatttgcccctcaaaataatcctccatgccctactctttttgttgcgaacctggctccagcttgttcagagcaacagctgatagatgttttctcaagttgtgcgggatttgtgaaactcaagatgcaaaacaagcttggagctccagttgcatttgttgatttcaaggatgcaatcagttcaactgaagccataaatcgtctccaaggagttatcctgtactcatcatctggcgagggaatgcgtttagaatatgcaaaatcacggatgggccttcggaagcgtgataagcacccctaagtgcagctgaaagacgacacggcagttgtattttcattcagcacaagcggcagctgagcatgctcaatgatgtctaatagcagacgacctgtcctgacacctgagtccaatgtcatcttcatgcagcgaacgttttgctcatgagttaggctatgaggtccttcagctgcgtagcattatgttacttggtctggttgtatcacttattattacatgtgcacctctttttttcctccttcggaccttgcctcctagtcatcttcagattttaagctaggattatcccttatttacagttggagttattattagaatctattgtgcctgaaaggatcaatctgaactatcaatctgaacgagagggtgaattagttttttctaaaaaatctatataaattaaaatctattaatgaccctattttat

SEQ ID NO: 53503 - DNA, 2033 bp, Zea Mays
ttttaactacagcctccaatctcatgcgttcgaggacaagccgaaaaggagaaagtaccccgttccgtcggccgcacctgcacccaccgcacgccgagtcacgccccccccccccccccccccccccccccccccccctggaccagccaacgtgacactccaccgccgccggcgccgcggcagcccgtagcaaccgccaccgcctgcccatctcctctctatcccgcgccgcatggccgcgtacttcaaccactcctcgtcctacccgccgccgcctcccccgccgggcacttccccgtacggcgcgtaccgccacgcctacccgccggcgccggcacccccggccgcttacggcgcctactacgaccgcgcagagcaggccctcccggcgcgggacgaggtccgcaccctcttcatcgctggcctccccgccgacgccaagccgcgcgaagtctacaacctcttccgcgatttccccggatacgtctcctcccacctccgcacgggcaaatcctctcagggaatggtatttgatcttgagaaaaattgttctcttcatgtagatctcgcaaaatccaattccagatcaaagcgcttgagatcagatgatacttcaccttattctcctgaaaaaagaaataggaaaccaaggggatttcctgattcaggtatgactcaagtagctttttgggcagaatggcatgaaagaaaccatctgtattttcacaccacgaagatcttggtgcttacagcttatgggaggtccactacaatcacttgaacaatataagatgttccaaatccacagttctccctcctagcaatcacaattgatttctaactttcaggggaattagtttatattgtccctataatatatattctactatttcctttgtgttaataccctactaaatgttatatcagtaacttcatatcctcaatgaagtgcctctttactcacatagctgaaaattcttacaaagcactcatcttgcacatctttggcacactttgcgccctatcaggtgctggaagcaatatttacatatctggaatgggtagtacttcacacagcttgagtggttatccttctgcacaaaggttatggcacactactcgagcacagttttatcatgtattcatgtgatgttggagggaccagcttaagctaccctctagctcctacttgaatgtagattaccgatctagattgaagctatgcttttaggaaattatagttgacattgttccgtcttgcagttacacaagccttgagtctagtgcttctctcagcaaggacccatccacatttgcccctcaaaataatcctccatgccctactctttttgttgcgaacctggctccagcttgttcagagcaacagctgatagatgttttctcaagttgtgcgggatttgtgaaactcaagatgcaaaacaagcttggagctccagttgcatttgttgatttcaaggatgcaatcagttcaactgaagccataaatcgtctccaaggagttatcctgtactcatcatctggcgagggaatgcgtttagaatatgcaaaatcacggatgggccttcggaagcgtgataagcacccctaagtgcagctgaaagacgacacggcagttgtattttcattcagcacaagcggcagctgagcatgctcaatgatgtctaatagcagacgacctgtcctgacacctgagtccaatgtcatcttcatgcagcgaacgttttgctcatgagttaggctatgaggtccttcagctgcgtagcattatgttacttggtctggttgtatcacttattattacatgtgcacctctttttttcctccttcggaccttgcctcctagtcatcttcagattttaagctaggattatcccttatttacagttggagttattattagaatctattgtgcctgaaaggatcaatctgaactatcaatctgaacgagagggtgaattagttttttctaaaaaatctatataaattaaaatctattaatgaccctattttat

SEQ ID NO: 53504 - DNA, 1467 bp, Zea Mays
gagagaagcagtcggcagccgggaagcccgtcgcgtgcctttcttcctcaacgtgccatgattaacgaaatatttgagcactggggagttgtagtcagatctggagcgacagtgaagtgtgacccatgagagttctagtgccatgtttcacagatagcattacatgatagaaaggggaatgaggatgtgagagtttttgtgaaggttgatggaaaagagttttggattggaaaactatcagttgacaaataccctcagtgtaaaactagtttggtattcgagaaggagtttgagttactacacacctcgaaaaccagcaccatctctgcccttggctacaaatgttggcattgcaagagaaagtatcctttcattttactttgttcagtatttttagagaagcctgaacacaactttcttttccctaacaacttctctgtcatttatcataaatatgatagtgtcacaagtaccaaagaaggtaatgatcttgttcttccagtattggacatccctaatgttttttatcacttggcataaacaacatggtgattgatgtttcaaatgatgaatctgatgaggaggttccacaggctattccattattcccaaaagcagatgatgataaaagcaaagaaagtaaatgtgatgtggagaagcctgctgctactgagtcctctaaaccgaaggttagcttggaggaaacaaaggatcctgagaagcatgaagttgatgttggtggcaccgacgatgatgaaagtgacgaagactttgttgattcagaagagggtgaatcagatgatgacgagagtactaagagcaagaataggccaagcagcctcacccttgaagacacctccagggaaaaagtttgcagttagtgatgatgctaagaaaaatatccacgtccatgtcgaagttggtgaagacggctcgctcaatcattgacaactacaagcaatccactggtcatagctgcaagtcgtgcagcaagtaattttctcgcctcgtgcggtcgaagcacagtgctcattgcaagatcaaggtgaagcaagcacagtgctcattgcaaggtgaattataaccagtgctcattgcaaggtgaagctagtgatgatgctaagaaaagtaccagaatttttctcacacatgggcgtcctttttggtcgtggactttctactcgtccgttagtctggaaactcattgcaagctgaagcacagtgctcgaaagtgaagtagcattcatggactatgttagggacgttcgttattaggcaagtgaattgtgggtttgcgtttactgctacaaacgggctctaaggcagcatcaacagaatgctattgcttattgcgggttgttggaaagttgctgttttttctgctcaacagaatgtgtaattgagattttcttgaattagaaagttgttgttttgcagcgtgtattgatatataacccctcatttcct

SEQ ID NO: 53505 - DNA, 1440 bp, Zea Mays
ctcaaataaacggtcacaggctgttaggcgcgccacccacctcagccgctcgcaaaaccctctcctctcgagaagcagcgcggcggagaccggagagaagcagtcggcagccgggaagcccgtcgcgtgcctttcttcctcaacgtgccatgattaacgaaatatttgagcactggggagttgtagtcagatctggagcgacagtgaagtgtgacccatgagagttctagtgccatgtttcacagatagcattacatgatagaaaggggaatgaggatgtgagagtttttgtgaaggttgatggaaaagagttttggattggaaaactatcagttgacaaataccctcagtgtaaaactagtttggtattcgagaaggagtttgagttactacacacctcgaaaaccagcaccatctctgcccttggctacaaatgttggcattgcaagagaaagtatcctttcattttactttgttcagtatttttagagaagcctgaacacaactttcttttccctaacaacttctctgtcatttatcataaatatgatagtgtcacaagtaccaaagaaggctattccattattcccaaaagcagatgatgataaaagcaaagaaagtaaatgtgatgtggagaagcctgctgctactgagtcctctaaaccgaaggttagcttggaggaaacaaaggatcctgagaagcatgaagttgatgttggtggcaccgacgatgatgaaagtgacgaagactttgttgattcagaagagggtgaatcagatgatgacgagagtactaagagcaagaataggccaagcagcctcacccttgaagacacctccagggaaaaagttagtgatgatgctaagaaaaatatccacgtccatgtcgaagttggtgaagacggctcgctcaatcattgacaactacaagcaatccactggtcatagctgcaagtcgtgcagcaagtaattttctcgcctcgtgcggtcgaagcacagtgctcattgcaagatcaaggtgaagcaagcacagtgctcattgcaaggtgaattataaccagtgctcattgcaaggtgaagctagtgatgatgctaagaaaagtaccagaatttttctcacacatgggcgtcctttttggtcgtggactttctactcgtccgttagtctggaaactcattgcaagctgaagcacagtgctcgaaagtgaagtagcattcatggactatgttagggacgttcgttattaggcaagtgaattgtgggtttgcgtttactgctacaaacgggctctaaggcagcatcaacagaatgctattgcttattgcgggttgttggaaagttgctgttttttctgctcaacagaatgtgtaattgagattttcttgaattagaaagttgttgttttgcagcgtgtattgatatataacccctcatttcct

SEQ ID NO: 53506 - DNA, 1051 bp, Zea Mays
ctcaaataaacggtcacaggctgttaggcgcgccacccacctcagccgctcgcaaaaccctctcctctcgagaagcagcgcggcggagaccggagagaagcagtcggcagccgggaagcccgtcgcgtgcctttcttcctcaacgtgccatgattaacgaaatatttgagcactggggctattccattattcccaaaagcagatgatgataaaagcaaagaaagtaaatgtgatgtggagaagcctgctgctactgagtcctctaaaccgaaggttagcttggaggaaacaaaggatcctgagaagcatgaagttgatgttggtggcaccgacgatgatgaaagtgacgaagactttgttgattcagaagagggtgaatcagatgatgacgagagtactaagagcaagaataggccaagcagcctcacccttgaagacacctccagggaaaaagtttgcagttagtgatgatgctaagaaaaatatccacgtccatgtcgaagttggtgaagacggctcgctcaatcattgacaactacaagcaatccactggtcatagctgcaagtcgtgcagcaagtaattttctcgcctcgtgcggtcgaagcacagtgctcattgcaagatcaaggtgaagcaagcacagtgctcattgcaaggtgaattataaccagtgctcattgcaaggtgaagctagtgatgatgctaagaaaagtaccagaatttttctcacacatgggcgtcctttttggtcgtggactttctactcgtccgttagtctggaaactcattgcaagctgaagcacagtgctcgaaagtgaagtagcattcatggactatgttagggacgttcgttattaggcaagtgaattgtgggtttgcgtttactgctacaaacgggctctaaggcagcatcaacagaatgctattgcttattgcgggttgttggaaagttgctgttttttctgctcaacagaatgtgtaattgagattttcttgaattagaaagttgttgttttgcagcgtgtattgatatataacccctcatttcct

SEQ ID NO: 53507 - DNA, 1044 bp, Zea Mays
ctcaaataaacggtcacaggctgttaggcgcgccacccacctcagccgctcgcaaaaccctctcctctcgagaagcagcgcggcggagaccggagagaagcagtcggcagccgggaagcccgtcgcgtgcctttcttcctcaacgtgccatgattaacgaaatatttgagcactggggctattccattattcccaaaagcagatgatgataaaagcaaagaaagtaaatgtgatgtggagaagcctgctgctactgagtcctctaaaccgaaggttagcttggaggaaacaaaggatcctgagaagcatgaagttgatgttggtggcaccgacgatgatgaaagtgacgaagactttgttgattcagaagagggtgaatcagatgatgacgagagtactaagagcaagaataggccaagcagcctcacccttgaagacacctccagggaaaaagttagtgatgatgctaagaaaaatatccacgtccatgtcgaagttggtgaagacggctcgctcaatcattgacaactacaagcaatccactggtcatagctgcaagtcgtgcagcaagtaattttctcgcctcgtgcggtcgaagcacagtgctcattgcaagatcaaggtgaagcaagcacagtgctcattgcaaggtgaattataaccagtgctcattgcaaggtgaagctagtgatgatgctaagaaaagtaccagaatttttctcacacatgggcgtcctttttggtcgtggactttctactcgtccgttagtctggaaactcattgcaagctgaagcacagtgctcgaaagtgaagtagcattcatggactatgttagggacgttcgttattaggcaagtgaattgtgggtttgcgtttactgctacaaacgggctctaaggcagcatcaacagaatgctattgcttattgcgggttgttggaaagttgctgttttttctgctcaacagaatgtgtaattgagattttcttgaattagaaagttgttgttttgcagcgtgtattgatatataacccctcatttcct

SEQ ID NO: 53508 - DNA, 1215 bp, Zea Mays
caaacggtctcaggctgttaggcgcgccactcacctcagccgctcgcaaaaccctctcctctcgagaagcagcgcggtggagaccggagagaagcagtcggcagccgggaagcccgtcacgtgcctttcttcctcgacgtgccatgattaacggaatattgagcactcgggagttgtagtcagacctggagcgacaatgaagtgtgacccaggagagttctggtgccatgtttcagagatagcattacatgatagaaaaccagcaccatctctgcccttggcttcaaatgttggcattgcaagagaaatcttttatcatatatgacagtgtcacaagtaccaaagaaggctattccattattcccaaaagcagatgatgataaaagcaaagaaagtaaatgtgatgtggagaagcctgctgctactgagtcctctaaaccgaaggttagcttggaggaaacaaaggatcctgagaagcatgaagttgatgttggtggcaccgacgatgatgaaagtgacgaagactttgttgattcagaagagggtgaatcagatgatgacgagagtactaagagcaagaataggccaagcagcctcacccttgaagacacctccagggaaaaagttagtgatgatgctaagaaaaatatccacgtccatgtcgaagttggtgaagacggctcgctcaatcattgacaactacaagcaatccactggtcatagctgcaagtcgtgcagcaagtaattttctcgcctcgtgcggtcgaagcacagtgctcattgcaagatcaaggtgaagcaagcacagtgctcattgcaaggtgaattataaccagtgctcattgcaaggtgaagctagtgatgatgctaagaaaagtaccagaatttttctcacacatgggcgtcctttttggtcgtggactttctactcgtccgttagtctggaaactcattgcaagctgaagcacagtgctcgaaagtgaagtagcattcatggactatgttagggacgttcgttattaggcaagtgaattgtgggtttgcgtttactgctacaaacgggctctaaggcagcatcaacagaatgctattgcttattgcgggttgttggaaagttgctgttttttctgctcaacagaatgtgtaattgagattttcttgaattagaaagttgttgttttgcagcgtgtattgatatataacccctcatttcct

SEQ ID NO: 53509 - DNA, 1621 bp, Zea Mays
caaacggtctcaggctgttaggcgcgccactcacctcagccgctcgcaaaaccctctcctctcgagaagcagcgcggtggagaccggagagaagcagtcggcagccgggaagcccgtcacgtgcctttcttcctcgacgtgccatgattaacggaatattgagcactcgggagttgtagtcagacctggagcgacaatgaagtgtgacccaggagagttctggtgccatgtttcagagatagcattacatgatagaaaaccagcaccatctctgcccttggcttcaaatgttggcattgcaagagaaatcttttatcatatatgacagtgtcacaagtaccaaagaaggtaatgatcttgttctttcagtattggacatccctaatgttttttatcacttggcataagcaacatggtgattgatgtttcaaatgatgaatctgatgaggaggttccacaggctattccattattcccaaaagcagatgatgataaaagcaaagaaagtaaatgtgatgtggagaagcctgctgctactgagtcctctaaaccgaaggttagcttggaggaaacaaaggatcctgagaagcatgaagttgatgttggtggcactgacgatgatgaaagtgacgaagactttgttgattcagaagagggtgaatcggatgatgacgaggttggtataagtgatgaatcatgactgagatatcatttcctccatgttccagtttttttttctctctcatctctagattgttttattgtgataccggtataaaatattgagtgaacaatcaaagtataagtcattttgttgtattactgaaggtaacctaggtaatcatatattgtggaccagatttcttatgtatacgattatacttttttccttatgtttattatactactattggtttgagtctgctgttcgcttcacgagccttgtacctttttcaacctgaaactaggcatttttccggtaagtgcagatgcatttctaccagcactggatatcatgtgtattctgaccatgttattcttttgcatgtcatggttgatgctcagaattccagtgatggggatgaatgtgagagttcaaatgaagaagatgaagactctccaaatgtagtgctaagggcaagaataggccagcagcaacacccttgaagacacctccagggaagaaggcaaggaccacaacatcgtctatgggcaaaagaccagtcagtgtcagtgatgatgcaaagaaaagtatccacgtcactggttatggctgcaagtcgtgcagcaagttcttgtatcagaatttttcccaactagatgcggtcgtgcattctgatacatgggcgtcaaactcattgcaaggtgaagcacagtgctcgaaagtgaagtagcattcatggactatgttagggaagttcgttattaggcaactgaattgtgggtttgcgtttacaaacgggctctaaggcagcatcacaatgtccgatgcgtatttgattattgtgggttgttggaaagttgctgttttttctgctcaacagaatgtgtaattgagattttcttgaattagaaagttgttgttttgcagcgggtattgacatataacccctcatttcct

SEQ ID NO: 53510 - DNA, 1430 bp, Zea Mays
caaacggtctcaggctgttaggcgcgccactcacctcagccgctcgcaaaaccctctcctctcgagaagcagcgcggtggagaccggagagaagcagtcggcagccgggaagcccgtcacgtgcctttcttcctcgacgtgccatgattaacggaatattgagcactcgggagttgtagtcagacctggagcgacaatgaagtgtgacccaggagagttctggtgccatgtttcagagatagcattacatgatagaaaaccagcaccatctctgcccttggcttcaaatgttggcattgcaagagaaatgtcacaagtaccaaagaaggtaatgatcttgttctttcagtattggacatccctaatgttttttatcacttggcataagcaacatggtgattgatgtttcaaatgatgaatctgatgaggaggttccacaggctattccattattcccaaaagcagatggtatatatccttgttctatgtgcattttggttaagagttaatattgcatttctccctgcattgtgactgattcatagatatacatatacatgcttagtttatggtgctatttatccgatatcctcattgtacatgcgacataactcaccaaattagataatatgagcccccatttggatccttgaagcactcacatgcttaacattgtttacattcagatgataaaagcaaagaaagtaaatgtgatgtggagaagcctgctgctactgagtcctctaaaccgaaggttagcttggaggaaacaaaggatcctgagaagcatgaagttgatgttggtggcactgacgatgatgaaagtgacgaagactttgttgattcagaagagggtgaatcggatgatgacgagaattccagtgatggggatgaatgtgagagttcaaatgaagaagatgaagactctccaaatgtagtgctaagggcaagaataggccagcagcaacacccttgaagacacctccagggaagaaggcaaggaccacaacatcgtctatgggcaaaagaccagtcagtgtcagtgatgatgcaaagaaaagtatccacgtcactggttatggctgcaagtcgtgcagcaagttcttgtatcagaatttttcccaactagatgcggtcgtgcattctgatacatgggcgtcaaactcattgcaaggtgaagcacagtgctcgaaagtgaagtagcattcatggactatgttagggaagttcgttattaggcaactgaattgtgggtttgcgtttacaaacgggctctaaggcagcatcacaatgtccgatgcgtatttgattattgtgggttgttggaaagttgctgttttttctgctcaacagaatgtgtaattgagattttcttgaattagaaagttgttgttttgcagcgggtattgacatataacccctcatttcct

SEQ ID NO: 53511 - DNA, 1210 bp, Zea Mays
caaacggtctcaggctgttaggcgcgccactcacctcagccgctcgcaaaaccctctcctctcgagaagcagcgcggtggagaccggagagaagcagtcggcagccgggaagcccgtcacgtgcctttcttcctcgacgtgccatgattaacggaatattgagcactcgggagttgtagtcagacctggagcgacaatgaagtgtgacccaggagagttctggtgccatgtttcagagatagcattacatgatagaaaaccagcaccatctctgcccttggcttcaaatgttggcattgcaagagaaatgtcacaagtaccaaagaaggtaatgatcttgttctttcagtattggacatccctaatgttttttatcacttggcataagcaacatggtgattgatgtttcaaatgatgaatctgatgaggaggttccacaggctattccattattcccaaaagcagatgatgataaaagcaaagaaagtaaatgtgatgtggagaagcctgctgctactgagtcctctaaaccgaaggttagcttggaggaaacaaaggatcctgagaagcatgaagttgatgttggtggcactgacgatgatgaaagtgacgaagactttgttgattcagaagagggtgaatcggatgatgacgagaattccagtgatggggatgaatgtgagagttcaaatgaagaagatgaagactctccaaatagtgctaagggcaagaataggccagcagcaacacccttgaagacacctccagggaagaaggcaaggaccacaacatcgtctatgggcaaaagaccagtcagtgtcagtgatgatgcaaagaaaagtatccacgtcactggttatggctgcaagtcgtgcagcaagttcttgtatcagaatttttcccaactagatgcggtcgtgcattctgatacatgggcgtcaaactcattgcaaggtgaagcacagtgctcgaaagtgaagtagcattcatggactatgttagggaagttcgttattaggcaactgaattgtgggtttgcgtttacaaacgggctctaaggcagcatcacaatgtccgatgcgtatttgattattgtgggttgttggaaagttgctgttttttctgctcaacagaatgtgtaattgagattttcttgaattagaaagttgttgttttgcagcgggtattgacatataacccctcatttcct

SEQ ID NO: 53512 - DNA, 1100 bp, Zea Mays
caaacggtctcaggctgttaggcgcgccactcacctcagccgctcgcaaaaccctctcctctcgagaagcagcgcggtggagaccggagagaagcagtcggcagccgggaagcccgtcacgtgcctttcttcctcgacgtgccatgattaacggaatattgagcactcgggagttgtagtcagacctggagcgacaatgaagtgtgacccaggagagttctggtgccatgtttcagagatagcattacatgatagaaaaccagcaccatctctgcccttggcttcaaatgttggcattgcaagagaaatgtcacaagtaccaaagaaggctattccattattcccaaaagcagatgatgataaaagcaaagaaagtaaatgtgatgtggagaagcctgctgctactgagtcctctaaaccgaaggttagcttggaggaaacaaaggatcctgagaagcatgaagttgatgttggtggcactgacgatgatgaaagtgacgaagactttgttgattcagaagagggtgaatcggatgatgacgagaattccagtgatggggatgaatgtgagagttcaaatgaagaagatgaagactctccaaatgtagtgctaagggcaagaataggccagcagcaacacccttgaagacacctccagggaagaaggcaaggaccacaacatcgtctatgggcaaaagaccagtcagtgtcagtgatgatgcaaagaaaagtatccacgtcactggttatggctgcaagtcgtgcagcaagttcttgtatcagaatttttcccaactagatgcggtcgtgcattctgatacatgggcgtcaaactcattgcaaggtgaagcacagtgctcgaaagtgaagtagcattcatggactatgttagggaagttcgttattaggcaactgaattgtgggtttgcgtttacaaacgggctctaaggcagcatcacaatgtccgatgcgtatttgattattgtgggttgttggaaagttgctgttttttctgctcaacagaatgtgtaattgagattttcttgaattagaaagttgttgttttgcagcgggtattgacatataacccctcatttcct

SEQ ID NO: 53513 - DNA, 1448 bp, Zea Mays
caaacggtctcaggctgttaggcgcgccactcacctcagccgctcgcaaaaccctctcctctcgagaagcagcgcggtggagaccggagagaagcagtcggcagccgggaagcccgtcacgtgcctttcttcctcgacgtgccatgattaacggaatattgagcactcgggagttgtagtcagacctggagcgacaatgaagtgtgacccaggagagttctggtgccatgtttcagagatagcattacatgatagaaaaccagcaccatctctgcccttggcttcaaatgttggcattgcaagagaaatcttttatcatatatgacagtgtcacaagtaccaaagaaggtaatgatcttgttctttcagtattggacatccctaatgttttttatcacttggcataagcaacatggtgattgatgtttcaaatgatgaatctgatgaggaggttccacaggctattccattattcccaaaagcagatggtatatatccttgttctatgtgcattttggttaagagttaatattgcatttctccctgcattgtgactgattcatagatatacatatacatgcttagtttatggtgctatttatccgatatcctcattgtacatgcgacataactcaccaaattagataatatgagcccccatttggatccttgaagcactcacatgcttaacattgtttacattcagatgataaaagcaaagaaagtaaatgtgatgtggagaagcctgctgctactgagtcctctaaaccgaaggttagcttggaggaaacaaaggatcctgagaagcatgaagttgatgttggtggcactgacgatgatgaaagtgacgaagactttgttgattcagaagagggtgaatcggatgatgacgagaattccagtgatggggatgaatgtgagagttcaaatgaagaagatgaagactctccaaatagtgctaagggcaagaataggccagcagcaacacccttgaagacacctccagggaagaaggcaaggaccacaacatcgtctatgggcaaaagaccagtcagtgtcagtgatgatgcaaagaaaagtatccacgtcactggttatggctgcaagtcgtgcagcaagttcttgtatcagaatttttcccaactagatgcggtcgtgcattctgatacatgggcgtcaaactcattgcaaggtgaagcacagtgctcgaaagtgaagtagcattcatggactatgttagggaagttcgttattaggcaactgaattgtgggtttgcgtttacaaacgggctctaaggcagcatcacaatgtccgatgcgtatttgattattgtgggttgttggaaagttgctgttttttctgctcaacagaatgtgtaattgagattttcttgaattagaaagttgttgttttgcagcgggtattgacatataacccctcatttcct

SEQ ID NO: 53514 - DNA, 1124 bp, Zea Mays
ctcaaacaaacggtctcaggctgttaggcgcgccactcacctcagccgctcgcaaaaccctctcctctcgagaagcagcgcggtggagaccggagagaagcagtcggcagccgggaagcccgtcacgtgcctttcttcctcgacgtgccatgattaacggaatattgagcactcgggagttgtagtcagacctggagcgacaatgaagtgtgacccaggagagttctggtgccatgtttcagagatagcattacatgatagaaaaccagcaccatctctgcccttggcttcaaatgttggcattgcaagagaaatcttttatcatatatgacagtgtcacaagtaccaaagaaggctattccattattcccaaaagcagatgatgataaaagcaaagaaagtaaatgtgatgtggagaagcctgctgctactgagtcctctaaaccgaaggttagcttggaggaaacaaaggatcctgagaagcatgaagttgatgttggtggcactgacgatgatgaaagtgacgaagactttgttgattcagaagagggtgaatcggatgatgacgagaattccagtgatggggatgaatgtgagagttcaaatgaagaagatgaagactctccaaatagtgctaagggcaagaataggccagcagcaacacccttgaagacacctccagggaagaaggcaaggaccacaacatcgtctatgggcaaaagaccagtcagtgtcagtgatgatgcaaagaaaagtatccacgtcactggttatggctgcaagtcgtgcagcaagttcttgtatcagaatttttcccaactagatgcggtcgtgcattctgatacatgggcgtcaaactcattgcaaggtgaagcacagtgctcgaaagtgaagtagcattcatggactatgttagggaagttcgttattaggcaactgaattgtgggtttgcgtttacaaacgggctctaaggcagcatcacaatgtccgatgcgtatttgattattgtgggttgttggaaagttgctgttttttctgctcaacagaatgtgtaattgagattttcttgaattagaaagttgttgttttgcagcgggtattgacatataacccctcatttcct

SEQ ID NO: 53515 - DNA, 797 bp, Zea Mays
gacagtgtcacaagtaccaaagaaggctattccattattcccaaaagcagatgatgataaaagcaaagaaagtaaatgtgatgtggagaagcctgctgctactgagtcctctaaaccgaaggttagcttggaggaaacaaaggatcctgagaagcatgaagttgatgttggtggcactgacgatgatgaaagtgacgaagactttgttgattcagaagagggtgaatcggatgatgacgagaattccagtgatggggatgaatgtgagagttcaaatgaagaagatgaagactctccaaatgtagtgctaagggcaagaataggccagcagcaacacccttgaagacacctccagggaagaaggcaaggaccacaacatcgtctatgggcaaaagaccagtcagtgtcagtgatgatgcaaagaaaagtatccacgtcactggttatggctgcaagtcgtgcagcaagttcttgtatcagaatttttcccaactagatgcggtcgtgcattctgatacatgggcgtcaaactcattgcaaggtgaagcacagtgctcgaaagtgaagtagcattcatggactatgttagggaagttcgttattaggcaactgaattgtgggtttgcgtttacaaacgggctctaaggcagcatcacaatgtccgatgcgtatttgattattgtgggttgttggaaagttgctgttttttctgctcaacagaatgtgtaattgagattttcttgaattagaaagttgttgttttgcagcgggtattgacatataacccctcatttcct

SEQ ID NO: 53516 - DNA, 789 bp, Zea Mays
atgactaccagaccttttgtcatgtttcttggtgaggagctacttttatctgaaagttttgccccactgctggtgggatacgaaattggagcacaagttcctactctagatgaccttctttcaggtgcaatagtgcatgactcagggacaaaggacaagcctccacgtcgatacaagcaaatcaacccatttcgtttgacaagtactaattgcacacgtcgatagaatcatatcttgtcaccacatagcaaggaaggcatctccatttcgtttgacaagaaggacaagcctccacgtcgatacaagcaaatcaacccatttcgtttgacaagggcactcttcttgttatggatcagataggatacaatgctggtcgcacaccattcacagacatctcaaacaccatcattacaggtaatcaaaatgaatcgaactcgcttggaccaattgttgatgctaaggaacgtaagaggcaaagggatagggaaagatatgctgcgatgactgttgaagaaaagaatgagaaaaataggaagcgtcgtgaagcacgtcaacgaaataaaggactatcgatagagccactctcatccagaggtgatgaaaagttaatttttttattgttatacctacatgtttgtactatacaaagttgatgtgtagccttttgtaaatgggtgatatatgaagaagactttaatacggactaggcatgtgaggtggttagctttccagatgactgtagcaccattgatttcacaaatttgtcaacacaagacattgcaggtataa

SEQ ID NO: 53517 - DNA, 779 bp, Zea Mays
cggggatctcggacactcctgagcagccgcagatcccatgctccgcgcccacgcccagcaggccctctcccttcccccattgtgtctgcgtccgcggatctctccattccccaacagtgctgcatcaaggccaccattgcaaaatcgctggtcacgcccgcggatctctccgccttgccctcgcccgcctgctgttaaaaggatgaagcccgggcgaggttctgttcaactcccacaccgattcgacgagtttctattcaactcatacgaaggacaagcctccacgtcgatacaagcaaatcaacccatttcgtttgacaagggcactcttcttgttatggatcagataggatacaatgctggtcgcacaccattcacagacatctcaaacaccatcattacaggtaatcaaaatgaatcgaactcgcttggaccaattgttgatgctaaggaacgtaagaggcaaagggatagggaaagatatgctgcgatgactgttgaagaaaagaatgagaaaaataggaagcgtcgtgaagcacgtcaacgaaataaaggactatcgatagagccactctcatccagaggtgatgaaaagttaatttttttattgttatacctacatgtttgtactatacaaagttgatgtgtagccttttgtaaatgggtgatatatgaagaagactttaatacggactaggcatgtgaggtggttagctttccagatgactgtagcaccattgatttcacaaatttgtcaacacaagacattgcaggtataa

SEQ ID NO: 53518 - DNA, 829 bp, Zea Mays
aggagttgtagtcagacctggagcgacagtgaagtgtgacccaggagagttctggtgccatgtttcacagatagcattacatgatagaaaggggaatgaggaggtgagagtttttgtgaaggttgatggaaaagagttttggattggaaaactatcagttgacaaataccctcagtgtaaaactagtttggtattcgagaaggagtttgagttactacacacctcgaaaaccagcaccatctctgcccttggctacaaatgttggcattgcaagagaaagtatcctttcattttactttgttcaatatttttagagaagcctgaacacaactttcttttccctaacaacttctttctcatttatcatatatatgatagtgtcacaagtaccaacgaaggtaataatcttgttcttccagtattggacatccctaatgtttttttatcacttggcataaacaacatggtgattgatgtttcaaatgatgaatctgatgaggaggttccacaggctattccattattcccaaaagcagatgatttccagtgatggggatgaatgtgagaggtcaaatgaagaagatgaagactccaaaggacttctactcgaaagtgaagtagcattcatggactatgttagggaagttcgttattaggcaactgaattgtgggtttgcgtttactgctacaaacgggctctaaggcagcatcacaatgtccgatgcgtatttgattattgtgggttgttggaaagttgctgttttttctgctcaacagaatgtgtaattgagattttcttgaattagaaagttgttgttttgcaacgggt

SEQ ID NO: 53519 - DNA, 524 bp, Zea Mays
ctcacctcagccactcccaaaaccccaaaaccctctcctctcgagaagcagagcggcggagatccggagagaagccatcggcagccgggaagcccgtcgcgtgcctttcttcctcgacgtgccatgattaacggaatatttgagcactgggacctggagcgacagtgaagtgtgacccaggagagttctggtgccatgttccacaggctattccattattcccaaaagcagatgatttccagtgatggggatgaatgtgagaggtcaaatgaagaagatgaagactccaaaggacttctactcgaaagtgaagtagcattcatggactatgttagggaagttcgttattaggcaactgaattgtgggtttgcgtttactgctacaaacgggctctaaggcagcatcacaatgtccgatgcgtatttgattattgtgggttgttggaaagttgctgttttttctgctcaacagaatgtgtaattgagattttcttgaattagaaagttgttgttttgcaacgggt

SEQ ID NO: 53520 - DNA, 670 bp, Zea Mays
ccagagcaagaagagattgcgcggagcaaggtggccggggaggctctgtcgtgggaggacctcggcaggatgcggtacacctggttggcggcgatggagacgctgcggatggtgcctccggtgttcaccatgacgaggaagacggtggacgacgtcgagtacggaggctacctcatacccaagggctggcaggtgatccacgcggccaacatgacgcactgggacccggccatcttcccggagcccggcaggttcgacccagctcggttcgagaacccgtcggcggtgccacccttcgccttcgtgccgttcggtggcggcgcgcgcgtctgccccgggaacgagttcgccagggtggagacgctggtgaccgtgcaccacatcgtgacgcgcttcaggtggaagctcgccgccggctgcgaccgcagcttctccaggttcccgctgccgtacccgtctcagggactcctcatcgacatcgagcctattcagaaatgaatgatttgctttctcgattgcatttcgtccagttcgccttgtaaaatcaatatgccaatatgaaccatctgcgaatctacagttatattttgggtttgctcgacgtacaaaagttaactgaattttatatacagagaagaatcctagtgacccccacaccccccaaaaaaat

SEQ ID NO: 53521 - DNA, 4588 bp, Zea Mays
ggggaacaagaagacgaggaaagatcaaccccaccagagagagcaaacagcttcttcttcctcttcctcctccatgctgtcgtagaaagaacctctggttctttagctagtcagaccaccaaaatccaaactgagcggtctcacagcgagcggcaggacgtttcatgagagaatcatgcagtcactgaattggctatgcagcagcagtagcaccaccagattacacgtgccttcctttggtattgccttggttgtcctcctctcctgtgtgtccgtcgccagctcctgcacagatcaagagaggagctccctcatcgacttccgagatggcctctcgccggacggcaatggcggcctccacatgttatgggccaacagcacagactgctgccagtgggaaggaataacctgcagcaacgatggcgcggtcacggaagtcttgctgccttctagaggactcgaagggaggatcccaccatctctcggcaatcttacggggctgcagcgactcaacctgtcatgcaattcactctacggcaatctgccaccagaactggtgttctccagcagcagcagcatcctggatgtcagcttcaaccacctatctggtcctctgcaagagcgtcaatccccaatttctggccttcctctcaagagtttggcaactgctccaagttgacagtactcaaggctggccacaacaaccttaccggaggcctaccccatgaactgttcaatgctacctcattggagcacctctcttttccaaacaacaatttgcaaggggcacttgacggttccagcctagtcaaactcagaaatcttattttccttgaccttggatcaaatgggctggaaggaaacatgccagattctattgggcagctgggaagattggaggagctccacttagacaacaacctgattgttggagagctgccatcggccctaagtaactgcagaagtctcaagtatatcaccctcagaaataatagttttatgggagatcttagcagaattaacttcactcagatggatctgacgactgcagatttttcactgaacaaattcaatggaacaattcctgaaaacatatatgcatgcagcaatctaattgctttgcggttggcttacaacaattttcatggccagttctcaccaagaatagccaatctcagatccctttccttcctttcagttacaaataactcatttacaaatatcacaggtgcacttcagaatctcaacagatgcaagaaccttacctccctgctaattggaaccaacttcaaaggtgaaaccataccacagtatgcagcaattgatggttttgagaatcttcgggtcctaaccatagacgcatgcccattggttggggaaatccccatttggttatcaaaactcacaagattggagatattagatctatcatacaatcaccttacaggaacaataccatcctggattaacaggctggaactcctcttctttctggacatatcaagcaacaggcttacaggggatatcccacctgaattgatggagatgccaatgctacaatctgagaagaattctgccaagttggacccgaagttccttgagttacctgtattttggacacaatcacgtcaataccgtttgctcaatgctttccccaatgtattgaatctatgcaacaacagcttgacaggcataattccccaagggattggtcagttgaaagtgctcaatgtcctcaactttagcaccaacagcttatctggagaaataccacaacaaatttgcaacctcacaaacctgcaaactctagacgtatcaaataaccagctcacaggtgaactcccatctgcactgagtaaccttcacttcctttcttggttcaatgtgtctaacaacgatctagaagggccagttccaagtggaggacagtttaatacttttacaaattctagctacattgggaatcccaagctatgtggtcctatgctcagtgtccattgtggctcagtagaagaacctcgagcctcaatgaaaatgaggcacaagaagaccatcttggcgcttgccttaagtgtgttctttggagggcttgccatccttttcttgttgggacgtcttattttgtccatcagaagcacagaatctgctgacagaaacaagagcagcaacaacagggacattgaagcaacttcattcaactctgcttctgagcacgtgcgtgatatgataaagggaagcactttggtgatggtacctcgaggaaagggagaatcaaacaatctcacattcaatgatatcttgaaggccacaaataattttgatcagcagaacattattggttgtggaggtaatggtctagtctataaggctgagctaccctgtggatccaagcttgcgatcaagaaactcaatggtgaaatgtgtctgatggaaagagaattcacagcagaggttgaagcactctctatggcacaacatgagaatcttgtgccactatggggttattgtatccagggaaactcgaggctcctcatatattctttcatggagaatgggagtcttgatgattggcttcacaacacggacaatgccaactcatttctagattggccaacaagactcaagattgcacaaggagcaggacggggcctttcttatatccacaacacctgcaaccctaacattgttcaccgtgacgtcaagtccagcaacatcttacttgatagagaattcaatgcttatgtcgctgattttggccttgcaagattgatccttccttacaacacacatgtcacgacagagctggtaggcactcttggttacattcctcccgagtatggacaagcctgggtggccaccctgagaggtgatatatatagttttggagtggtcttgcttgagctgctcacagggaagaggcctgtccaggttttgaccaagtcgaaagaacttgtccaatgggtaagagagatgaggtcccaagggaaggatattgaggtcttggatccagctctcagaggaagaggacatgacgagcaaatgctgaatgtgcttgaagtagcctataagtgcatcaaccacaatcctggattgaggccaaccatccaagaggtggtgtactgcctggaaaccatagttgagccccagcaggtgcaagtgcagctgtagttaaaggagaacatattgtaggtggtgatattgtactccacccgactaggtgtaacttcagtagaaggaagagtttctaacaaagagcacagtagtgtacatttctgaaagaaaagcctcgctcactcgctgtcatgaggccctcccttatacaattttacttattccttccgtggaaatattgcacctcctagttcaaacaattgaacatgaaaagtgcaaaaaaagagcatggggctcttgttaagtatgcgttcgtttgtaccctagcgaagttgtacaggtgtgtatgtaaatctttggaaagaaaaggctcacagctatgagcttccctcttcttatctgaaacctatagcactcaagttcaattgcaggaacagtgaaagcactttgaaggcatattcagctatcaattaattcacaaacatttctagaactaggtgtacagatgcacgtatttaaaagattgttgtatagatagcataattgaggaagaaagatggacttcgctgttttttaaaaaaaaaataatctgtgaagggggacaagatataccattcttcagaattttagcttactgttattgctctgagagggggcaatttatgaatcagcggtgttcgtaatctaacttaaagcatagtcggtattgtttgattccagttttggttccctcctccgtccacaacaatatgatgcgtaagcctacatggtttccagcagtcctagagcaaccacagcagcacaatggtggaagcaagaccataagcaatgcacacttccccagattacaaaatcctaacagcccgacaattttcacaatgcacaacgcctaacaccagcaagccctagcaaaaaaaaaaaagcacagcaccaacctctaacgcaaatgtcaacagtcgcggttgccggctgctgccttccggtggtcgccctcgcccagaaaggaagaacgcgcgcgaatccatgaggaacgggaggggccgctccgtcacggccagtggctgtgcgggcggggaggccgccgcggccggggaaggcgtcgcgggcgttcaccgcgatccatgttcacaggtagatgggccttttctgggctaacacttcccgttcttaccggcccgtttcaccccctgagcaggcggccaggcgcgctcgcgtataagcgcaaccccggcagccgctgcccgcggcgccttctcttctcgccgcccaagccggaaacggaagaccgaggagatggaaccgagcggcacaggccgttgcaagttcttggaggctcccaaacctgggtcgtcgatcaggaagttccagtgatgcgtgttgtttcggcagtactatgctgtagaaactagaaaatagagcgtccggtttggggggccttgttctttggcatctggatctgaaactggcaggaactgtt

SEQ ID NO: 53522 - DNA, 5600 bp, Zea Mays
cctccatccacttgctgcttgctcaatcagccacagaccgcgcctacattgaccacgacgttaatcacagcctttctaagattatcatcgattataaatttcatatactccgtatgtgcgatgcgagatgaggcccgaaaatatattactgccaagatgagtgtgtagtgctcttcgatgcacctgccactccctccacaagtgcccactggaaacgcgaatcttgggcgcctgatcggctgttgctttcgcctttttccccccagatctgcaatatgttcccggataaaaaaagggtatacaactgttaggagaacactgccatgaaaatccagcagcgtcatttttcattaaagaaaaaaaaccttgaattttaactgccctagcccctaggttagagttctcgacggtcaagtggtttcttctcaaggtttttacatgtagatgtagccatgtgggagtaattaatatagtaacaatagacaattcagtatgcagcagaaacttcatttgacattaggctggtaaccatggtttggcagtacctgattcagaagatatgcaggaatatatgcaacaataaataacctcagcatggcgcaatattcaataccaacctgggctctggaaaaagatattctgtggcaacttccgaagtttgatgacgacccagagaaggataacagctaagccttcgtacagcgaagttggacttttgcacgtagagctgtagcgacccaagcaaaacgtcaaacatgtgaagtgggcaagaaaaaaaaaagtattcccgattttttctttcctttcctctctggagattgtattgaaggggggaaaaaagaaattgctggtggcaaacgtgtaagtaactgacttggatggttctgcaacatatacctttgccactattcctcggggaacaagaagacgaggaaagatcaaccccaccagagagagcaaacagcttcttcttcctcttcctcctccatgctgtcgtagaaagaacctctggttctttagctagtcagaccaccaaaatccaaactgagcggtctcacagcgagcggcaggacgtttcatgagagaatcatgcagtcactgaattggctatgcagcagcagtagcaccaccagattacacgtgccttcctttggtattgccttggttgtcctcctctcctgtgtgtccgtcgccagctcctgcacagatcaagagaggagctccctcatcgacttccgagatggcctctcgccggacggcaatggcggcctccacatgttatgggccaacagcacagactgctgccagtgggaaggaataacctgcagcaacgatggcgcggtcacggaagtcttgctgccttctagaggactcgaagggaggatcccaccatctctcggcaatcttacggggctgcagcgactcaacctgtcatgcaattcactctacggcaatctgccaccagaactggtgttctccagcagcagcagcatcctggatgtcagcttcaaccacctatctggtcctctgcaagagcgtcaatccccaatttctggccttcctctcaagctttgcgggaccattgccatcttctatttgcatccatgcaccatcgcttgtcacgcttgacctgtgcttaaatgacttcagtggcactatttccccagagtttggcaactgctccaagttgacagtactcaaggctggccacaacaaccttaccggaggcctaccccatgaactgttcaatgctacctcattggagcacctctcttttccaaacaacaatttgcaaggggcacttgacggttccagcctagtcaaactcagaaatcttattttccttgaccttggatcaaatgggctggaaggaaacatgccagattctattgggcagctgggaagattggaggagctccacttagacaacaacctgattgttggagagctgccatcggccctaagtaactgcagaagtctcaagtatatcaccctcagaaataatagttttatgggagatcttagcagaattaacttcactcagatggatctgacgactgcagatttttcactgaacaaattcaatggaacaattcctgaaaacatatatgcatgcagcaatctaattgctttgcggttggcttacaacaattttcatggccagttctcaccaagaatagccaatctcagatccctttccttcctttcagttacaaataactcatttacaaatatcacaggtgcacttcagaatctcaacagatgcaagaaccttacctccctgctaattggaaccaacttcaaaggtgaaaccataccacagtatgcagcaattgatggttttgagaatcttcgggtcctaaccatagacgcatgcccattggttggggaaatccccatttggttatcaaaactcacaagattggagatattagatctatcatacaatcaccttacaggaacaataccatcctggattaacaggctggaactcctcttctttctggacatatcaagcaacaggcttacaggggatatcccacctgaattgatggagatgccaatgctacaatctgagaagaattctgccaagttggacccgaagttccttgagttacctgtattttggacacaatcacgtcaataccgtttgctcaatgctttccccaatgtattgaatctatgcaacaacagcttgacaggcataattccccaagggattggtcagttgaaagtgctcaatgtcctcaactttagcaccaacagcttatctggagaaataccacaacaaatttgcaacctcacaaacctgcaaactctagacgtatcaaataaccagctcacaggtgaactcccatctgcactgagtaaccttcacttcctttcttggttcaatgtgtctaacaacgatctagaagggccagttccaagtggaggacagtttaatacttttacaaattctagctacattgggaatcccaagctatgtggtcctatgctcagtgtccattgtggctcagtagaagaacctcgagcctcaatgaaaatgaggcacaagaagaccatcttggcgcttgccttaagtgtgttctttggagggcttgccatccttttcttgttgggacgtcttattttgtccatcagaagcacagaatctgctgacagaaacaagagcagcaacaacagggacattgaagcaacttcattcaactctgcttctgagcacgtgcgtgatatgataaagggaagcactttggtgatggtacctcgaggaaagggagaatcaaacaatctcacattcaatgatatcttgaaggccacaaataattttgatcagcagaacattattggttgtggaggtaatggtctagtctataaggctgagctaccctgtggatccaagcttgcgatcaagaaactcaatggtgaaatgtgtctgatggaaagagaattcacagcagaggttgaagcactctctatggcacaacatgagaatcttgtgccactatggggttattgtatccagggaaactcgaggctcctcatatattctttcatggagaatgggagtcttgatgattggcttcacaacacggacaatgccaactcatttctagattggccaacaagactcaagattgcacaaggagcaggacggggcctttcttatatccacaacacctgcaaccctaacattgttcaccgtgacgtcaagtccagcaacatcttacttgatagagaattcaatgcttatgtcgctgattttggccttgcaagattgatccttccttacaacacacatgtcacgacagagctggtaggcactcttggttacattcctcccgagtatggacaagcctgggtggccaccctgagaggtgatatatatagttttggagtggtcttgcttgagctgctcacagggaagaggcctgtccaggttttgaccaagtcgaaagaacttgtccaatgggtaagagagatgaggtcccaagggaaggatattgaggtcttggatccagctctcagaggaagaggacatgacgagcaaatgctgaatgtgcttgaagtagcctataagtgcatcaaccacaatcctggattgaggccaaccatccaagaggtggtgtactgcctggaaaccatagttgagccccagcaggtgcaagtgcagctgtagttaaaggagaacatattgtaggtggtgatattgtactccacccgactaggtgtaacttcagtagaaggaagagtttctaacaaagagcacagtagtgtacatttctgaaagaaaagcctcgctcactcgctgtcatgaggccctcccttatacaattttacttattccttccgtggaaatattgcacctcctagttcaaacaattgaacatgaaaagtgcaaaaaaagagcatggggctcttgttaagtatgcgttcgtttgtaccctagcgaagttgtacaggtgtgtatgtaaatctttggaaagaaaaggctcacagctatgagcttccctcttcttatctgaaacctatagcactcaagttcaattgcaggaacagtgaaagcactttgaaggcatattcagctatcaattaattcacaaacatttctagaactaggtgtacagatgcacgtatttaaaagattgttgtatagatagcataattgaggaagaaagatggacttcgctgttttttaaaaaaaaaataatctgtgaagggggacaagatataccattcttcagaattttagcttactgttattgctctgagagggggcaatttatgaatcagcggtgttcgtaatctaacttaaagcatagtcggtattgtttgattccagttttggttccctcctccgtccacaacaatatgatgcgtaagcctacatggtttccagcagtcctagagcaaccacagcagcacaatggtggaagcaagaccataagcaatgcacacttccccagattacaaaatcctaacagcccgacaattttcacaatgcacaacgcctaacaccagcaagccctagcaaaaaaaaaaaagcacagcaccaacctctaacgcaaatgtcaacagtcgcggttgccggctgctgccttccggtggtcgccctcgcccagaaaggaagaacgcgcgcgaatccatgaggaacgggaggggccgctccgtcacggccagtggctgtgcgggcggggaggccgccgcggccggggaaggcgtcgcgggcgttcaccgcgatccatgttcacaggtagatgggccttttctgggctaacacttcccgttcttaccggcccgtttcaccccctgagcaggcggccaggcgcgctcgcgtataagcgcaaccccggcagccgctgcccgcggcgccttctcttctcgccgcccaagccggaaacggaagaccgaggagatggaaccgagcggcacaggccgttgcaagttcttggaggctcccaaacctgggtcgtcgatcaggaagttccagtgatgcgtgttgtttcggcagtactatgctgtagaaactagaaaatagagcgtccggtttggggggccttgttctttggcatctggatctgaaactggcaggaactgtt

SEQ ID NO: 53523 - DNA, 207 bp, Zea Mays
aagggttggagacccatatttatagccctagaggctgcactaccacaccttctcacacacactacacaacaggattgtcctatagatgctaaagagactacagaggacagtcaaaagcgactgctgtcctctagatgctaaagagactacagaggacagtcaagctgtcctctagatgctaaaggactacagaggacagtcaaaagc

SEQ ID NO: 53524 - DNA, 1598 bp, Zea Mays
ccgcatccgacgacaacgccatcacgccgtccagctcatcgtccacctgaagcccaacctgccacttccatccatcgccgctcactcccacgatcagcgtcgtcgccagtcggcaccatgggttccgacttcaaatcgatccccttgatcgaaaggccatggtattgatgagtcactgatgagggaagtcaggaatgtaacccgtgaattctttcagcttccttatgaggaaaaattaaaaattaagatgacacctcaaagtggatatagagggtatcaaaggataggggaaaatattaccaagggtaagcctgatatgcatgaagcaatcgattgttatactcctattagacctggcaaatatggagatctcgctaaaccaatggaaggatctaacttatggccaaaatacccatcaaattttgaagtactgctggaaaattatatcaaattatgtagagacatttcaagaaagataatgcgaggtatagccttggctttgggaggggcaattgatgcttttgaaggggatacagctggagatcctttctgggtgttaaggttgattggttatcccgtagatattccagaagagcagcgcactgatactggctgtggagctcatacagattatggttagtagatctctccaaagaatttctattgagaaaaaaaaattccatatgtgaaactgtggatgacggtaacttctggacttctaacactggttaaccaggatgatgacatatgtgcccttgaggtgcaaaatcgttctggtgagtggatatatgcaacgccgattcccggaacctttgtttgtaacatcggtgacatgctgaaggtttggacaaatggaatatatcagcccacccttcacagagttgtcaacaattcccagcattaccgtgtatctgttgcattcttctacgagtccaacttcgatgctgcagtagagcctgttgagttctgccgggagaaaaccggcggtgctgctaagtacgaaaaggttgtgtacggggagcatttggttcagaaagtattgacgaacttcgtcatgtaaatttgctaagtacgacaaataaatctgcattgcagcatcagaactccagacctatttggtgtgtagtgctgtaccagaaaggtagtaacggactaaagcatgcgcccgtctctgaaatttgaccttaacaagagtcgcagacttgcagtgcaggtgatatcacaaggaaatcggggggagatttgttctctctgctgcacggagttgtcgacaaccctgtcgctgaaatctgaatttagcatcagacaactggagatgctacgagtccgtctctgaaatctgaatttagcatcaggcgcgaaattgcctccatttcttcgccaaaccatctaatgatggaagctttgtagctggcaaggccatctcgtgtgacgccgcagccagacgatgccagcgtagcaagttacctaccattagcactggttaactagctagccatactagtgaattactctattccgatcaaatgttggagaattcttttctcatagatactttgatgaaaagaattggtaccaggaaggctatgttcggttct

SEQ ID NO: 53525 - DNA, 1704 bp, Zea Mays
ccgcatccgacgacaacgccatcacgccgtccagctcatcgtccacctgaagcccaacctgccacttccatccatcgccgctcactcccacgatcagcgtcgtcgccagtcggcaccatgggttccgacttcaaatcgatccccttgatcgatatcggcccgcttgtcgaaaagattgatgatccaagcatggccaacgataaggatttactgcaggttgtccggttactggatgatgcttgcaaggaggccggattcttctatgtgaaaggccatggtattgatgagtcactgatgagggaagtcaggaatgtaacccgtgaattctttcagcttccttatgaggaaaaattaaaaattaagatgacacctcaaagtggatatagagggtatcaaaggataggggaaaatattaccaagggtaagcctgatatgcatgaagcaatcgattgttatactcctattagacctggcaaatatggagatctcgctaaaccaatggaaggatctaacttatggccaaaatacccatcaaattttgaagtactgctggaaaattatatcaaattatgtagagacatttcaagaaagataatgcgaggtatagccttggctttgggaggggcaattgatgcttttgaaggggatacagctggagatcctttctgggtgttaaggttgattggttatcccgtagatattccagaagagcagcgcactgatactggctgtggagctcatacagattatggttagtagatctctccaaagaatttctattgagaaaaaaaaattccatatgtgaaactgtggatgacggacttctaacactggttaaccaggatgatgacatatgtgcccttgaggtgcaaaatcgttctggtgagtggatatatgcaacgccgattcccggaacctttgtttgtaacatcggtgacatgctgaaggtttggacaaatggaatatatcagcccacccttcacagagttgtcaacaattcccagcattaccgtgtatctgttgcattcttctacgagtccaacttcgatgctgcagtagagcctgttgagttctgccgggagaaaaccggcggtgctgctaagtacgaaaaggttgtgtacggggagcatttggttcagaaagtattgacgaacttcgtcatgtaaatttgctaagtacgacaaataaatctgcattgcagcatcagaactccagacctatttggtgtgtagtgctgtaccagaaaggtagtaacggactaaagcatgcgcccgtctctgaaatttgaccttaacaagagtcgcagacttgcagtgcaggtgatatcacaaggaaatcggggggagatttgttctctctgctgcacggagttgtcgacaaccctgtcgctgaaatctgaatttagcatcagacaactggagatgctacgagtccgtctctgaaatctgaatttagcatcaggcgcgaaattgcctccatttcttcgccaaaccatctaatgatggaagctttgtagctggcaaggccatctcgtgtgacgccgcagccagacgatgccagcgtagcaagttacctaccattagcactggttaactagctagccatactagtgaattactctattccgatcaaatgttggagaattcttttctcatagatactttgatgaaaagaattggtaccaggaaggctatgttcggttct

SEQ ID NO: 53526 - DNA, 1455 bp, Zea Mays
ccgcatccgacgacaacgccatcacgccgtccagctcatcgtccacctgaagcccaacctgccacttccatccatcgccgctcactcccacgatcagcgtcgtcgccagtcggcaccatgggttccgacttcaaatcgatccccttgatcgaaaggccatggtattgatgagtcactgatgagggaagtcaggaatgtaacccgtgaattctttcagcttccttatgaggaaaaattaaaaattaagatgacacctcaaagtggatatagagggtatcaaaggataggggaaaatattaccaagggtaagcctgatatgcatgaagcaatcgattgttatactcctattagacctggcaaatatggagatctcgctaaaccaatggaaggatctaacttatggccaaaatacccatcaaattttgaagtactgctggaaaattatatcaaattatgtagagacatttcaagaaagataatgcgaggtatagccttggctttgggaggggcaattgatgcttttgaaggggatacagctggagatcctttctgggtgttaaggttgattggttatcccgtagatattccagaagagcagcgcactgatactggctgtggagctcatacagattatggacttctaacactggttaaccaggatgatgacatatgtgcccttgaggtgcaaaatcgttctggtttggacaaatggaatatatcagcccacccttcacagagttgtcaacaattcccagcattaccgtgtatctgttgcattcttctacgagtccaacttcgatgctgcagtagagcctgttgagttctgccgggagaaaaccggcggtgctgctaagtacgaaaaggttgtgtacggggagcatttggttcagaaagtattgacgaacttcgtcatgtaaatttgctaagtacgacaaataaatctgcattgcagcatcagaactccagacctatttggtgtgtagtgctgtaccagaaaggtagtaacggactaaagcatgcgcccgtctctgaaatttgaccttaacaagagtcgcagacttgcagtgcaggtgatatcacaaggaaatcggggggagatttgttctctctgctgcacggagttgtcgacaaccctgtcgctgaaatctgaatttagcatcagacaactggagatgctacgagtccgtctctgaaatctgaatttagcatcaggcgcgaaattgcctccatttcttcgccaaaccatctaatgatggaagctttgtagctggcaaggccatctcgtgtgacgccgcagccagacgatgccagcgtagcaagttacctaccattagcactggttaactagctagccatactagtgaattactctattccgatcaaatgttggagaattcttttctcatagatactttgatgaaaagaattggtaccaggaaggctatgttcggttct

SEQ ID NO: 53527 - DNA, 1577 bp, Zea Mays
ccgcatccgacgacaacgccatcacgccgtccagctcatcgtccacctgaagcccaacctgccacttccatccatcgccgctcactcccacgatcagcgtcgtcgccagtcggcaccatgggttccgacttcaaatcgatccccttgatcgatatcggcccgcttgtcgaaaagattgatgatccaagcatggccaacgataaggatttactgcaggttgtccggttactggatgatgcttgcaaggaggccggattcttctatgtgaaaggccatggtattgatgagtcactgatgagggaagtcaggaatgtaacccgtgaattctttcagcttccttatgaggaaaaattaaaaattaagatgacacctcaaagtggatatagagggtatcaaaggataggggaaaatattaccaagggtaagcctgatatgcatgaagcaatcgattgttatactcctattagacctggcaaatatggagatctcgctaaaccaatggaaggatctaacttatgacatttcaagaaagataatgcgaggtatagccttggctttgggaggggcaattgatgcttttgaaggggatacagctggagatcctttctgggtgttaaggttgattggttatcccgtagatattccagaagagcagcgcactgatactggctgtggagctcatacagattatggacttctaacactggttaaccaggatgatgacatatgtgcccttgaggtgcaaaatcgttctggtgagtggatatatgcaacgccgattcccggaacctttgtttgtaacatcggtgacatgctgaaggtttggacaaatggaatatatcagcccacccttcacagagttgtcaacaattcccagcattaccgtgtatctgttgcattcttctacgagtccaacttcgatgctgcagtagagcctgttgagttctgccgggagaaaaccggcggtgctgctaagtacgaaaaggttgtgtacggggagcatttggttcagaaagtattgacgaacttcgtcatgtaaatttgctaagtacgacaaataaatctgcattgcagcatcagaactccagacctatttggtgtgtagtgctgtaccagaaaggtagtaacggactaaagcatgcgcccgtctctgaaatttgaccttaacaagagtcgcagacttgcagtgcaggtgatatcacaaggaaatcggggggagatttgttctctctgctgcacggagttgtcgacaaccctgtcgctgaaatctgaatttagcatcagacaactggagatgctacgagtccgtctctgaaatctgaatttagcatcaggcgcgaaattgcctccatttcttcgccaaaccatctaatgatggaagctttgtagctggcaaggccatctcgtgtgacgccgcagccagacgatgccagcgtagcaagttacctaccattagcactggttaactagctagccatactagtgaattactctattccgatcaaatgttggagaattcttttctcatagatactttgatgaaaagaattggtaccaggaaggctatgttcggttct

SEQ ID NO: 53528 - DNA, 1977 bp, Zea Mays
ccgcatccgacgacaacgccatcacgccgtccagctcatcgtccacctgaagcccaacctgccacttccatccatcgccgctcactcccacgatcagcgtcgtcgcttatccgcaaatatctctcttcctctttgcagtcggcaccatgggttccgacttcaaatcgatccccttgatcgattcaggtatcctgatcagattctgctctgcgctgccctgagacatccaaatttcttttcctcgcatttccacctcaatcgcgctgtaacaccttcctcccatccccaacctcaagaatttggtatccccgtttgggctgcacgttccatgtgggttcaggcttgagagccagctgcccccgtttcttgttcgcctcctgccgccgccgccgcagtgccagtaacttctgcaagcgaagggacgcaactcctcaaggatttgattcatatatttgactctggcttcagtagatacagcttctgttattcgccctctctctgtgcttcgatctctcggttttataacgagcgtacttgtttgttcccaccactgccagatatcggcccgcttgtcgaaaagattgatgatccaagcatggccaacgataaggatttactgcaggttgtccggttactggatgatgcttgcaaggaggccggattcttctatgtgaaaggccatggtattgatgagtcactgatgagggaagtcaggaatgtaacccgtgaattctttcagcttccttatgaggaaaaattaaaaattaagatgacacctcaaagtggatatagagggtatcaaaggataggggaaaatattaccaagggtaagcctgatatgcatgaagcaatcgattgttatactcctattagacctggcaaatatggagatctcgctaaaccaatggaaggatctaacttatggccaaaatacccatcaaattttgaagtactgctggaaaattatatcaaattatgtagagacatttcaagaaagataatgcgaggtatagccttggctttgggaggggcaattgatgcttttgaaggggatacagctggagatcctttctgggtgttaaggttgattggttatcccgtagatattccagaagagcagcgcactgatactggctgtggagctcatacagattatggacttctaacactggttaaccaggatgatgacatatgtgcccttgaggtgcaaaatcgttctggtttggacaaatggaatatatcagcccacccttcacagagttgtcaacaattcccagcattaccgtgtatctgttgcattcttctacgagtccaacttcgatgctgcagtagagcctgttgagttctgccgggagaaaaccggcggtgctgctaagtacgaaaaggttgtgtacggggagcatttggttcagaaagtattgacgaacttcgtcatgtaaatttgctaagtacgacaaataaatctgcattgcagcatcagaactccagacctatttggtgtgtagtgctgtaccagaaaggtagtaacggactaaagcatgcgcccgtctctgaaatttgaccttaacaagagtcgcagacttgcagtgcaggtgatatcacaaggaaatcggggggagatttgttctctctgctgcacggagttgtcgacaaccctgtcgctgaaatctgaatttagcatcagacaactggagatgctacgagtccgtctctgaaatctgaatttagcatcaggcgcgaaattgcctccatttcttcgccaaaccatctaatgatggaagctttgtagctggcaaggccatctcgtgtgacgccgcagccagacgatgccagcgtagcaagttacctaccattagcactggttaactagctagccatactagtgaattactctattccgatcaaatgttggagaattcttttctcatagatactttgatgaaaagaattggtaccaggaaggctatgttcggttct

SEQ ID NO: 53529 - DNA, 648 bp, Zea Mays
ctttgaccttgtacacattggtgaaccacaatgtggtgggatttggatttctactcaggaacgacatcagttgaaggatctaaatggtcactttttagttgaaggacccaacatagaattcacgatatatacggccaaattttgagttctggtccttggtcaagacgacatacagtaacgacaacagcgatgaggacgacgaagagcttggcgacattgacgcacctggaatgaatgtgggcagcttggatgatcacttcgaaatagattttaacagtgacgatgacattgagtataagatgaataagatgtccataacgccgcaacgcactttctaccatccactggctacaaacagtgagtccaaccgcatgcctgcgaggatcagaccttcagtgagccccccatcatagcaagggcaacgcgtggaaaaccggtttgtgattgtatacttggtagtcagcccttaggaacaggtatgtgtttgtagcaagacttacgacgtgaaatgaggattctcttggggacattaatggtataacgtgcgaatgttagaacctaattttcaattatcaatgagtcaggtgcagcctaattttcaaggacctgttcgtagcatgtaatgtaacgcatctaggcaaaacaacc

SEQ ID NO: 53530 - DNA, 2120 bp, Zea Mays
accaaacttctcaaatcatgactataggatccgtttttaattgacataagggacaaagattattatgattacatgctaggcattatagaccctaccaagaaaaggagtacagatgatgaagctatgtttgttactattttgagggcactatcacaagcagtatccaagatagacaccgtgtatcatcatgcacttctacacaatatatttaccatgtgtgtctggcacttgcacagtgacacgagggtggtgtttttggatttaataaccagattggctgctgtggcagaccaatatctcagagaatgtttgcagatgcttgtgaataatttcactccacctggacccctcattcgttacattgaggagccaaggtggcttccaaagaaggaaaaaatctactctcagttgcaagagagtttgaaaatgatttctgacactgtgcccttggcaccaaggatgttaaaggatataattgataggagtatgccaaagttgtttgatagcaaagctaagatggtatcatttgtcaagtgcatgttgggacttgatgctgttgtttgggacattattgggtcgtcattgttggagaaagttgtgtacctacttacagaattggatgttaatataacatgggaagatattcttcaagatgaacacaacaaaggtatatttgacatggagcttgaggatttggctgaggatgaagataaccttggtcaagaaggaacaaaggtccattttggaggaaatatgtgtgccgagaaacttgatggtttaatggtggttgtgtgtgagcacctcaagtcacgtgtagaagaacctgagcgcctaattaaggaatttgtcactttgaaggctatatttaaatcacatgtgctgagggtgcacaaatccaaatttgcacagtttatcatgttttatgcttgttccctgcatcctgagattggcgatggctttgctaattttcttactgatatttttattgacaaggacaaaaacgaggatgcaattactaggctagtggactggtgtgattattattgtggccatcagctggacaatggggtgacagcaaatcctataaagcaccagctattttatgctagctgccaggctgtgatgtatgtcctatgctttcggttaagatctattatggactacccaaatcttaaacaacaactttttcgaatgcgaatccgggatatcttggtccacccattgcagccattaaaggtgtgcttgccttcaatagtgaatgagttcctgagacaggctacagctgcgagcctgttccatgcacctgcgatctcaatgcacgaagatgcagttgaatccgatctatcgaaggcatttggaggacttaataggcttgacatgttcttcccatttgacccgtatctacttaaagagtctgacagatatatacggccaaattttgagttctggtccttggtcaagacgacatacagtaacgacaacagcgatgaggacgacgaagagcttggcgacattgacgcacctggaatgaatgtgggcagcttggatgatcacttcgaaatagattttaacagtgacgatgacattgagtataagatgaataagatgtccataacgccgcaacgcactttctaccatccactggctacaaacagtgagtccaaccgcatgcctgcgaggatcagaccttcagtgagccccccatcatagcaaggttctgctcagctctttacttgactgatgatgacacaaaatcagatgctaggaagttgcacgtgccaagaagggaccaggggatgacgaccaaacatacaccggagtgtattctatttattattccagttgctagtagggtcaaaactttaatgcagagtgtatatgtgtttcagggcaacgcgtggaaaaccggtttgtgattgtatacttggtagtcagcccttaggaacaggtatgtgtttgtagcaagacttacgacgtgaaatgaggattctcttggggacattaatggtataacgtgcgaatgttagaacctaattttcaattatcaatgagtcaggtgcagcctaattttcaaggacctgttcgtagcatgtaatgtaacgcatctaggcaaaacaacc

SEQ ID NO: 53531 - DNA, 2258 bp, Zea Mays
agggtgatccaaaagcaaggaggggcaattgcaaaagctgctactgtattagctaccaaacttctcaaatcatgactataggatccgtttttaattgacataagggacaaagattattatgattacatgctaggcattatagaccctaccaagaaaaggagtacagatgatgaagctatgtttgttactattttgagggcactatcacaagcagtatccaagatagacaccgtgtatcatcatgcacttctacacaatatatttaccatgtgtgtctggcacttgcacagtgacacgagggtggtgtttttggatttaataaccagattggctgctgtggcagaccaatatctcagagaatgtttgcagatgcttgtgaataatttcactccacctggacccctcattcgttacattgaggagccaaggtggcttccaaagaaggaaaaaatctactctcagttgcaagagagtttgaaaatgatttctgacactgtgcccttggcaccaaggatgttaaaggatataattgataggagtatgccaaagttgtttgatagcaaagctaagatggtatcatttgtcaagtgcatgttgggacttgatgctgttgtttgggacattattgggtcgtcattgttggagaaagttgtgtacctacttacagaattggatgttaatataacatgggaagatattcttcaagatgaacacaacaaaggtatatttgacatggagcttgaggatttggctgaggatgaagataaccttggtcaagaaggaacaaaggtccattttggaggaaatatgtgtgccgagaaacttgatggtttaatggtggttgtgtgtgagcacctcaagtcacgtgtagaagaacctgagcgcctaattaaggaatttgtcactttgaaggctatatttaaatcacatgtgctgagggtgcacaaatccaaatttgcacagtttatcatgttttatgcttgttccctgcatcctgagattggcgatggctttgctaattttcttactgatatttttattgacaaggacaaaaacgaggatgcaattactagagtgtctgcagtttcatatgttggaagctatctgtcccgggcaaggttcatttccgtaaatatagttgtttctgtactcaaaaggctagtggactggtgtgattattattgtggccatcagctggacaatggggtgacagcaaatcctataaagcaccagctattttatgctagctgccaggctgtgatgtatgtcctatgctttcggttaagatctattatggactacccaaatcttaaacaacaactttttcgaatgcgaatccgggatatcttggtccacccattgcagccattaaaggtgtgcttgccttcaatagtgaatgagttcctgagacaggctacagctgcgagcctgttccatgcacctgcgatctcaatgcacgaagatgcagttgaatccgatctatcgaaggcatttggaggacttaataggcttgacatgttcttcccatttgacccgtatctacttaaagagtctgacagatatatacggccaaattttgagttctggtccttggtcaagacgacatacagtaacgacaacagcgatgaggacgacgaagagcttggcgacattgacgcacctggaatgaatgtgggcagcttggatgatcacttcgaaatagattttaacagtgacgatgacattgagtataagatgaataagatgtccataacgccgcaacgcactttctaccatccactggctacaaacagtgagtccaaccgcatgcctgcgaggatcagaccttcagtgagccccccatcatagcaaggttctgctcagctctttacttgactgatgatgacacaaaatcagatgctaggaagttgcacgtgccaagaagggaccaggggatgacgaccaaacatacaccggagtgtattctatttattattccagttgctagtagggtcaaaactttaatgcagagtgtatatgtgtttcagggcaacgcgtggaaaaccggtttgtgattgtatacttggtagtcagcccttaggaacaggtatgtgtttgtagcaagacttacgacgtgaaatgaggattctcttggggacattaatggtataacgtgcgaatgttagaacctaattttcaattatcaatgagtcaggtgcagcctaattttcaaggacctgttcgtagcatgtaatgtaacgcatctaggcaaaacaacc

SEQ ID NO: 53532 - DNA, 2886 bp, Zea Mays
ccgttttctatatttttctgtgaatatgattcctgtaattccagaagagccctaaacttcgcgtcctacacgcgcccccctctcgctcccacacaaaaaccctagccatccaacaggcaacaggagaccatcaatcatcaataaataaaaaatagtagtaattcctaaccctaggaggcatcctgttccacgcgactcatcccgtcgtccgccgagccgccgacgccacgccaggcctccacgccgcgcctccgagctccgtcgccccggaccgccggcgccgggcagccgtgagctccgaccggacctgcccgcgcccaggctgaggcgccgcctacccgagctccgcccaggccgcccgcccgctcggcaggacgactggacgagctcctcgccgcgggcgccgagcagaggagctcctctcgcggaagcgcggacccgccttcaggccgaggtgccgagctccgccccgccccgcgcggccgcgcccctgcccaggtccagccgccccgctcggctcctgttccccgctggggttccggcacaaagctccacggctccgcatcccattgctgagattcttcccgtgaggaggtgttgggggtagctggcgatgggggcggagcaggggtacgaagatatgcaggggaccttcagggactccgaggtgttcgagtttgtcgggaaagtcctgcagtccgtgcggatggatccgtttttaattgacataagggacaaagattattatgattacatgctaggcattatagaccctaccaagaaaaggagtacagatgatgaagctatgtttgttactattttgagggcactatcacaagcagtatccaagatagacaccgtgtatcatcatgcacttctacacaatatatttaccatgtgtgtctggcacttgcacagtgacacgagggtggtgtttttggatttaataaccagattggctgctgtggcagaccaatatctcagagaatgtttgcagatgcttgtgaataatttcactccacctggacccctcattcgttacattgaggagccaaggtggcttccaaagaaggaaaaaatctactctcagttgcaagagagtttgaaaatgatttctgacactgtgcccttggcaccaaggatgttaaaggatataattgataggagtatgccaaagttgtttgatagcaaagctaagatggtatcatttgtcaagtgcatgttgggacttgatgctgttgtttgggacattattgggtcgtcattgttggagaaagttgtgtacctacttacagaattggatgttaatataacatgggaagatattcttcaagatgaacacaacaaaggtatatttgacatggagcttgaggatttggctgaggatgaagataaccttggtcaagaaggaacaaaggtccattttggaggaaatatgtgtgccgagaaacttgatggtttaatggtggttgtgtgtgagcacctcaagtcacgtgtagaagaacctgagcgcctaattaaggaatttgtcactttgaaggctatatttaaatcacatgtgctgagggtgcacaaatccaaatttgcacagtttatcatgttttatgcttgttccctgcatcctgagattggcgatggctttgctaattttcttactgatatttttattgacaaggacaaaaacgaggatgcaattactagagtgtctgcagtttcatatgttggaagctatctgtcccgggcaaggttcatttccgtaaatatagttgtttctgtactcaaaaggctagtggactggtgtgattattattgtggccatcagctggacaatggggtgacagcaaatcctataaagcaccagctattttatgctagctgccaggctgtgatgtatgtcctatgctttcggttaagatctattatggactacccaaatcttaaacaacaactttttcgaatgcgaatccgggatatcttggtccacccattgcagccattaaaggtgtgcttgccttcaatagtgaatgagttcctgagacaggctacagctgcgagcctgttccatgcacctgcgatctcaatgcacgaagatgcagttgaatccgatctatcgaaggcatttggaggacttaataggcttgacatgttcttcccatttgacccgtatctacttaaagagtctgacagatatatacggccaaattttgagttctggtccttggtcaagacgacatacagtaacgacaacagcgatgaggacgacgaagagcttggcgacattgacgcacctggaatgaatgtgggcagcttggatgatcacttcgaaatagattttaacagtgacgatgacattgagtataagatgaataagatgtccataacgccgcaacgcactttctaccatccactggctacaaacagtgagtccaaccgcatgcctgcgaggatcagaccttcagtgagccccccatcatagcaaggttctgctcagctctttacttgactgatgatgacacaaaatcagatgctaggaagttgcacgtgccaagaagggaccaggggatgacgaccaaacatacaccggagtgtattctatttattattccagttgctagtagggtcaaaactttaatgcagagtgtatatgtgtttcagggcaacgcgtggaaaaccggtttgtgattgtatacttggtagtcagcccttaggaacaggtatgtgtttgtagcaagacttacgacgtgaaatgaggattctcttggggacattaatggtataacgtgcgaatgttagaacctaattttcaattatcaatgagtcaggtgcagcctaattttcaaggacctgttcgtagcatgtaatgtaacgcatctaggcaaaacaacc

SEQ ID NO: 53533 - DNA, 2087 bp, Zea Mays
ggtaactagatttctcaacgcaggagattgggttcgttgcttccccagcacagtggtgttttctgcggttggtgtgggatccatggagatttcctgcctctggaaatgaaatacacatgtgtagaatcaaacaacagtagatttttatgaaatttaggattgttcatggagctgaatatggatacatgcaggtggcctttttatagaggaaggaatgagtattaattaagttctaattagttgcgagtagtgttttgtcctatagaactagggagttttgcttcatggtaggtgttcctaggctgcaaattttgtctgatcttgcattgagaatatgatgggtgaagtctgtgacacgtcgcgtcgcgccgtcggtcgaagccagctcaatagtgaggttgaggcctcacaactttctgcaaaactacatgtcaagtgctccaccttgtcagaattttaaagaaacattttgttgtttcaccttgacttcttattgacatggcctattggagagagatctctgtgtgtttctggtttctaattggacatagacatgccagtgaggagcagtttagccggttcttgcattatgaagtggatgcaattagaaaggcgtgtgccagcttggaagagggctaccttcctctagttacattcatagtggtgcaaaagcgccatcacacactgttttgtcctgaagatcatcgttcacacagacaaccagatcgacgtggaaatattttgcaaggtgagccgatgatagatgttgcgattctccagaaagaaaacaaattctcgtctcaacacatatggttttaatcattttgcacttttggcaagggacgagccggtcatcacattaccatggtggacatttgagatttgcaaccttgttgtgcatagttttacacactaagcacccattgcaccgaaaaaacttacaggatgaactagatgcaaaacctgaagagctggaaggagaagagttggaatctaagcttctagagcctgttgcagctctttcggtgcatccagtgcatgtcccaggaaacaagcaactagcttgccctacttcacagaaagttatagctaaatacgatgagctggctgcactacaagctgaaatggcattgtgatcaggttaatgttcgctctatttgtacatcttaatgtgtatttgatgttcctttcatgggattaatttgctggtatctatttcaatatttgattcataacttctgtgtgctccccttaaaaggttgttgtctattaagaagtggaatacacgataatatgcaaccacaaattgtttatcgtgcggtatccaaaaagtttacatgtatacatctcttcagcattttagtttccatttagtatcttctactctctatttgaaagaagtgaagttcttccactccccaaacttataaatcatgttttactgttgtgaattgttttgcttagatgtagacaattttgttttttataggaacatagtttttcaaattgcaccccaaaatatgatagcttatatattttggttatgattaggagtgttgggctgctggctgcccgcttttttttcttttttcctttttaggacactttggagacaatagttcttatggcgcagtcaggctagcaggctgccatctgagtttgaaattaccgattgctgccatccttgtgatccagacaaggaaaatgttcttgctatttaagttatgaggtggagtgatggctcttatcttgaagatcaggatcactggcggttgggttactccttgattcttacatggattaacgcatggaccgaggaagcgcaatgacaagcctaatagcctgcaactgatgaaaggaatggtctctactacatgtattattgtccatcccatctttgtttaatggtcgtagctgctttatacaattattcctacctatgctagactgtgagccattgtatatcaatgtattttatcatattgatttcgtagcaacgtacgagcatatacctagtatatttataaacaatgtgtagcacttgccacatttaaacagctaatcttaaaaagacacgacatgcgagg

SEQ ID NO: 53534 - DNA, 1818 bp, Zea Mays
ggtaactagatttctcaacgcaggagattgggttcgttgcttccccagcacagtggtgttttctgcggttggtgtgggatccatggagatttcctgcctctggaaatgaaatacacatgtgtagaatcaaacaacagtagatttttatgaaatttaggattgttcatggagctgaatatggatacatgcaggtggcctttttatagaggaaggaatgagtattaattaagttctaattagttgcgagtagtgttttgtcctatagaactagggagttttgcttcatggtaggtgttcctaggctgcaaattttgtctgatcttgcattgagaatatgatgggtgaagtctgtgacacgtcgcgtcgcgccgtcggtcgaagccagctcaatagtgaggttgaggcctcacaactttctgcaaaactacatgtcaagtgctccaccttgtcagaattttaaagaaacattttgttgtttcaccttgacttcttattgacatggcctattggagagagatctctgtgtgtttctggtttctaattggacatagacatgccagtgaggagcagtttagccggttcttgcattatgaagtggatgcaattagaaaggcgtgtgccagcttggaagagggctaccttcctctagttacattcatagtggtgcaaaagcgccatcacacactgttttgtcctgaagatcatcgttcacacagacaaccagatcgacgtggaaatattttgcaagctctttcggtgcatccagtgcatgtcccaggaaacaagcaactagcttgccctacttcacagaaagttatagctaaatacgatgagctggctgcactacaagctgaaatggcattgtgatcaggttaatgttcgctctatttgtacatcttaatgtgtatttgatgttcctttcatgggattaatttgctggtatctatttcaatatttgattcataacttctgtgtgctccccttaaaaggttgttgtctattaagaagtggaatacacgataatatgcaaccacaaattgtttatcgtgcggtatccaaaaagtttacatgtatacatctcttcagcattttagtttccatttagtatcttctactctctatttgaaagaagtgaagttcttccactccccaaacttataaatcatgttttactgttgtgaattgttttgcttagatgtagacaattttgttttttataggaacatagtttttcaaattgcaccccaaaatatgatagcttatatattttggttatgattaggagtgttgggctgctggctgcccgcttttttttcttttttcctttttaggacactttggagacaatagttcttatggcgcagtcaggctagcaggctgccatctgagtttgaaattaccgattgctgccatccttgtgatccagacaaggaaaatgttcttgctatttaagttatgaggtggagtgatggctcttatcttgaagatcaggatcactggcggttgggttactccttgattcttacatggattaacgcatggaccgaggaagcgcaatgacaagcctaatagcctgcaactgatgaaaggaatggtctctactacatgtattattgtccatcccatctttgtttaatggtcgtagctgctttatacaattattcctacctatgctagactgtgagccattgtatatcaatgtattttatcatattgatttcgtagcaacgtacgagcatatacctagtatatttataaacaatgtgtagcacttgccacatttaaacagctaatcttaaaaagacacgacatgcgagg

SEQ ID NO: 53535 - DNA, 2103 bp, Zea Mays
ggtaactagatttctcaacgcaggagattgggttcgttgcttccccagcacagtggtgttttctgcggttggtgtgggatccatggagatttcctgcctctggaaatgaaatacacatgtgtagaatcaaacaacagtagatttttatgaaatttaggattgttcatggagctgaatatggatacatgcaggtggcctttttatagaggaaggaatgagtattaattaagttctaattagttgcgagtagtgttttgtcctatagaactagggagttttgcttcatggtaggtgttcctaggctgcaaattttgtctgatcttgcattgagaatatgatgggtgaagtctgtgacacgtcgcgtcgcgccgtcggtcgaagccagctcaatagtgaggttgaggcctcacaactttctgcaaaactacatgtcaagtgctccaccttgtcagaattttaaagaaacattttgttgtttcaccttgacttcttattgacatggcctattggagagagatctctgtgtgtttctggtttctaattggacatagacatgccagtgaggagcagtttagccggttcttgcattatgaagtggatgcaattagaaaggcgtgtgccagcttggaagagggctaccttcctctagttacattcatagtggtgcaaaagcgccatcacacactgttttgtcctgaagatcatcgttcacacagacaaccagatcgacgtggaaatattttgcaagccactctggcattcaggtgagccgatgatagatgttgcgattctccagaaagaaaacaaattctcgtctcaacacatatggttttaatcattttgcacttttggcaagggacgagccggtcatcacattaccatggtggacatttgagatttgcaaccttgttgtgcatagttttacacactaagcacccattgcaccgaaaaaacttacaggatgaactagatgcaaaacctgaagagctggaaggagaagagttggaatctaagcttctagagcctgttgcagctctttcggtgcatccagtgcatgtcccaggaaacaagcaactagcttgccctacttcacagaaagttatagctaaatacgatgagctggctgcactacaagctgaaatggcattgtgatcaggttaatgttcgctctatttgtacatcttaatgtgtatttgatgttcctttcatgggattaatttgctggtatctatttcaatatttgattcataacttctgtgtgctccccttaaaaggttgttgtctattaagaagtggaatacacgataatatgcaaccacaaattgtttatcgtgcggtatccaaaaagtttacatgtatacatctcttcagcattttagtttccatttagtatcttctactctctatttgaaagaagtgaagttcttccactccccaaacttataaatcatgttttactgttgtgaattgttttgcttagatgtagacaattttgttttttataggaacatagtttttcaaattgcaccccaaaatatgatagcttatatattttggttatgattaggagtgttgggctgctggctgcccgcttttttttcttttttcctttttaggacactttggagacaatagttcttatggcgcagtcaggctagcaggctgccatctgagtttgaaattaccgattgctgccatccttgtgatccagacaaggaaaatgttcttgctatttaagttatgaggtggagtgatggctcttatcttgaagatcaggatcactggcggttgggttactccttgattcttacatggattaacgcatggaccgaggaagcgcaatgacaagcctaatagcctgcaactgatgaaaggaatggtctctactacatgtattattgtccatcccatctttgtttaatggtcgtagctgctttatacaattattcctacctatgctagactgtgagccattgtatatcaatgtattttatcatattgatttcgtagcaacgtacgagcatatacctagtatatttataaacaatgtgtagcacttgccacatttaaacagctaatcttaaaaagacacgacatgcgagg

SEQ ID NO: 53536 - DNA, 1809 bp, Zea Mays
ggtaactagatttctcaacgcaggagattgggttcgttgcttccccagcacagtggtgttttctgcggttggtgtgggatccatggagatttcctgcctctggaaatgaaatacacatgtgtagaatcaaacaacagtagatttttatgaaatttaggattgttcatggagctgaatatggatacatgcaggtggcctttttatagaggaaggaatgagtattaattaagttctaattagttgcgagtagtgttttgtcctatagaactagggagttttgcttcatggtaggtgttcctaggctgcaaattttgtctgatcttgcattgagaatatgatgggtgaagtctgtgacacgtcgcgtcgcgccgtcggtcgaagccagctcaatagtgaggttgaggcctcacaactttctgcaaaactacatgtcaagtgctccaccttgtcagaattttaaagaaacattttgttgtttcaccttgacttcttattgacatggcctattggagagagatctctgtgtgtttctggtttctaattggacatagacatgccagtgaggagcagtttagccggttcttgcattatgaagtggatgcaattagaaaggcgtgtgccagcttggaagagggctaccttcctctagttacattcatagtggtgcaaaagcgccatcacacactgttttgtcctgaagatcatcgttcacacagacaaccagatcgacgtggaaatattttgcaagtaactgtggttgacacaaagatatgtcatccaagtgaatttgatttctacctttgtagccactctggcattcaggatgaactagatgcaaaacctgaagagctggaaggagaagagttggaatctaagcttctagagcctgttgcagctctttcggtgcatccagtgcatgtcccaggaaacaagcaactagcttgccctacttcacagaaagttatagctaaatacgatgagctggctgcactacaagctgaaatggcattgtgatcaggacactttggagacaatagttcttatggcgcagtcaggctagcaggctgccatctgagtttgaaattaccgattgctgccatccttgtgatccagacaaggaaaatgttcttgctatttaagttatgaggtggagtgatggctcttatcttgaagatcaggatcactggcggttgggttactccttgattcttacatggtattttaatggatttctagcaatgattttttgcatcttttaaaaaacatagaagatccttaggaatcatatctgcttttaatatgacgtcatttaaacttgaattaggcgccccattcctatcagttcacttctagatatgacaggtagttgatatgtattgcttcgatccgaatttatgagttgaagatatggtttaagcattcgatgaaagtgaactcgaatatccaatattccttaccaacgattccattcagttcatctctctgatgagttatgaatcagtggacttctactcttgcaggattaacgcatggaccgaggaagcgcaatgacaagcctaatagcctgcaactgatgaaaggaatggtctctactacatgtattattgtccatcccatctttgtttaatggtcgtagctgctttatacaattattcctacctatgctagactgtgagccattgtatatcaatgtattttatcatattgatttcgtagcaacgtacgagcatatacctagtatatttataaacaatgtgtagcacttgccacatttaaacagctaatcttaaaaagacacgacatgcgagg

SEQ ID NO: 53537 - DNA, 2374 bp, Zea Mays
attttgaatggtaactagatttctcaacgcaggagattgggttcgttgcttccccagcacagtggtgttttctgcggttggtgtgggatccatggagatttcctgcctctggaaatgaaatacacatgtgtagaatcaaacaacagtagatttttatgaaatttaggattgttcatggagctgaatatggatacatgcaggtggcctttttatagaggaaggaatgagtattaattaagttctaattagttgcgagtagtgttttgtcctatagaactagggagttttgcttcatggtaggtgttcctaggctgcaaattttgtctgatcttgcattgagaatatgatgggtgaagtctgtgacacgtcgcgtcgcgccgtcggtcgaagccagctcaatagtgaggttgaggcctcacaactttctgcaaaactacatgtcaagtgctccaccttgtcagaattttaaagaaacattttgttgtttcaccttgacttcttattgacatggcctattggagagagatctctgtgtgtttctggtttctaattggacatgtaaaagtttatgattagttgttgcataaatggattggctagaattttcaaagtataggtgcttggtgtcttctcatggtcatagggaaaatatcatagctgatattttcacacaagtgaaggatccacaaaagggatttgttccctatggaatgatcagggaactactcgtgccattctataaggcaaatgggagccgcaaaccaaataggaaaattttctatgggttcgtaattgtctgtttgaatgaattttgttgttgtctaaacttaaatctcttttccttgcatgtaaagaaaaagacctgccagttttctttatgttagtacatatttcaacagctaaacagctacaccttgtatacttggagaagaatcctggagttactttacttgtttccttgatttgcagagacatgccagtgaggagcagtttagccggttcttgcattatgaagtggatgcaattagaaagcttggaagagggctaccttcctctagttacattcatagtggtgcaaaagcgccatcacacactgttttgtcctgaagatcatcgttcacacagacaaccagatcgacgtggaaatattttgcaagtaactgtggttgacacaaagatatgtcatccaagtgaatttgatttctacctttgtagccactctggcattcaggatgaactagatgcaaaacctgaagagctggaaggagaagagttggaatctaagcttctagagcctgttgcagctctttcggtgcatccagtgcatgtcccaggaaacaagcaactagcttgccctacttcacagaaagttatagctaaatacgatgagctggctgcactacaagctgaaatggcattgtgatcaggttaatgttcgctctatttgtacatcttaatgtgtatttgatgttcctttcatgggattaatttgctggtatctatttcaatatttgattcataacttctgtgtgctccccttaaaaggttgttgtctattaagaagtggaatacacgataatatgcaaccacaaattgtttatcgtgcggtatccaaaaagtttacatgtatacatctcttcagcattttagtttccatttagtatcttctactctctatttgaaagaagtgaagttcttccactccccaaacttataaatcatgttttactgttgtgaattgttttgcttagatgtagacaattttgttttttataggaacatagtttttcaaattgcaccccaaaatatgatagcttatatattttggttatgattaggagtgttgggctgctggctgcccgcttttttttcttttttcctttttaggacactttggagacaatagttcttatggcgcagtcaggctagcaggctgccatctgagtttgaaattaccgattgctgccatccttgtgatccagacaaggaaaatgttcttgctatttaagttatgaggtggagtgatggctcttatcttgaagatcaggatcactggcggttgggttactccttgattcttacatggattaacgcatggaccgaggaagcgcaatgacaagcctaatagcctgcaactgatgaaaggaatggtctctactacatgtattattgtccatcccatctttgtttaatggtcgtagctgctttatacaattattcctacctatgctagactgtgagccattgtatatcaatgtattttatcatattgatttcgtagcaacgtacgagcatatacctagtatatttataaacaatgtgtagcacttgccacatttaaacagctaatcttaaaaagacacgacatgcgagg

SEQ ID NO: 53538 - DNA, 2647 bp, Zea Mays
gttatattttgaatggtaactagatttctcaacgcaggagattgggttcgttgcttccccagcacagtggtgttttctgcggttggtgtgggatccatggagatttcctgcctctggaaatgaaatacacatgtgtagaatcaaacaacagtagatttttatgaaatttaggattgttcatggagctgaatatggatacatgcaggtggcctttttatagaggaaggaatgagtattaattaagttctaattagttgcgagtagtgttttgtcctatagaactagggagttttgcttcatggtaggtgttcctaggctgcaaattttgtctgatcttgcattgagaatatgatgggtgaagtctgtgacacgtcgcgtcgcgccgtcggtcgaagccagctcaatagtgaggttgaggcctcacaactttctgcaaaactacatgtcaagtgctccaccttgtcagaattttaaagaaacattttgttgtttcaccttgacttcttattgacatggcctattggagagagatctctgtgtgtttctggtttctaattggacatgtaaaagtttatgattagttgttgcataaatggattggctagaattttcaaagtataggtgcttggtgtcttctcatggtcatagggaaaatatcatagctgatattttcacacaagtgaaggatccacaaaagggatttgttccctatggaatgatcagggaactactcgtgccattctataaggcaaatgggagccgcaaaccaaataggaaaattttctatggagacatgccagtgaggagcagtttagccggttcttgcattatgaagtggatgcaattagaaaggcgtgtgccagcttggaagagggctaccttcctctagttacattcatagtggtgcaaaagcgccatcacacactgttttgtcctgaagatcatcgttcacacagacaaccagatcgacgtggaaatattttgcaagccactctggcattcaggtgagccgatgatagatgttgcgattctccagaaagaaaacaaattctcgtctcaacacatatggttttaatcattttgcacttttggcaagggacgagccggtcatcacattaccatggtggacatttgagatttgcaaccttgttgtgcatagttttacacactaagcacccattgcaccgaaaaaacttacaggatgaactagatgcaaaacctgaagagctggaaggagaagagttggaatctaagcttctagagcctgttgcagctctttcggtgcatccagtgcatgtcccaggaaacaagcaactagcttgccctacttcacagaaagttatagctaaatacgatgagctggctgcactacaagctgaaatggcattgtgatcaggttaatgttcgctctatttgtacatcttaatgtgtatttgatgttcctttcatgggattaatttgctggtatctatttcaatatttgattcataacttctgtgtgctccccttaaaaggttgttgtctattaagaagtggaatacacgataatatgcaaccacaaattgtttatcgtgcggtatccaaaaagtttacatgtatacatctcttcagcattttagtttccatttagtatcttctactctctatttgaaagaagtgaagttcttccactccccaaacttataaatcatgttttactgttgtgaattgttttgcttagatgtagacaattttgttttttataggaacatagtttttcaaattgcaccccaaaatatgatagcttatatattttggttatgattaggagtgttgggctgctggctgcccgcttttttttcttttttcctttttaggacactttggagacaatagttcttatggcgcagtcaggctagcaggctgccatctgagtttgaaattaccgattgctgccatccttgtgatccagacaaggaaaatgttcttgctatttaagttatgaggtggagtgatggctcttatcttgaagatcaggatcactggcggttgggttactccttgattcttacatggtattttaatggatttctagcaatgattttttgcatcttttaaaaaacatagaagatccttaggaatcatatctgcttttaatatgacgtcatttaaacttgaattaggcgccccattcctatcagttcacttctagatatgacaggtagttgatatgtattgcttcgatccgaatttatgagttgaagatatggtttaagcattcgatgaaagtgaactcgaatatccaatattccttaccaacgattccattcagttcatctctctgatgagttatgaatcagtggacttctactcttgcaggattaacgcatggaccgaggaagcgcaatgacaagcctaatagcctgcaactgatgaaaggaatggtctctactacatgtattattgtccatcccatctttgtttaatggtcgtagctgctttatacaattattcctacctatgctagactgtgagccattgtatatcaatgtattttatcatattgatttcgtagcaacgtacgagcatatacctagtatatttataaacaatgtgtagcacttgccacatttaaacagctaatcttaaaaagacacgacatgcgagg

SEQ ID NO: 53539 - DNA, 1788 bp, Zea Mays
gttatattttgaatggtaactagatttctcaacgcaggagattgggttcgttgcttccccagcacagtggtgttttctgcggttggtgtgggatccatggagatttcctgcctctggaaatgaaatacacatgtgtagaatcaaacaacagtagatttttatgaaatttaggattgttcatggagctgaatatggatacatgcaggtggcctttttatagaggaaggaatgagtattaattaagttctaattagttgcgagtagtgttttgtcctatagaactagggagttttgcttcatggtaggtgttcctaggctgcaaattttgtctgatcttgcattgagaatatgatgggtgaagtctgtgacacgtcgcgtcgcgccgtcggtcgaagccagctcaatagtgaggttgaggcctcacaactttctgcaaaactacatgtcaagtgctccaccttgtcagaattttaaagaaacattttgttgtttcaccttgacttcttattgacatggcctattggagagagatctctgtgtgtttctggtttctaattggacatgtaaaagtttatgattagttgttgcataaatggattggctagaattttcaaagtataggtgcttggtgtcttctcatggtcatagggaaaatatcatagctgatattttcacacaagtgaaggatccacaaaagggatttgttccctatggaatgatcagggaactactcgtgccattctataaggcaaatgggagccgcaaaccaaataggaaaattttctatggagacatgccagtgaggagcagtttagccggttcttgcattatgaagtggatgcaattagaaaggcgtgtgccagcttggaagagggctaccttcctctagttacattcatagtggtgcaaaagcgccatcacacactgttttgtcctgaagatcatcgttcacacagacaaccagatcgacgtggaaatattttgcaagccactctggcattcaggtgagccgatgatagatgttgcgattctccagaaagaaaacaaattctcgtctcaacacatatggttttaatcattttgcacttttggcaagggacgagccggtcatcacattaccatggtggacatttgagatttgcaaccttgttgtgcatagttttacacactaagcacccattgcaccgaaaaaacttacaggatgaactagatgcaaaacctgaagagctggaaggagaagagttggaatctaagcttctagagcctgttgcagctctttcggtgcatccagtgcatgtcccaggaaacaagcaactagcttgccctacttcacagaaagttatagctaaatacgatgagctggctgcactacaagctgaaatggcattgtgatcagacaaggaaaatgttcttgctatttaagttatgaggtggagtgatggctcttatcttgaagatcaggatcactggcggttgggttactccttgattcttacatggattaacgcatggaccgaggaagcgcaatgacaagcctaatagcctgcaactgatgaaaggaatggtctctactacatgtattattgtccatcccatctttgtttaatggtcgtagctgctttatacaattattcctacctatgctagactgtgagccattgtatatcaatgtattttatcatattgatttcgtagcaacgtacgagcatatacctagtatatttataaacaatgtgtagcacttgccacatttaaacagctaatcttaaaaagacacgacatgcgagg

SEQ ID NO: 53540 - DNA, 2074 bp, Zea Mays
gttatattttgaatggtaactagatttctcaacgcaggagattgggttcgttgcttccccagcacagtggtgttttctgcggttggtgtgggatccatggagatttcctgcctctggaaatgaaatacacatgtgtagaatcaaacaacagtagatttttatgaaatttaggattgttcatggagctgaatatggatacatgcaggtggcctttttatagaggaaggaatgagtattaattaagttctaattagttgcgagtagtgttttgtcctatagaactagggagttttgcttcatggtaggtgttcctaggctgcaaattttgtctgatcttgcattgagaatatgatgggtgaagtctgtgacacgtcgcgtcgcgccgtcggtcgaagccagctcaatagtgaggttgaggcctcacaactttctgcaaaactacatgtcaagtgctccaccttgtcagaattttaaagaaacattttgttgtttcaccttgacttcttattgacatggcctattggagagagatctctgtgtgtttctggtttctaattggacatgtaaaagtttatgattagttgttgcataaatggattggctagaattttcaaagtataggtgcttggtgtcttctcatggtcatagggaaaatatcatagctgatattttcacacaagtgaaggatccacaaaagggatttgttccctatggaatgatcaggcatgctaaacatcttagttgtctaacttagttcttcagataaatgatttgtcctttttttaaatgtcatatttttgcttcagggaactactcgtgccattctataaggcaaatgggagccgcaaaccaaataggaaaattttctatggagacatgccagtgaggagcagtttagccggttcttgcattatgaagtggatgcaattagaaaggcgtgtgccagcttggaagagggctaccttcctctagttacattcatagtggtgcaaaagcgccatcacacactgttttgtcctgaagatcatcgttcacacagacaaccagatcgacgtggaaatattttgcaagccactctggcattcaggatgaactagatgcaaaacctgaagagctggaaggagaagagttggaatctaagcttctagagcctgttgcagctctttcggtgcatccagtgcatgtcccaggaaacaagcaactagcttgccctacttcacagaaagttatagctaaatacgatgagctggctgcactacaagctgaaatggcattgtgatcaggacactttggagacaatagttcttatggcgcagtcaggctagcaggctgccatctgagtttgaaattaccgattgctgccatccttgtgatccagacaaggaaaatgttcttgctatttaagttatgaggtggagtgatggctcttatcttgaagatcaggatcactggcggttgggttactccttgattcttacatggtattttaatggatttctagcaatgattttttgcatcttttaaaaaacatagaagatccttaggaatcatatctgcttttaatatgacgtcatttaaacttgaattaggcgccccattcctatcagttcacttctagatatgacaggtagttgatatgtattgcttcgatccgaatttatgagttgaagatatggtttaagcattcgatgaaagtgaactcgaatatccaatattccttaccaacgattccattcagttcatctctctgatgagttatgaatcagtggacttctactcttgcaggattaacgcatggaccgaggaagcgcaatgacaagcctaatagcctgcaactgatgaaaggaatggtctctactacatgtattattgtccatcccatctttgtttaatggtcgtagctgctttatacaattattcctacctatgctagactgtgagccattgtatatcaatgtattttatcatattgatttcgtagcaacgtacgagcatatacctagtatatttataaacaatgtgtagcacttgccacatttaaacagctaatcttaaaaagacacgacatgcgagg

SEQ ID NO: 53541 - DNA, 1566 bp, Zea Mays
gttatattttgaatggtaactagatttctcaacgcaggagattgggttcgttgcttccccagcacagtggtgttttctgcggttggtgtgggatccatggagatttcctgcctctggaaatgaaatacacatgtgtagaatcaaacaacagtagatttttatgaaatttaggattgttcatggagctgaatatggatacatgcaggtggcctttttatagaggaaggaatgagtattaattaagttctaattagttgcgagtagtgttttgtcctatagaactagggagttttgcttcatggtaggtgttcctaggctgcaaattttgtctgatcttgcattgagaatatgatgggtgaagtctgtgacacgtcgcgtcgcgccgtcggtcgaagccagctcaatagtgaggttgaggcctcacaactttctgcaaaactacatgtcaagtgctccaccttgtcagaattttaaagaaacattttgttgtttcaccttgacttcttattgacatggcctattggagagagatctctgtgtgtttctggtttctaattggacatgtaaaagtttatgattagttgttgcataaatggattggctagaattttcaaagtataggtgcttggtgtcttctcatggtcatagggaaaatatcatagctgatattttcacacaagtgaaggatccacaaaagggatttgttccctatggaatgatcagggaactactcgtgccattctataaggcaaatgggagccgcaaaccaaataggaaaattttctatggagacatgccagtgaggagcagtttagccggttcttgcattatgaagtggatgcaattagaaaggcgtgtgccagcttggaagagggctaccttcctctagttacattcatagtggtgcaaaagcgccatcacacactgttttgtcctgaagatcatcgttcacacagacaaccagatcgacgtggaaatattttgcaagtaactgtggttgacacaaagatatgtcatccaagtgaatttgatttctacctttgtagccactctggcattcaggatgaactagatgcaaaacctgaagagctggaaggagaagagttggaatctaagcttctagagcctgttgcagctctttcggtgcatccagtgcatgtcccaggaaacaagcaactagcttgccctacttcacagaaagttatagctaaatacgatgagctggctgcactacaagctgaaatggcattgtgatcagtggacttctactcttgcaggattaacgcatggaccgaggaagcgcaatgacaagcctaatagcctgcaactgatgaaaggaatggtctctactacatgtattattgtccatcccatctttgtttaatggtcgtagctgctttatacaattattcctacctatgctagactgtgagccattgtatatcaatgtattttatcatattgatttcgtagcaacgtacgagcatatacctagtatatttataaacaatgtgtagcacttgccacatttaaacagctaatcttaaaaagacacgacatgcgagg

SEQ ID NO: 53542 - DNA, 1671 bp, Zea Mays
gttatattttgaatggtaactagatttctcaacgcaggagattgggttcgttgcttccccagcacagtggtgttttctgcggttggtgtgggatccatggagatttcctgcctctggaaatgaaatacacatgtgtagaatcaaacaacagtagatttttatgaaatttaggattgttcatggagctgaatatggatacatgcaggtggcctttttatagaggaaggaatgagtattaattaagttctaattagttgcgagtagtgttttgtcctatagaactagggagttttgcttcatggtaggtgttcctaggctgcaaattttgtctgatcttgcattgagaatatgatgggtgaagtctgtgacacgtcgcgtcgcgccgtcggtcgaagccagctcaatagtgaggttgaggcctcacaactttctgcaaaactacatgtcaagtgctccaccttgtcagaattttaaagaaacattttgttgtttcaccttgacttcttattgacatggcctattggagagagatctctgtgtgtttctggtttctaattggacatgtaaaagtttatgattagttgttgcataaatggattggctagaattttcaaagtataggtgcttggtgtcttctcatggtcatagggaaaatatcatagctgatattttcacacaagtgaaggatccacaaaagggatttgttccctatggaatgatcagggaactactcgtgccattctataaggcaaatgggagccgcaaaccaaataggaaaattttctatggagacatgccagtgaggagcagtttagccggttcttgcattatgaagtggatgcaattagaaaggcgtgtgccagcttggaagagggctaccttcctctagttacattcatagtggtgcaaaagcgccatcacacactgttttgtcctgaagatcatcgttcacacagacaaccagatcgacgtggaaatattttgcaaggatgaactagatgcaaaacctgaagagctggaaggagaagagttggaatctaagcttctagagcctgttgcagctctttcggtgcatccagtgcatgtcccaggaaacaagcaactagcttgccctacttcacagaaagttatagctaaatacgatgagctggctgcactacaagctgaaatggcattgtgatcaggacactttggagacaatagttcttatggcgcagtcaggctagcaggctgccatctgagtttgaaattaccgattgctgccatccttgtgatccagacaaggaaaatgttcttgctatttaagttatgaggtggagtgatggctcttatcttgaagatcaggatcactggcggttgggttactccttgattcttacatggattaacgcatggaccgaggaagcgcaatgacaagcctaatagcctgcaactgatgaaaggaatggtctctactacatgtattattgtccatcccatctttgtttaatggtcgtagctgctttatacaattattcctacctatgctagactgtgagccattgtatatcaatgtattttatcatattgatttcgtagcaacgtacgagcatatacctagtatatttataaacaatgtgtagcacttgccacatttaaacagctaatcttaaaaagacacgacatgcgagg

SEQ ID NO: 53543 - DNA, 2192 bp, Zea Mays
cttcccttcggtgaggtaatcaaggagattgggttcgttgcttccccagcacagtggtgttttctgcggttggtgtgggatccatggagatttcctgcctctggaaatgaaatacacatgtgtagaatcaaacaacagtagatttttatgaaatttaggattgttcatggagctgaatatggatacatgcaggtggcctttttatagaggaaggaatgagtattaattaagttctaattagttgcgagtagtgttttgtcctatagaactagggagttttgcttcatggtaggtgttcctaggctgcaaattttgtctgatcttgcattgagaatatgatgggtgaagtctgtgacacgtcgcgtcgcgccgtcggtcgaagccagctcaatagtgaggttgaggcctcacaactttctgcaaaactacatgtcaagtgctccaccttgtcagaattttaaagaaacattttgttgtttcaccttgacttcttattgacatggcctattggagagagatctctgtgtgtttctggtttctaattggacatgtaaaagtttatgattagttgttgcataaatggattggctagaattttcaaagtataggtgcttggtgtcttctcatggtcatagggaaaatatcatagctgatattttcacacaagtgaaggatccacaaaagggatttgttccctatggaatgatcagggaactactcgtgccattctataaggcaaatgggagccgcaaaccaaataggaaaattttctatggagacatgccagtgaggagcagtttagccggttcttgcattatgaagtggatgcaattagaaaggcgtgtgccagcttggaagagggctaccttcctctagttacattcatagtggtgcaaaagcgccatcacacactgttttgtcctgaagatcatcgttcacacagacaaccagatcgacgtggaaatattttgcaagtaactgtggttgacacaaagatatgtcatccaagtgaatttgatttctacctttgtagccactctggcattcaggatgaactagatgcaaaacctgaagagctggaaggagaagagttggaatctaagcttctagagcctgttgcagctctttcggtgcatccagtgcatgtcccaggaaacaagcaactagcttgccctacttcacagaaagttatagctaaatacgatgagctggctgcactacaagctgaaatggcattgtgatcaggttaatgttcgctctatttgtacatcttaatgtgtatttgatgttcctttcatgggattaatttgctggtatctatttcaatatttgattcataacttctgtgtgctccccttaaaaggttgttgtctattaagaagtggaatacacgataatatgcaaccacaaattgtttatcgtgcggtatccaaaaagtttacatgtatacatctcttcagcattttagtttccatttagtatcttctactctctatttgaaagaagtgaagttcttccactccccaaacttataaatcatgttttactgttgtgaattgttttgcttagatgtagacaattttgttttttataggaacatagtttttcaaattgcaccccaaaatatgatagcttatatattttggttatgattaggagtgttgggctgctggctgcccgcttttttttcttttttcctttttaggacactttggagacaatagttcttatggcgcagtcaggctagcaggctgccatctgagtttgaaattaccgattgctgccatccttgtgatccagacaaggaaaatgttcttgctatttaagttatgaggtggagtgatggctcttatcttgaagatcaggatcactggcggttgggttactccttgattcttacatggattaacgcatggaccgaggaagcgcaatgacaagcctaatagcctgcaactgatgaaaggaatggtctctactacatgtattattgtccatcccatctttgtttaatggtcgtagctgctttatacaattattcctacctatgctagactgtgagccattgtatatcaatgtattttatcatattgatttcgtagcaacgtacgagcatatacctagtatatttataaacaatgtgtagcacttgccacatttaaacagctaatcttaaaaagacacgacatgcgagg

SEQ ID NO: 53544 - DNA, 2079 bp, Zea Mays
cgatcccctccccactcgctccgccaccagagccatcacctcaactcgagccacccgatccatcaccgcccttccccacaccctgctccaccatcccgccttcaacgctgcccttccccaggcgatccccttccccacgcgctgcgccaccatgccgccatcaacgccatgccgacaacccgagccatcgccacccgcccaccttccatcaacgccggcgacatgcacgagacgcaacccttgttccccaatttggaaacgctgacatcagcgcctagcgttgcatcaaggatttggatacgcccgcttgcatgcgtcgccccctgatttcctctctgttgtctccttagtctatgcgagccacagccagtcgtagccgcccctcaccgctcgcactcaacccccatccgcacgcagtggagcctggcgtcacagaggcgggcaagggacccagggcaagggaagcggaggatcagcgcaagggatgaggtcgggctggtcggtggagggggcgacggatgtgtgggtggacagcttgaagaagaagcacaagcgtaaggtgttggcggggtagctagaaagaactgctgcaggttgttggcccctgctgtcgcggccgtgacatgggatgggaggaagcttcccttcggtgaggtaatcaagagacatgccagtgaggagcagtttagccggttcttgcattatgaagtggatgcaattagaaaggcgtgtgccagcttggaagagggctaccttcctctagttacattcatagtggtgcaaaagcgccatcacacactgttttgtcctgaagatcatcgttcacacagacaaccagatcgacgtggaaatattttgcaagtaactgtggttgacacaaagatatgtcatccaagtgaatttgatttctacctttgtagccactctggcattcaggatgaactagatgcaaaacctgaagagctggaaggagaagagttggaatctaagcttctagagcctgttgcagctctttcggtgcatccagtgcatgtcccaggaaacaagcaactagcttgccctacttcacagaaagttatagctaaatacgatgagctggctgcactacaagctgaaatggcattgtgatcaggttaatgttcgctctatttgtacatcttaatgtgtatttgatgttcctttcatgggattaatttgctggtatctatttcaatatttgattcataacttctgtgtgctccccttaaaaggttgttgtctattaagaagtggaatacacgataatatgcaaccacaaattgtttatcgtgcggtatccaaaaagtttacatgtatacatctcttcagcattttagtttccatttagtatcttctactctctatttgaaagaagtgaagttcttccactccccaaacttataaatcatgttttactgttgtgaattgttttgcttagatgtagacaattttgttttttataggaacatagtttttcaaattgcaccccaaaatatgatagcttatatattttggttatgattaggagtgttgggctgctggctgcccgcttttttttcttttttcctttttaggacactttggagacaatagttcttatggcgcagtcaggctagcaggctgccatctgagtttgaaattaccgattgctgccatccttgtgatccagacaaggaaaatgttcttgctatttaagttatgaggtggagtgatggctcttatcttgaagatcaggatcactggcggttgggttactccttgattcttacatggattaacgcatggaccgaggaagcgcaatgacaagcctaatagcctgcaactgatgaaaggaatggtctctactacatgtattattgtccatcccatctttgtttaatggtcgtagctgctttatacaattattcctacctatgctagactgtgagccattgtatatcaatgtattttatcatattgatttcgtagcaacgtacgagcatatacctagtatatttataaacaatgtgtagcacttgccacatttaaacagctaatcttaaaaagacacgacatgcgagg

SEQ ID NO: 53545 - DNA, 1378 bp, Zea Mays
atcacaggccgacactccactcgatcaaaatcccttcgtcgtcaccgtccccaccgaaaccgcagtaccgtacccgtgccgacgcgagcacgatggccgccgcggcctcctacttcaccgggccgaccatcttgccgtctcagcgagccaccgcggcgcctgacaattccgccgtcgccaccccttctctggctaagtcgcgtgacccccgctgctccggatgctctcccaccaccgtgcgccacatcgcccgctccttcgccgccgctgatgcgaccagtggtggcgaccctgtcatctctattgacggcgtcgacgccaccaatgtttggcttctggggagggcggtgagcgtgatgaacatggaggctggcgtgtcattcacgctcgatgacggcaccgggcagatcgcgctcatgcggtggatcactgacgatattgatgctaaggaagtgtctttcgtccagaatggtttatacctcaaggttcaagttactctcgtagggtttcaagctaagcagcatggttttgctcactctattaggcctgttactaatttcaatgaattggcgctgcacttcattgaatgtatgtatgtgcatttggaaaatgtccggccaaagatgaaggatcaattccctcgtgctgttcaagcaaatgtgtctgctcacgagatgcaagctcaagtcgctcacacagttcaaacaaatgtgcctgcttatatgcccttctctggtggagtaagagagcatcacgttgattttgctcctgaagtaaaccaagggcgattcccttcatcacttcaaacaaacgcatctactcatgcacccttttctggtggagttggagaacagcaagttcactttactcaacccaaccaacacgatctgcaaagtatggttttggaggttatgcaacaaccagatatacttgcacttgaaaatggagtacatgttgatgaagtggcaaggagacttggaatgccaagagcacaaattatggccattgcccagcgcctggtcgatttggcctgcctctattccactattgatgattatcatttcaagtctcttttaaatggttgatcaatgttatcatcttcaagactagtataatggcatctgggattattggcagtttttaggtactgaatagcattcgtctacatgttttaagtatgcacatctattacatgcatttttttctttgtactgaacacccgtttttttagctgctaagcaaattagtcagactgtcagacatgcagatcgattagaaacttggaatgtcagatcattggcatgctgcagttgctggatggctttgtactgtttatttgtttttattctactagaatatacagcgcaatcttctcact

SEQ ID NO: 53546 - DNA, 1317 bp, Zea Mays
atcacaggccgacactccactcgatcaaaatcccttcgtcgtcaccgtccccaccgaaaccgcagtaccgtacccgtgccgacgcgagcacgatggccgccgcggcctcctacttcaccgggccgaccatcttgccgtctcagcgagccaccgcggcgcctgacaattccgccgtcgccaccccttctctggctaagtcgcgtgacccccgctgctccggatgctctcccaccaccgtgcgccacatcgcccgctccttcgccgccgctgatgcgaccagtggtggcgaccctgtcatctctattgacggcgtcgacgccaccaatgtttggcttctggggagggcggtgagcgtgatgaacatggaggctggcgtgtcattcacgctcgatgacggcaccgggcagatcgcgctcatgcggtggatcactgacgatattgatgctaaggaagtgtctttcgtccagaatggtttatacctcaaggttcaagttactctcgtagggtttcaagctaagcagcatggttttgctcactctattagatgaaggatcaattccctcgtgctgttcaagcaaatgtgtctgctcacgagatgcaagctcaagtcgctcacacagttcaaacaaatgtgcctgcttatatgcccttctctggtggagtaagagagcatcacgttgattttgctcctgaagtaaaccaagggcgattcccttcatcacttcaaacaaacgcatctactcatgcacccttttctggtggagttggagaacagcaagttcactttactcaacccaaccaatttactggtggacaacagcacgatctgcaaagtatggttttggaggttatgcaacaaccagatatacttgcacttgaaaatggagtacatgttgatgaagtggcaaggagacttggaatgccaagagcacaaattatggccattgcccagcgcctggtcgatttggcctgcctctattccactattgatgattatcatttcaagtctcttttaaatggttgatcaatgttatcatcttcaagactagtataatggcatctgggattattggcagtttttaggtactgaatagcattcgtctacatgttttaagtatgcacatctattacatgcatttttttctttgtactgaacacccgtttttttagctgctaagcaaattagtcagactgtcagacatgcagatcgattagaaacttggaatgtcagatcattggcatgctgcagttgctggatggctttgtactgtttatttgtttttattctactagaatatacagcgcaatcttctcact

SEQ ID NO: 53547 - DNA, 2140 bp, Zea Mays
cttcaaccgcacttcgaggaagccacagccgatttctgcagtgcagagggccattcgctcgaaggaggcaccccctagttgatgctgcactggtttcagagattcgaagatgcatagacaatggcattgagttccgtggtgatttactaaatttcagaaaagatggatctccagtgatgaacagattgcatctgacccctatttatggagatgatgaaaccataacccattatatgggcattcaattcttcactgatgctaatgttgatttgggaccattgccctgttcaatgacaaaggaaccagtgaggtcaacacggtttgctctagataacacatttcgacccatttctacgaggccagagcacagcaatttctgcccgggaatattctagtctcttccaattaacggatgaagtgctttgccaaaagtatactgtcaagattgtcaccaagagatatagcatctgtgagctctgtgtgcaggcgattgtatgatttgacaagaaatgaagatctttggagaatggtttgccagaacgcttggggtagtgagaccactcgagctcttgagacagtgcctgccgcaagaaggctgggttggggtcggctggcaagagaactgacaaccctggaagctgttgcctggaggaaattgacagttgggggtgcagtggaaccatctcgatgcaatttcagtgcctgtgctgtagggaatcgtgttgttctctttggtggggaaggtgttaacatgcaaccgatgaatgacacatttgtattagatttaaacgctagcaatccagagtggaggcatatcgatgtgagtgcagctcctccaggtcgctggggccatactctatcatgcttaaatggctcctggttggttgtttttggtgggtgtggaaggcagggtctgcttaacgatgtattcatgctggatttggatgcaaaacaaccaacctggcgtgagatacctggagttgcacccccagttccacgttcatggcacagctcctgcactttggatggaacgaagttggttgtttctggtggctgtgctgattcaggtgtactcctcagtgacacatatcttcttgatgtagccatggataggccagtttggagagaagttcctgcatcctggaaaccaccttctaggctggggcactcaatgtctgtttatggtggcaggaagatcctgatgtttggtggtcttgctaagagcggccctctgcggctccggtctagtgatgtgtacacaatggacttgagtgaagaagagttttgctggcgatgcctcactggtagtggaatgcctggggctggaaatccagctggtgcaggcccacctcctcgcctcgatcatgttgctgtgagcctgccaggcggaagaattttgatatttggcggctcagtggcaggtcttcactcagcgtcacagctttatctgttggatccaactgaagaaaagccgacctggagaatattgaatattcctggtcgtcctccccgtttcgcctggggccacagcacctgtgttgttggaggaacaaaggcgatagtgcttggtggacaaactggagaagagtggatgcttacagaaatacatgagctttctttggtcagccgctcagtttgagttctggaatggtttgtagtcatgttccttgcaaattagatgcggcttcttatgcaacctgaagtttgattgccgtcttcagaagaactagaagaatgaatgctgggcatactgaatcttctggcagctacctggcggacttggaagatgaaatggcatcgactggtttgctcgctttgtgtagaaaaggggtagtgatatgttcatttttattgccgtttgtttggccttttttaccagataattacaattcataagctactactgttgtggaatgagtagcaaattttatatgtattctcagaagttcaagacttgcaatatgttaggaaaacaaaagactgcactgtatatagtttaatcttttgatgtacggtacgtggacaacttgatgctgctgtcttgtggcacaggcacacagctagatggcattatgtatggtgatcactgatcaaccatgtttttttttgtagaacttgtataatatgtagaagtttcaat

SEQ ID NO: 53548 - DNA, 2127 bp, Zea Mays
gctaccttatcccatccgatttctgcagtgcagagggccattcgctcgaaggaggcaccccctagttgatgctgcactggtttcagagattcgaagatgcatagacaatggcattgagttccgtggtgatttactaaatttcagaaaagatggatctccagtgatgaacagattgcatctgacccctatttatggagatgatgaaaccataacccattatatgggcattcaattcttcactgatgctaatgttgatttgggaccattgccctgttcaatgacaaaggaaccagtgaggtcaacacggtttgctctagataacacatttcgacccatttctacgaggccagagcacagcaatttctgcccgggaatattctagtctcttccaattaacggatgaagtgctttgccaaaagtatactgtcaagattgtcaccaagagatatagcatctgtgagctctgtgtgcaggcgattgtatgatttgacaagaaatgaagatctttggagaatggtttgccagaacgcttggggtagtgagaccactcgagctcttgagacagtgcctgccgcaagaaggctgggttggggtcggctggcaagagaactgacaaccctggaagctgttgcctggaggaaattgacagttgggggtgcagtggaaccatctcgatgcaatttcagtgcctgtgctgtagggaatcgtgttgttctctttggtggggaaggtgttaacatgcaaccgatgaatgacacatttgtattagatttaaacgctagcaatccagagtggaggcatatcgatgtgagtgcagctcctccaggtcgctggggccatactctatcatgcttaaatggctcctggttggttgtttttggtgggtgtggaaggcagggtctgcttaacgatgtattcatgctggatttggatgcaaaacaaccaacctggcgtgagatacctggagttgcacccccagttccacgttcatggcacagctcctgcactttggatggaacgaagttggttgtttctggtggctgtgctgattcaggtgtactcctcagtgacacatatcttcttgatgtagccatggataggccagtttggagagaagttcctgcatcctggaaaccaccttctaggctggggcactcaatgtctgtttatggtggcaggaagatcctgatgtttggtggtcttgctaagagcggccctctgcggctccggtctagtgatgtgtacacaatggacttgagtgaagaagagttttgctggcgatgcctcactggtagtggaatgcctggggctggaaatccagctggtgcaggcccacctcctcgcctcgatcatgttgctgtgagcctgccaggcggaagaattttgatatttggcggctcagtggcaggtcttcactcagcgtcacagctttatctgttggatccaactgaagaaaagccgacctggagaatattgaatattcctggtcgtcctccccgtttcgcctggggccacagcacctgtgttgttggaggaacaaaggcgatagtgcttggtggacaaactggagaagagtggatgcttacagaaatacatgagctttctttggtcagccgctcagtttgagttctggaatggtttgtagtcatgttccttgcaaattagatgcggcttcttatgcaacctgaagtttgattgccgtcttcagaagaactagaagaatgaatgctgggcatactgaatcttctggcagctacctggcggacttggaagatgaaatggcatcgactggtttgctcgctttgtgtagaaaaggggtagtgatatgttcatttttattgccgtttgtttggccttttttaccagataattacaattcataagctactactgttgtggaatgagtagcaaattttatatgtattctcagaagttcaagacttgcaatatgttaggaaaacaaaagactgcactgtatatagtttaatcttttgatgtacggtacgtggacaacttgatgctgctgtcttgtggcacaggcacacagctagatggcattatgtatggtgatcactgatcaaccatgtttttttttgtagaacttgtataatatgtagaagtttcaat

SEQ ID NO: 53549 - DNA, 1783 bp, Zea Mays
ggcgcggccgaccgagccttctgggcgtcgaaatcgccacccatccatgctgtcgttctacaacatgctgtggcggattccttcctggtgcgcgcgcgcccaagcccgttcctcctcttcttgcccatccacccacaacacatgcttataaaaaggccgtcgtcgttgccgccatgtaactcactcatcgtcagtcagtcgtcacagtactcgatcgagcgcgatctgatctctttccgagcaatcatccgttctagcgtagtagagcgcatggacatggcctcgtcctctgtatcagcagctctcctcctggctgtctccctcgccgctctgcacttgtgctgccgccatgggcacggtgccggcgacgccgccggcaacggcatcactgccatctacagcctcggcgactccatcactgacaccgggaacctcgtcaaggaggcgcctccgggcatgttcgagaccatcaagcacctcccctacggcgtcacgttcgggtacccgaccgggcggtgctccgacggcctcctcatgatcgacttcctggctcaggacctgggtctcccgttcctgaacccgtacctgggcaagaacaagagcttcgaccacggcgtcaacttcgccgtcgccggagccaccgccgtggacccggccgaccagttcaacctccccgccgtccccgtgccgttcgcctccaagtccctcaaggtgcagctccggtggttcaaggacttcctcaagtacaccttcggcaccgatgaaggcagcaggctcaaacccttgcactgcgtgtggctgcgcgcatgcatgcgtgcgtgcagagattcgcagacggcttcaagcttctctggttttggtcggggagatcggcgggaacgactacaactacgccttcttccaggccaagcctgtggccgaggtggagaagctcatcccaggggtcgtgaagaccatcgtcggcgccgccaaggaggtgctggacatgggcgccaccagggtcatcgtcccgggcaacttccccatcggctgcgtgccgggctacctggccatgaacgccgcctcgtcggagccggcggactacgactcggcggggtgcctccgggagctcaacgacttcgccgccaagcacaactcgcggctccggcgcgccgtcgccgacctgcaggcgtcgtacccgggcgccgccgtcgcctacgccgactacttcgactccttcctcaccctcctccacaacgcctcctcgttcggtttcgacgccgcgagcacgcgcaaggcctgctgcggcgccggtgccggcgagtacaacttcgactggcggcggatgtgcggcttcccggggacggcggcgtgcgctgacccgtccacgtacctgagctgggacggcatacacatgacgcaggcggcgtacagggccatgtccaggctcatctaccacggcaagtacctgcagccacagatactgagcttcccggagaaaaacgggcagacataaactcacgtcgtcatcatatatagaacttagttagaaaatatactcgaaacaccggctacaaataagctgtcagtagtcagctgtatcggtaagtacatgcgcgctgttcaactaatgctatcatcaagctgtgagccacactgagtgtgagcaaaatatacacgttgcatgcagtgcagtcagctgcactgaatccacgatgaagtcacacagaacacaaacgcgtgtaccagaacggatgcagaggaagaaggctgtcgacaaggcatgagttgttcattaccttgt

SEQ ID NO: 53550 - DNA, 2168 bp, Zea Mays
ccagaattgttattgtaacgaggatggacagccaggataactcatggatgtgggccccgggtatcttcagatctctccggcaaactacaagcatgtgaagatatgtatggcctagcttatctatcagatggagagagagaggtgttgccaagtccaaaaaatcctgatatctttaatcgcggcaaaaaaaaactgcgtggcatatctgcttcacatgtttttaggtaggcttcttgtttcattaaaccaaccagatttggctctccgattggcttggctgctggctgcacttggttccctgatctttcctcgaattggataaacaaatagcaacgcagcagcatacctcctgctaactaaccatctccagctcctcatctttttgcattgccgccctgtacaaaaggacgctgtttgcttcataagcacgaggagagatacatcgtggaagctactcaccaagtgtcttactcagaaccctttgatcataagcacgaggagagatacaaaagggcgctgtttgcttcataggctctgagatgagtaatgggtgctgaggatagagttgcgcaagcttcctcccattctgcgtccctgctaacatctggagattgccagtggctatgatctgtaaccaaagaagagggaaagtgtgagattagcagctggttcagtgttagctcagtatccatcattcacttgaaataaccagatcattgctgagagctggtgagcaagagcttctatgcaccttggaagagccaatggacgagcactgcgtacgagacagcaaggactcagttcggacaacaatcgtggagcatgataaggtcttcagacagcaggtgcatgagttgcatcgtttgtatcatgtacaaaaatcattgatggctgcatgcgataaccatggttatcagacgagaacagaagaaactcacagaatggtgcaggggtcaaagttgaatctcaagagcagtccttcaacatcagggacaaatcaatcagctcgccttggtaatgcacaacactcaactccccagcaagtaactgaagattcgagtcttcacgaatgcaagccagtaaactgcctcagcctctttagtgaagaaaactcaacagtcaaagaaagatttcacagggagacccataaatcagttgaagacgaaagttggagtgcatctgtagagagtgatcttgacctcaaactaagcattgggcccagttcacattcaccaaaaacacagcactgggtattctcaggaagcgaggaaagaaaaccttctggtcagcatcgatgagagcaagctagtgaacatccaatcatttagtttgatgtcgtgagaatcgaaacacagcacacaatagtttcgtatgctcagaaagctgaagcctccattgaaaatggcatgtggatctgtggaaatacaggcctcaagaaaaaatgaacttctaactcacatggcgcctggccaacaacaaatggcccagaaatgcttccatcagattttgatcagaattatttagtcactagtgatctgtataaaaaatgtagagcctcccaggtaccaatactttctgtgggtagaactgcactaatgtaatgccaagcagaggattgatgacaattcagttctttcttgtcatgtgcataacttttgagtttcagaaccaaagcgataaagaaacatttgataagtattgtttttgaaagaacccaaaaaaaaatcctttcagttctccaacaaattatatatttgtattcaatagtatacttagtatttttttaatgacccaccatgattgatgccttgctatttgtatttgaactgtgtgcagttcatgcttttaactatcatttttttcaaaatcaacatgtccacttctgcaatcaaacacccacttcctcattaccaatgcactgccaactaaatctgccctgttcttagctttggcatgttttgaatcattccatacaaagattgacatcatttaactgctctggattcataaacagcgttctaagctttgccttgctgttcagagttgaccttcatatattaaaaaaaagccagataaacaagccgggcaaggtactattaattgatggaggtttattctcacatgtttattttctactaataaaatccatatcctgcattcaccaaaat

SEQ ID NO: 53551 - DNA, 2713 bp, Zea Mays
ccagaattgttattgtaacgaggatggacagccaggataactcatggatgtgggccccgggtatcttcagatctctccggcaaactacaagcatgtgaagatatgtatggcctagcttatctatcagatggagagagagaggtgttgccaagtccaaaaaatcctgatatctttaatcgcggcaaaaaaaaactgcgtggcatatctgcttcacatgtttttaggtaggcttcttgtttcattaaaccaaccagatttggctctccgattggcttggctgctggctgcacttggttccctgatctttcctcgaattggataaacaaatagcaacgcagcagcatacctcctgctaactaaccatctccagctcctcatctttttgcattgccgccctggtatcttgcttacccatcatctttcacacagcctgtcagccattgcattgctagcttttcttcacttctggttggcatctcttcttgtttctagtacaaaaggacgctgtttgcttcataagcacgaggagagatacatcgtggaagctactcaccaagtgtcttactcagaaccctttgatcataagcacgaggagagatacaaaagggcgctgtttgcttcataggctctgagatgagtaatgggtgctgaggatagagttgcgcaagcttcctcccattctgcgtccctgctaacatctggagattgccagtggctatgatctgtaaccaaagaagagggaaagtgtgagattagcagctggttcagtgttagctcagtatccatcattcacttgtaagcacagtgcacttgactgaacactacagttatagtttttatgacagaatctctcctgctctaagtgatgcctactacacacaaggtactcatctttcagactggctgtttcaggaaataaccagatcattgctgagagctggtgagcaagagcttctatgcaccttggaagagccaatggacgagcactgcgtacgagacagcaaggactcagttcggacaacaatcgtggagcatgataaggtcttcagacagcaggtaagccttgtactctcgtcgtccatatcataaggattcaccagatagacagagagagaacataagaaagcaaggagatcaggcaccctaatgggtctcgactcctgagccttttcatttgcgaggcatatttgcaacacatagacgagaggttaacagactgctccagtttcataatatattgtactattgtagttctgcaaactactgcttatgctgcataaaccttcatctttctagtgataagtagacaaccacttgttagtcaaacctaagttgtcttgtcattcatgcaacaagaacttttgtgtctgatactgcttctttgcatcaggtgcatgagttgcatcgtttgtatcatgtacaaaaatcattgatggctgcatgcgataaccatggttatcagacgagaacagaagaaactcacagaatggtgcaggggtcaaagttgaatctcaagagcagtccttcaacatcagggacaaatcaatcagctcgccttggtaatgcacaacactcaactccccagcaagtaactgaagattcgagtcttcacgaatgcaagccagtaaactgcctcagcctctttagtgaagaaaactcaacagtcaaagaaagatttcacagggagacccataaatcagttgaagacgaaagttggagtgcatctgtagagagtgatcttgacctcaaactaagcattgggcccagttcacattcaccaaaaacacagcactgggtattctcaggaagcgaggaaagaaaaccttctggtcagcatcgatgagagcaagctagtgaacatccaatcatttagtttgatgtcgtgagaatcgaaacacagcacacaatagtttcgtatgctcagaaagctgaagcctccattgaaaatggcatgtggatctgtggaaatacaggcctcaagaaaaaatgaacttctaactcacatggcgcctggccaacaacaaatggcccagaaatgcttccatcagattttgatcagaattatttagtcactagtgatctgtataaaaaatgtagagcctcccaggtaccaatactttctgtgggtagaactgcactaatgtaatgccaagcagaggattgatgacaattcagttctttcttgtcatgtgcataacttttgagtttcagaaccaaagcgataaagaaacatttgataagtattgtttttgaaagaacccaaaaaaaaatcctttcagttctccaacaaattatatatttgtattcaatagtatacttagtatttttttaatgacccaccatgattgatgccttgctatttgtatttgaactgtgtgcagttcatgcttttaactatcatttttttcaaaatcaacatgtccacttctgcaatcaaacacccacttcctcattaccaatgcactgccaactaaatctgccctgttcttagctttggcatgttttgaatcattccatacaaagattgacatcatttaactgctctggattcataaacagcgttctaagctttgccttgctgttcagagttgaccttcatatattaaaaaaaagccagataaacaagccgggcaaggtactattaattgatggaggtttattctcacatgtttattttctactaataaaatccatatcctgcattcaccaaaat

SEQ ID NO: 53552 - DNA, 2787 bp, Zea Mays
tcggttaatctcgttactcatggattagattggattgaaataatttaaaaagtttgacttgtttagaattttaacccatagaatcctattcaatcatatggattgagagctaaccgaataagccctaaagaatttataacacacatggaagctcaatcggcagtttagttttgtgaggctgtgggcagatcccagaattgttattgtaacgaggatggacagccaggataactcatggatgtgggccccgggtatcttcagatctctccggcaaactacaagcatgtgaagatatgtatggcctagcttatctatcagatggagagagagaggtgttgccaagtccaaaaaatcctgatatctttaatcgcggcaaaaaaaaactgcgtggcatatctgcttcacatgtttttaggtaggcttcttgtttcattaaaccaaccagatttggctctccgattggcttggctgctggctgcacttggttccctgatctttcctcgaattggataaacaaatagcaacgcagcagcatacctcctgctaactaaccatctccagctcctcatctttttgcattgccgccctggtatcttgcttacccatcatctttcacacagcctgtcagccattgcattgctagcttttcttcacttctggttggcatctcttcttgtttctagtacaaaaggacgctgtttgcttcataagcacgaggagagatacatcgtggaagctactcaccaagtgtcttactcagaaccctttgatcataagcacgaggagagatacaaaagggcgctgtttgcttcataggctctgagatgagtaatgggtgctgaggatagagttgcgcaagcttcctcccattctgcgtccctgctaacatctggagattgccagtggctatgatctgtaaccaaagaagagggaaagtgtgagattagcagctggttcagtgttagctcagtatccatcattcacttgaaataaccagatcattgctgagagctggtgagcaagagcttctatgcaccttggaagagccaatggacgagcactgcgtacgagacagcaaggactcagttcggacaacaatcgtggagcatgataaggtcttcagacagcaggtaagccttgtactctcgtcgtccatatcataaggattcaccagatagacagagagagaacataagaaagcaaggagatcaggcaccctaatgggtctcgactcctgagccttttcatttgcgaggcatatttgcaacacatagacgagaggttaacagactgctccagtttcataatatattgtactattgtagttctgcaaactactgcttatgctgcataaaccttcatctttctagtgataagtagacaaccacttgttagtcaaacctaagttgtcttgtcattcatgcaacaagaacttttgtgtctgatactgcttctttgcatcaggtgcatgagttgcatcgtttgtatcatgtacaaaaatcattgatggctgcatgcgataaccatggttatcagacgagaacagaagaaactcacagaatggtgcaggggtcaaagttgaatctcaagagcagtccttcaacatcagggacaaatcaatcagctcgccttggtaatgcacaacactcaactccccagcaagtaactgaagattcgagtcttcacgaatgcaagccagtaaactgcctcagcctctttagtgaagaaaactcaacagtcaaagaaagatttcacagggagacccataaatcagttgaagacgaaagttggagtgcatctgtagagagtgatcttgacctcaaactaagcattgggcccagttcacattcaccaaaaacacagcactgggtattctcaggaagcgaggaaagaaaaccttctggtcagcatcgatgagagcaagctagtgaacatccaatcatttagtttgatgtcgtgagaatcgaaacacagcacacaatagtttcgtatgctcagaaagctgaagcctccattgaaaatggcatgtggatctgtggaaatacaggcctcaagaaaaaatgaacttctaactcacatggcgcctggccaacaacaaatggcccagaaatgcttccatcagattttgatcagaattatttagtcactagtgatctgtataaaaaatgtagagcctcccaggtaccaatactttctgtgggtagaactgcactaatgtaatgccaagcagaggattgatgacaattcagttctttcttgtcatgtgcataacttttgagtttcagaaccaaagcgataaagaaacatttgataagtattgtttttgaaagaacccaaaaaaaaatcctttcagttctccaacaaattatatatttgtattcaatagtatacttagtatttttttaatgacccaccatgattgatgccttgctatttgtatttgaactgtgtgcagttcatgcttttaactatcatttttttcaaaatcaacatgtccacttctgcaatcaaacacccacttcctcattaccaatgcactgccaactaaatctgccctgttcttagctttggcatgttttgaatcattccatacaaagattgacatcatttaactgctctggattcataaacagcgttctaagctttgccttgctgttcagagttgaccttcatatattaaaaaaaagccagataaacaagccgggcaaggtactattaattgatggaggtttattctcacatgtttattttctactaataaaatccatatcctgcattcaccaaaat

SEQ ID NO: 53553 - DNA, 3031 bp, Zea Mays
caacgactctaactctatcctcacccctgaagcagagcattgcaagagaaagggccagcaggacacgcgtcgtccgcctacgcagcgggagcggcgtgcggcgccgttggcccgttgcatagaaggatttctttttcccgaaggtgttagtcaggcccggccctgctcggcccagcccatctatataagcgcccgcctctctccccacttaaagcaagcagccagtgttaatcatagtagctccacacgcgcggaggtagtatagccgggaggggcacagagagaggagcgaacgagaggaaggagcagcggcaactacacgccagagagagggaaggggaggttggccagagagccgagagcagccctgcagtcgagagcatccgactgctagctactagcaatagcataggcagataagctcgggccgggccggggcacgcgcacaatgaggtcgcggcggtggcacagcgtggtcgccgtagcgctggcagcggcggcgtggtggtggtgcgcggcggcgcaggcgcaggcgcaggcgcagctgagccagagctactacgcgtcgacgtgccccgacgtggagacgctggtccgcggcgccgtcacccagaagctgcaggagaccttcaacgcggcgccgggcacgctccgcctcttcttccatgactgcttcgtcaggggctgcgacgcgtccgtgctgctgtcgggccccgacgacgagcacagcgcgggcgccgacaccacgctgtccccggacgcgctcgacctggtcacccgcgccaaggccgccgtggacgccgacccgcgctgcgccaacagggtgtcctgcgccgacatcctcgccctcgccgcccgcgacgtcgtctcccaggtactgtgctgtgctgtgtgtttcctaggctaggccggccaggcggcgtggcttattacgcttaaaccttacgccatcagcgcaccgtcgtgataataataatcacccatgcttgctactagtgctttggagtggtttacggggcatgtcaggcgaggcccggacgacagctatgatgaggctgcccatggctgtctgtcccctcccgcatgggcgaacgagtgccgcagctggagcgcccgatccacgctgccaggcgcagtcgctgaccctgaggcctgagctgtgccgcaagtccgcaaccatgcatcctagtcccgtcatgtccagcaaccaaccaggcctctgaccgcagaggaggggggagggaagggaaaaacaggggattgggtttttgtgtgtgtgtgtgtgtgtgtgtgggcggggtgtgtggtcgtggtccttgcttgctgcccgtcctgtcgtaattctgctgtccccggctcattcactcggagcaacaaacaacacatcacagattcacagcaaagcacagcacgcgggccagagccagacttcagagctgggtgtgggtgctggccggccgacgacgcccgccgtttgtcactgctgcctgcgtccccgccccccccccccccccccccccccccccctttgaattcttctctgacgacggctgggacagcggacacggtttcgcggcgtaaatgagccggtacggcgacggggatggtccggcacctaatccgccgggctggtgcggtaccgcgctgccattgcctgtgctgtgcggctacctccgtgctcgtagaagattactgagctagacatacgggccaccatacggatacgggctctcattagttattgtgctgagcaagcaagagcaactccgccggagttttcttctctgactgctctgcgtgtaaaaaagaagaagaaaagaaaagaggatttcactgcatgaacgcaactacttattaccgatgatgatgatgatgatgacgatgatgtgatggttgggattggtggtgcagacgggcgggccgtactaccaggtggagctggggcggctggacggcaaggtaggcacgcgtgccgcggtgaagcacagcctcccgggcgccggcttcgacctggaccagctcaacaagctcttcgccgccaacgggctcacgcagaccgacatgatcgcgctctcaggtgggcacacgatcggggtgacgcactgcgacaagttcgtgcggcggctgtacccgttcaagggcgccgccgccggcccgccgatgaacctctacttcctgcggcagatgcggcggacgtgcccgctgaactacggcccgtcggcgttcgcgatgctggacgccgtgacgccccgcgcgttcgacaacggctactaccggacgctgcagcagatgaagggcctgctggcctccgaccaggtgctcttcgctgaccgccgctcccgcgccaccgtcaaccgcttcgccgccaaccagaccgccttcttcgacgccttcgccaacgccatggccaagctcggccgcgtgggcgtcaagaccgccgccgacggcgaggtccgccgggtatgcaccagggtcaactagccctgcccagctccagatgcaatgcatgcgagccacgtccacgtgcacatgaaatgaagctagctagctgctagcctagctttagctagctcgttattactaggggcgccgggggttgggaaagaatgcttcatgagtcatgtccgtccattcatccatccatccatccatcacacggttcacagtcagtcacagtgtactattgattcgttggtccgccgattcttttctttccttggtgattgttgtgtatgtagcagaagtaataattaaaaaaaccatgtaacaagaagagggatgagctttgagctccacacttgtactgcatccaatccaatgtaaatgaatgccacggttcgtcgtcgtccttgcttgctctttgacagttgccggtcagtcagtcagtcacgagaaacatgaatggcggctccaggctgatgacagaacgaacatgtatggtccaaagtcctccgtcatcataaatacagccccggcatgagagctgtgtgcgtgtgtgctatggcaggtcggagagaccatgtgatgtgac

SEQ ID NO: 53554 - DNA, 805 bp, Zea Mays
aaatcatttgcgatgaaattgatcaaagctacgtacaagcgttgctagcattggataggattgaacatgatgttgaattgacttatgagcaactgcttctgctagaaactaatctgctcttaagtggccttgatttgcacgatcaacatgaagatatgagattggatatcgacaatatgtcttatgaggaactgcttgctttggaagagcatattggctcagtgactactgcccttactgaagagcaatttaccaagtgtgtaaaccaaagtgtgtatgaagcaagaaattcttatagagatgtaagcaagatcgcagcagatgatgtgaaatgtagcgtatgtcaggaggaatacgttgatggtgaagagattggtacaatgcaatgtgaacatcagtaccatgtgcgctgcattcacgaatggcttaagcagaagaattggtgtccaatatgcaaagcttcagctataccttcagagatgaccaagggagacgcatgaatcttggcccaaacttgtaaatagcgtggatttattattagacattgtagatgctgacgcagttcaccccaatatgtggatacgatagtctctcccgaacggtcgaacgcctggaaccttttgttactgcatcttttatcttcttagcacacccttgctgcttgacagcagtacgggtcagaaactcgaaaataaccgtggttctcaagaaatttttccagattctaaatatgaaattgttctccttgattgaaatgttgggttacatggtttatctaaagaccatctccagcaatttacccata

SEQ ID NO: 53555 - DNA, 815 bp, Zea Mays
ctcaatcctgtgttgagattctctttttaatgcaatgccacagcagaggcgttgctagcattggataggattgaacatgatgttgaattgacttatgagcaactgcttctgctagaaactaatctgctcttaagtggccttgatttgcacgatcaacatgaagatatgagattggatatcgacaatatgtcttatgaggaactgcttgctttggaagagcatattggctcagtgactactgcccttactgaagagcaatttaccaagtgtgtaaaccaaagtgtgtatgaagcaagaaattcttatagagatgtaagcaagatcgcagcagatgatgtgaaatgtagcgtatgtcaggaggaatacgttgatggtgaagagattggtacaatgcaatgtgaacatcagtaccatgtgcgctgcattcacgaatggcttaagcagaagaattggtgtccaatatgcaaagcttcagctataccttcagagatgaccaagggagacgcatgaatcttggcccaaacttgtaaatagcgtggatttattattagacattgtagatgctgacgcagttcaccccaatatgtggatacgatagtctctcccgaacggtcgaacgcctggaaccttttgttactgcatcttttatcttcttagcacacccttgctgcttgacagcagtacgggtcagaaactcgaaaataaccgtggttctcaagaaatttttccagattctaaatatgaaattgttctccttgattgaaatgttgggttacatggtttatctaaagaccatctccagcaatttacccata

SEQ ID NO: 53556 - DNA, 1837 bp, Zea Mays
ctccctcccttcttcgattgccgtcttctctggcttccattttcgcgaggaggcgaggtggacagagacgccgccgccgcttccgcttcgacctcgacctcggcttcggcttccacgagaattctagcaagtcttctggagaatataatccacatctgtttattttgctgcattttggtatggacgaatctgcctgtagatccactgccccagttgggtttcttagaagaggttcgggcatttccttgagaaatcaaagcaatgaggataggtcaaatcagtacaacaagcagccagggaagagttcaaatcccaatcctgtaaaattacggttcactgaaaataaagagaaaccaaggtattttcaagggacatttcattcatcaggctccagggcctcatctgtaagctcttcaaaagctccaactgcccctggcactggagcacagagacgtggcctcaaaaatcttggttgcacttcaatatctgatgttctgccttcaggatgctcttcatctgattctgctcgtgataggagaatcgaagttacaaagaagagaacttctggtgcaggaagttcttcaagatcaaggataagtgaacaatctaatttcagtcagccacgtgctagttatcctggcagtactggtcctagagctagagctgctgaacaatcagcttctcaacaaacagcaaggaccaatagccgaaatattccggatcatacagattcaataaggactagacgaccttttactctacgtgccagggagaggatgatgccaggtgaaagggaggacagtgtatttgctctgcatgagactgttgcaagcattcatccagaatgcggacattttcacatggatggtactcccccagagagattaggaagacccttttatgcagaactacctcatgcaatttattcatctaatcgtcaaggatcaagtagtcagacagcaaggagaagatctacgtctcgtactgaagaaagccctcaacggatgtttcatggtatgttttgggagagagatggctacagggggataaacatggaaggaattgcacaggcgttgctagcattggataggattgaacatgatgttgaattgacttatgagcaactgcttctgctagaaactaatctgctcttaagtggccttgatttgcacgatcaacatgaagatatgagattggatatcgacaatatgtcttatgaggaactgcttgctttggaagagcatattggctcagtgactactgcccttactgaagagcaatttaccaagtgtgtaaaccaaagtgtgtatgaagcaagaaattcttatagagatgtaagcaagatcgcagcagatgatgtgaaatgtagcgtatgtcaggaggaatacgttgatggtgaagagattggtacaatgcaatgtgaacatcagtaccatgtgcgctgcattcacgaatggcttaagcagaagaattggtgtccaatatgcaaagcttcagctataccttcagagatgaccaagggagacgcatgaatcttggcccaaacttgtaaatagcgtggatttattattagacattgtagatgctgacgcagttcaccccaatatgtggatacgatagtctctcccgaacggtcgaacgcctggaaccttttgttactgcatcttttatcttcttagcacacccttgctgcttgacagcagtacgggtcagaaactcgaaaataaccgtggttctcaagaaatttttccagattctaaatatgaaattgttctccttgattgaaatgttgggttacatggtttatctaaagaccatctccagcaatttacccata

SEQ ID NO: 53557 - DNA, 2685 bp, Zea Mays
ctccctcccttcttcgattgccgtcttctctggcttccattttcgcgaggaggcgaggtggacagagacgccgccgccgcttccgcttcgacctcgacctcggcttcggcttccacgagaattctagcaagtcttctggagaatataatccacatctgtttattttgctgcattttggtatggacgaatctgcctgtagatccactgccccagttgggtttcttagaagaggttcgggcatttccttgagaaatcaaagcaatgaggataggtcaaatcagtacaacaagcagccagggaagagttcaaatcccaatcctgtaaaattacggttcactgaaaataaagagaaaccaaggtattttcaagggacatttcattcatcaggctccagggcctcatctgtaagctcttcaaaagctcctgctagaaaatactgcgacgagagacagaaacagccctttttggcagagacagacattgctgaaagcagtaacagaagaactgaggttagacgcctacaaagtggcaagaaagcttctgtatttggtgatgggcatccatacacacagaagagtatctcagaagcttcatcatcctcaacaattactggaggcttgccagaagagcatgatcttggagctttatatgtttctggttcttcaggtagttctgcacatccagttaatcccaggaatgctgcattgaatgcttcggcacatatgcaaaaggataaagaagaaatgagttcaggtagacctcaaggtgctcccacttttgttcgtcggcatactttacctcaaagtttttccactggtgtcaagtcaccaactgcccctggcactggagcacagagacgtggcctcaaaaatcttggttgcacttcaatatctgatgttctgccttcaggatgctcttcatctgattctgctcgtgataggagaatcgaagttacaaagaagagaacttctggtgcaggaagttcttcaagatcaaggataagtgaacaatctaatttcagtcagccacgtgctagttatcctggcagtactggtcctagagctagagctgctgaacaatcagcttctcaacaaacagcaaggaccaatagccgaaatattccggatcatacagattcaataaggactagacgaccttttactctacgtgccagggagaggatgatgccaggtgaaagggaggacagtgtatttgctctgcatgagactgttgcaagcattcatccagaatgcggacattttcacatggatggtactcccccagagagattaggaagacccttttatgcagaactacctcatgcaatttattcatctaatcgtcaaggatcaagtagtcagacagcaaggagaagatctacgtctcgtactgaagaaagccctcaacggatgtttcatggtatgttttgggagagagatggctacagggggataaacatggaaggaattgcacaggcgttgctagcattggataggattgaacatgatgttgaattgacttatgagcaactgcttctgctagaaactaatctgctcttaagtggccttgatttgcacgatcaacatgaagatatgagattggatatcgacaatatgtcttatgaggaactgcttgctttggaagagcatattggctcagtgactactgcccttactgaagagcaatttaccaagtgtgtaaaccaaagtgtgtatgaagcaagaaattcttatagagatgtaagcaagatcgcagcagatgatgtgaaatgtagcgtatgtcaggtatttttcactctagtatttcaatgtttaagtatcgatgaattgaaattactagccttgttcggttgcgtctggatcaaagactattggaggaggggattaaatcactccctagtcaaaattgaatagaaggggatttaatccccttcgatccagacgcaactgaacaaagccttaagggtgtacacaatcaaaggaaagaaagtatactgatgctgtggaaggttgcacaaagaactcatatcttcaggtcttcaacaccctcaaccaaaaacatatacttttaaacctgtacctattccaacaatgtatctcatgttgttttccatttgacatgtcatattcctatcaattacttgtttaaataaacaactatctcctggacactggaagattattgttctgccgcctgtattctgcctgaccctgacttgatgttccaggaggaatacgttgatggtgaagagattggtacaatgcaatgtgaacatcagtaccatgtgcgctgcattcacgaatggcttaagcagaagaattggtgtccaatatgcaaagcttcagctataccttcagagatgaccaagggagacgcatgaatcttggcccaaacttgtaaatagcgtggatttattattagacattgtagatgctgacgcagttcaccccaatatgtggatacgatagtctctcccgaacggtcgaacgcctggaaccttttgttactgcatcttttatcttcttagcacacccttgctgcttgacagcagtacgggtcagaaactcgaaaataaccgtggttctcaagaaatttttccagattctaaatatgaaattgttctccttgattgaaatgttgggttacatggtttatctaaagaccatctccagcaatttacccata

SEQ ID NO: 53558 - DNA, 886 bp, Zea Mays
ctccctcccttcttcgattgccgtcttctctggcttccattttcgcgaggaggcgaggtggacagagacgccgccgccgcttccgcttcgacctcgacctcggcttcggcttccacgaggcgttgctagcattggataggattgaacatgatgttgaattgacttatgagcaactgcttctgctagaaactaatctgctcttaagtggccttgatttgcacgatcaacatgaagatatgagattggatatcgacaatatgtcttatgaggaactgcttgctttggaagagcatattggctcagtgactactgcccttactgaagagcaatttaccaagtgtgtaaaccaaagtgtgtatgaagcaagaaattcttatagagatgtaagcaagatcgcagcagatgatgtgaaatgtagcgtatgtcaggaggaatacgttgatggtgaagagattggtacaatgcaatgtgaacatcagtaccatgtgcgctgcattcacgaatggcttaagcagaagaattggtgtccaatatgcaaagcttcagctataccttcagagatgaccaagggagacgcatgaatcttggcccaaacttgtaaatagcgtggatttattattagacattgtagatgctgacgcagttcaccccaatatgtggatacgatagtctctcccgaacggtcgaacgcctggaaccttttgttactgcatcttttatcttcttagcacacccttgctgcttgacagcagtacgggtcagaaactcgaaaataaccgtggttctcaagaaatttttccagattctaaatatgaaattgttctccttgattgaaatgttgggttacatggtttatctaaagaccatctccagcaatttacccata

SEQ ID NO: 53559 - DNA, 1403 bp, Zea Mays
atggcgtggtgcgtgggaccggaccgacaccgagaccagccgccaccgaatcccgccgctcttctggccgccgagttgtcaagcaacgcacgcaccacaagccgcccgcctcagttgaagccccgcggaaaggctggctgcgagtgcgagaccgaccaaacaaagaacacatatcaatcaccagctcacagtgggaggggacgcacgatcggcacccggccatcccctccctcctcttcctcgcacgtcctcttccattccagtaatgggctctgcttcatcaggccgtactgtcacaatttacctgcagatggtctccgggagcacttgctggacgtggacggcggcggagcggcggcggtgcccaagatacgggtgcgcgggctgcggcgccgcgcggacgcgaccggcgaggagatcctccgcggcgtccacctcgacgtgccgcgcggggccgtcatgggcgtcatcggccccagcggcagcggcaagtccacgctgctccgcgcgctcaaccgcctctgggagcccgcgcccggcgccgtgctcctcgacggcgccgacatctgcgccctcgacgtcctcgccctgcgccgcaaggaaccgtggctgacaacgtacgatacgggccgcagttgcgcggcaagaagctaaccgaggccgaagtgaagagcctgctgcacctggccgacctggaccctgctctgtgctccaagccggcgtccgagctgtcggtcgggcaggcacagcgcgtcgccctggcccggaccctcgccaacgaccccgaggtgctcctgctggacgagccgaccagcgcgctggaccccatctcgacgcagaacatcgaggaggccatcgtgcggctgaagaagacgagggggctcaccacggtgatcgtctcccacagcgtgaagcagatccagcgcatcgccgacctggtgtgcctcgtcgtcgccggcgaggtcgtggaggtgctcgcgccgtccgacctgtccgacgccaagcacccgatggccaggcgtttcttggagctcagcggctgaaagcccgcctgctcgctgctgcttcgttggatttcgaaactcttctacctaatcggatgctttcgagctgttctggatggaaaggatcggacgtgtggttatctttccaatcgcctatcatgttctctacttttgttctcgtgtatacatacaatctgttaaagtagcttctcacagctagaaagtgtttgcaatacaaacaagttcttggcggattagctttgttttttttcctgggcaactgttagtaattattgctaatctccaaactagtgttcatctcccaacggtacaaaacaacaatccaaaagtcttgtctttcagctttttcaattaatattaaacaaagtgcaaaggtcg

SEQ ID NO: 53560 - DNA, 1401 bp, Zea Mays
ctgagacgacacgtacaccgataagctgcgtgcggcatgccatggcgtggtgcgtgggaccggaccgacaccgagaccagccgccaccgaatcccgccgctcttctggccgccgagttgtcaagcaacgcacgcaccacaagccgcccgcctcagttgaagccccgcggaaaggctggctgcgagtgcgagaccgaccaaacaaagaacacatatcaatcaccagctcacagtgggaggggacgcacgatcggcacccggccatcccctccctcctcttcctcgcacgtcctcttccattccagtaatgggctctgcttcatcagatggtctccgggagcacttgctggacgtggacggcggcggagcggcggcggtgcccaagatacgggtgcgcgggctgcggcgccgcgcggacgcgaccggcgaggagatcctccgcggcgtccacctcgacgtgccgcgcggggccgtcatgggcgtcatcggccccagcggcagcggcaagtccacgctgctccgcgcgctcaaccgcctctgggagcccgcgcccggcgccgtgctcctcgacggcgccgacatctgcgccctcgacgtcctcgccctgcgccgcaaggtcggcatgctcttccagctccccgccatgttcgacggaaccgtggctgacaacgtacgatacgggccgcagttgcgcggcaagaagctaaccgaggccgaagtgaagagcctgctgcacctggccgacctggaccctgctctgtgctccaagccggcgtccgagctgtcggtgctcctgctggacgagccgaccagcgcgctggaccccatctcgacgcagaacatcgaggaggccatcgtgcggctgaagaagacgagggggctcaccacggtgatcgtctcccacagcgtgaagcagatccagcgcatcgccgacctggtgtgcctcgtcgtcgccggcgaggtcgtggaggtgctcgcgccgtccgacctgtccgacgccaagcacccgatggccaggcgtttcttggagctcagcggctgaaagcccgcctgctcgctgctgcttcgttggatttcgaaactcttctacctaatcggatgctttcgagctgttctggatggaaaggatcggacgtgtggttatctttccaatcgcctatcatgttctctacttttgttctcgtgtatacatacaatctgttaaagtagcttctcacagctagaaagtgtttgcaatacaaacaagttcttggcggattagctttgttttttttcctgggcaactgttagtaattattgctaatctccaaactagtgttcatctcccaacggtacaaaacaacaatccaaaagtcttgtctttcagctttttcaattaatattaaacaaagtgcaaaggtcg

SEQ ID NO: 53561 - DNA, 1546 bp, Zea Mays
ggggaaagagaaacagaacgtgatagctggacaggaagaggtctctagctacattctagcctagtctgagacgacacgtacaccgataagctgcgtgcggcatgccatggcgtggtgcgtgggaccggaccgacaccgagaccagccgccaccgaatcccgccgctcttctggccgccgagttgtcaagcaacgcacgcaccacaagccgcccgcctcagttgaagccccgcggaaaggctggctgcgagtgcgagaccgaccaaacaaagaacacatatcaatcaccagctcacagtgggaggggacgcacgatcggcacccggccatcccctccctcctcttcctcgcacgtcctcttccattccagtaatgggctctgcttcatcaggccgtactgtcacaatttacctgcagatggtctccgggagcacttgctggacgtggacggcggcggagcggcggcggtgcccaagatacgggtgcgcgggctgcggcgccgcgcggacgcgaccggcgaggagatcctccgcggcgtccacctcgacgtgccgcgcggggccgtcatgggcgtcatcggccccagcggcagcggcaagtccacgctgctccgcgcgctcaaccgcctctgggagcccgcgcccggcgccgtgctcctcgacggcgccgacatctgcgccctcgacgtcctcgccctgcgccgcaaggtcggcatgctcttccagctccccgccatgttcgacggaaccgtggctgacaacgtacgatacgggccgcagttgcgcggcaagaagctaaccgaggccgaagtgaagagcctgctgcacctggccgacctggaccctgctctgtgctccaagccggcgtccgagctgtcggtcgggcaggcacagcgcgtcgccctggcccggaccctcgccaacgaccccgaggtgctcctgctggacgagccgaccagcgcgctggaccccatctcgacgcagaacatcgaggaggccatcgtgcggctgaagaagacgagggggctcaccacggtgatcgtctcccacagcgtgaagcagatccagcgcatcgccgacctggtgtgcctcgtcgtcgccggcgaggtcgtggaggtgctcgcgccgtccgacctgtccgacgccaagcacccgatggccaggcgtttcttggagctcagcggctgaaagcccgcctgctcgctgctgcttcgttggatttcgaaactcttctacctaatcggatgctttcgagctgttctggatggaaaggatcggacgtgtggttatctttccaatcgcctatcatgttctctacttttgttctcgtgtatacatacaatctgttaaagtagcttctcacagctagaaagtgtttgcaatacaaacaagttcttggcggattagctttgttttttttcctgggcaactgttagtaattattgctaatctccaaactagtgttcatctcccaacggtacaaaacaacaatccaaaagtcttgtctttcagctttttcaattaatattaaacaaagtgcaaaggtcg

SEQ ID NO: 53562 - DNA, 1839 bp, Zea Mays
cgcacgtccttggcacgtgccacggccggatgtcgccgcgggctggcagtggcagtggcagtcgggcagcacgagcggggcaagcagcctgtgccgctgcctgcccaccagtccaccaccagccggcgcctcactgtaaagcagcgaacgcccccggccgtagccctagctagcaccacgcagcgcagaggaaagctgcacgcgcgctttccccgcccggcatccggctcccggcacggcaggcagccaccccaccagttgccgccagcctagcctaggcgctcctcccctttcgcggatgccgcccgggtgggctcgtgggcaagtaaagccccccgcgcccgcggcccccaccggcgtggacgtacgcgcgggcagcctccactggatccagggtgcggccagccatggcggtggcgtgtcccaaaactacccacatttacgccgcggacgcgccgtcctcacagccagccgagccggcccgttggttcaccacctgctgtccgtgccgtgcccgcccgcccgcccgaggctagctgccatggaaaactctcccagctccggccgtcacagacacgagctagagctagagctgcagggaagaagaagaaggaggaggaggagaagatgagggcgtccgcgctggtctgcttcgtggcggtgtcggcgtgcatagcgtgcatcgcgcatggcggcaacttctaccaggacacggagatgacctgggggcaggggcgcggcaaggtggtggacggcgggcgcgggctggacctgagcctggacagggcctccgggtccgggttccagtccaaggacgagtacctgttcggcaagatcgagatgcagatgaagctggtgcctggcaactcggcgggcaccgtgacgaccttgtacctgtcgtcgcagggcgacgcgcacgacgagatcgacctggagttcctgggcaacgtgtcgggcgagccctacacgctgcacacgaacgtgttcacgcgcgggcgggggcagcgggagcagcagttccgcctctggttcgaccccaccgccgacttccacacctactccgtggtgtggaacccgcggcacgtcatcttcgcggtggacggcacgccggtgagggacttcgccaaccgcgaggcccgcggggtggcgttcccgcggacgcagcccatgcgggtgtacgccagcctctggaacgccgacgactgggccacgcagggcggccgcgtcaaggcggactgggcgcgggcgccgttcgtcgcctcgttccgcgggttcagcgccgacgcctgcgtctggtccggcggcaggtcgcagtgccccgtcggcaccatggaggaggcgggaggaggcggcggctggtggaaccagcagctcagcgacgccagctaccgccgcatgcgctgggtgcagaggaagttcatgatctacaactactgcaccgacgccaagcggttcccgcagggccggggcgtgcccgctgaatgcaggctccggcgataaaggtggctggatgagcgaacgcgaagccacctgcgtgcgtgcacgacgatcgatcccctcgtcgtcgttcacttcagaccagagatcggtggtctggcgaataatgtttgggttttttttttgccatgggcgatggcaatgtaaatgtagcacgtgacgcacgtcgcagtgatattctttcatctgttttctgcaacaccggatgtgtacaagtttggagacgtagcgatcgagttcgttccgtttcaaatccgtccggcgtcgcgctacgctttcgaacacgattcatgcgtgtaaacccatggagacacaggcgcacggacaccctgtaaaccggag

SEQ ID NO: 53563 - DNA, 429 bp, Zea Mays
gccagctcgcggttgtttggatatggctccgacgcaaacacacggcggcgaatccaatctcaaccatcgccgcgcggatatctcgcctccggacgcgtataaatatatcgtcgatcgccgcataactcaatcacgtccatggtgcaagcacgctgcaagtcacgccagacaccggaaacgagggagaacggagggaggagtactgccgttgtgggattgctcgtctaccagcatggaagcatcggtaatcgaccaggggtgtgttctctgggacacacggacgggggtcgcactgtcaccgggccaacacgctggccggagcctaaccaatttctcgtcggactgcacggggcgccgctgaactaccagtcgccatggccgacctcgtcgcaatgccatcaccgattgtggtgcgcggccatggcgccg

SEQ ID NO: 53564 - DNA, 2030 bp, Zea Mays
caattactagctagccctgcccacctttgcctggaattagcttctcctccctccccttccctatcctacatcgatacctccacctttatcgccacaactccataagtagtaacaacaccatcaagtccaccgtcaccactaaaaactatggatcggaaccccgcctcatcagaattaacctcctctcccacactctacatatttcttgatcgacgcccccgccttcatctccgcttcttcgtccacgattctaaaagtgatgcggattccaaaaataggggtgctccgacttcatgcttaaatcaggaggcctctccaggttattcgacatcatcactgccttcgacttcgtggaatgcaaagaaaccaaaggtctggttcttccctattaagtaaacaattaatcgcatatgcgccctattggtatttttttttacatttctaggatgttgtggtagatcttaggcttgctatttagtagttgattttccttatcactttcgggcactttaggatccagactattagaatattttgaacaaattatagatcatttgaatatttttttcactcacctaaagctaaatctatctttaaacatctggagatattttaatgagctctaagtatttttatttaatttctttatccgaaactatctctatatctcttttttagatttttaagagcttagaaaatatgttctctacttttaaaaccttatcaatatttacaggatgtgattagaaaaaaaagatacagccgccttcaaaagccactctaaaccacaacggggaggtaacttgaatggttgtgaagatgcctgattttaggattcggcaaagaaaatcaaattacgaccatggtttagaactttagatatagtagaatggactttctccttgtactcttgttcgtttttctcttggcttttcatcttcgtgggctccaatcgggcttagcccaatagagagacaggccaccctgtgaggcccatgtgggctgtggcacaaagaaaaagaaaaatgtcagctcggcggccgtatgaaggagccgagccaaggaattggacaggacaggactacaggagcaggactcatgattcatgaaccgcacccttgtctctccatccacgacggcgcggctacttgggttggttgggtgcatgcctgataatcatggactgatgatggtagactataattgcctgaatggcaatgcaatcgtacccagatctatgctataggatgaaaaagaggctgaaacttcacaacccctgcgctaaatagatagtaaaaaatgtgcatatcagagcccaaactttagtcaaaatgtgcatatcagaattctagaacccgaattggcggccagggttcagccagttcataatcccctgacttccctgtcagtcgcatggtgcttgattttgatgcaaccctgccaattgcaaacgatttggctacagaaactctttattttttctctctatttgattatgtatttatcttttttataaaaaaagttgtatttccatctcacttcaacagactatctatttagtttgactagtcagagtggctagccaaatttgactagtgaaggagccaatttgaagagtcgaatagcttggtgagctagataactagtatgtcggagaattattttaatgttgggtaaccaaaatttggcttgacgaaccatttgcctagtcttttgtagatgctttgaggcatttgaggcagcatttctatttgcctagtcttttgtagatgctctgaggcatttggggcagcatttctaggaccaaggtaacattggtacagaatacaagcaatggattcatacacctgcaacctactacttgtccaagaaaacaagaattaccattcaaaataatctgagatgattccttttctctctcacattttaacctccaacccgattattagtagtcacatattgcatatcaacagaactacagaaggttgcagtgacccactgcataggcgaccattgccagaacaaatgac

SEQ ID NO: 53565 - DNA, 1704 bp, Zea Mays
cttctctctcccatcttgcccaacttcctatgctcgctcaattactagctagccctgcccacctttgcctggaattagcttctcctccctccccttccctatcctacatcgatacctccacctttatcgccacaactccataagtagtaacaacaccatcaagtccaccgtcaccactaaaaactatggatcggaaccccgcctcatcagaattaacctcctctcccacactctacatatttcttgatcgacgcccccgccttcatctccgcttcttcgtccacgattctaaaagtgatgcggattccaaaaataggggtgctccgacttcatgcttaaatcaggaggcctctccaggttattcgacatcatcactgccttcgacttcgtggaatgcaaagaaaccaaaggatgtgattagaaaaaaaagatacagccgccttcaaaagccactctaaaccacaacggggaggtaacttgaatggttgtgaagatgcctgattttaggattcggcaaagaaaatcaaattacgaccatggtttagaactttagatatagtagaatggactttctccttgtactcttgttcgtttttctcttggcttttcatcttcgtgggctccaatcgggcttagcccaatagagagacaggccaccctgtgaggcccatgtgggctgtggcacaaagaaaaagaaaaatgtcagctcggcggccgtatgaaggagccgagccaaggaattggacaggacaggactacaggagcaggactcatgattcatgaaccgcacccttgtctctccatccacgacggcgcggctacttgggttggttgggtgcatgcctgataatcatggactgatgatggtagactataattgcctgaatggcaatgcaatcgtacccagatctatgctataggatgaaaaagaggctgaaacttcacaacccctgcgctaaatagatagtaaaaaatgtgcatatcagagcccaaactttagtcaaaatgtgcatatcagaattctagaacccgaattggcggccagggttcagccagttcataatcccctgacttccctgtcagtcgcatggtgcttgattttgatgcaaccctgccaattgcaaacgatttggctacagaaactctttattttttctctctatttgattatgtatttatcttttttataaaaaaagttgtatttccatctcacttcaacagactatctatttagtttgactagtcagagtggctagccaaatttgactagtgaaggagccaatttgaagagtcgaatagcttggtgagctagataactagtatgtcggagaattattttaatgttgggtaaccaaaatttggcttgacgaaccatttgcctagtcttttgtagatgctttgaggcatttgaggcagcatttctatttgcctagtcttttgtagatgctctgaggcatttggggcagcatttctaggaccaaggtaacattggtacagaatacaagcaatggattcatacacctgcaacctactacttgtccaagaaaacaagaattaccattcaaaataatctgagatgattccttttctctctcacattttaacctccaacccgattattagtagtcacatattgcatatcaacagaactacagaaggttgcagtgacccactgcataggcgaccattgccagaacaaatgac

SEQ ID NO: 53566 - DNA, 3159 bp, Zea Mays
gatcccgggcgctcggtccttgggtgccgtcagggatacctgaaattggagtccaacctcgtcctcttacgaattcggtagctggtctgagtgttacaaacctgcgtgcaaatcttgttcaaaaatataggacaaattgacatttttttagaaaactcgagcagatatggcagatgccctcttggtcgttctcagaaaagttgctctgttcctgggagaaggagcactagaaaagattggcaaagaggtagtcgaagcagcacccctcatgacagattttgagcatagcatgaaacaaatagagggtgaactctcggttctgcaggcctttattaaccaagttagtgcacagagagtcagtgacaaggcatttgatgcatggttgaaccaagtcagagatgctgcccatgaggtagaagacatcattgatgagtacgcttaccttactgcacaagccgttgatacgagcagcttcttcaagagaaagttccaccagatcaagaacattgcagcatggcagaagttcccaagccagatcagtcaagtagaagcaaggattcagaggctatcagaaatgaggaaccgatatggtttctcgctgggtgaaatagacaggaataacaattttcagctctccagtcacttttgtctgtcagattctgagatagtaggaaatgccgatgaaatcggaaaactgacacaatggctacttgaggagaaacaagatcggtctctaattgccatccttggtatgggaggtttaggaaaaactgctgttgcaagcaccgtctacaagaaccaaaagatcataacatcttttgactgtcacgcatgggttattgtatctcagacttaccaagtcgaggaactactaagagaaattataaatcagctaataataaaggaaagagcaagcatggaaagtggcttcatgaccatgagtcgcatcagattagttgaggtaatacaaagctatttgcaggacaaaaaatactttgttgtcctggatgatgtatgggataaagatgtttggttaattttgaactatgcatttgtcagaaacagacatggtagtaaagtgctgataacaagtcggagaaaagatgtgtcgtctttggcagctgacaaatatgtcattgaacttaaaacccttaaagatgctgaatcttgggagctgttttgtaagaaggcatttcatgcttcagaagataacatttgtcctgaaaatataagatattgggcaaataaaattgttgcaaagtgccaaggattgccactggccattgtaactattggcagtattctgtcataccgtgacttaaaggaacaggagtgggcatttttcttcaaccaacttagctggcaattagccaacaatccagagctcaactggatttcccgtgtattaaagttgagcttgaatgatctaccaagttatcttaggagctgcttcctatactgcagcatctttcctgaagattacaagattagaagaaagatgatttccaagctatggatagcggaaggtcttgtggaagagagaggagacggaacaacgatggaggaagttgccgagtgttaccttatggagctcactcaacgttctctttttgaggtcacagaaaggaaaacatgtggaagagctagaacatttctgatgcatgatcttgtgcgagaggtaacttcaatcattgctaaaaaggagaagtttagcattgcacttgcacatggtggtgccagtacaacccaagttgcccatgaagcacgccgcctatgcatccaaagaggtgcgcagaccattaattctttaagaagctcgcggcttcgctcattcattttgtttgacgctgaagtaccatgttcttggatacatgatactgtatcatgtttcagactactgagagttctatgcctaagatttgtcaatgttgaacaagttccaagtgtagtcacagaactgtataacttgcgttatctagatatgtcatacacaaaagtgaagacggtccctgcatcgttcggaaagctcgttaacctacaatctttggatcttagagagacctacgtggaggagttaccactggaaataactaggctaactaaattacggcagttacaggtgtatgcactctatgatattctacaaagatcatcaaaatttctcagtgctacaaaaattcctggtaacatttgtcatctaaaggatctccaaactttgcatgttgtttcagccaataaagttttggtttcacagctggggaacttgaagttaatgagaagtttggctatcgcggaagtgcaacaaagctacattgcagaattatgcaactcgctgacaaagatgactaacctgaaaacactatttatttccacgtgcaatgtgaatgagactctcaacatagaaatgctaaagccgctgccaaatctgacatcatttctcctatcaggaaagttggagagaggcttgcccccgtcgatattttctatgaatttaaaacagttaaaattgttcgggtctagtctgaagaaggatcctgttagctcgttctctcatatgctaaatcttgttaatctattcctcactggagcatatgatggggaacagctaactttttgcaccagatggttccccaatctcaaatatctgcaattagctgatatggaacatctgaattggattgagctagaggatggaacaatgatgaatctacaatatttgtcacttgctggtttaaggaatctaaaggctgtacctgagggcatcaagtacattagggcactccatgagatgcttctgacagatatgccaaatgagttcatgctaaaactgcatggaagtgacaatcacattgttcaacacatacccaacataaaaaagtatgactcttctgattctcaagcagtaaacaacctggcttatctgccgtggcttgccaataagtttggtcctggtgctgcaattaagtatgcctccataaattgtggctcatctggctcttgacggttcattgggagttgtttgtgccaatgctagtcgttttaagtcttaagagtcatcaatatgtagatgtaggtctacatcttggtgccactggatgagctaattgtttctattttgtaccctgtccaataatgtataagagcacaggcatggcaaac

SEQ ID NO: 53567 - DNA, 325 bp, Zea Mays
atcccttcaactcgccccgtttcttagtctgttgcttctccgtcttctcctcctcgcctgctccccgagtaaacaacctggcttatctgccgtggcttgccaataagtttggtcctggtgctgcaattaagtatgcctccataaattgtggctcatctggctcttgacggttcattgggagttgtttgtgccaatgctagtcgttttaagtcttaagagtcatcaatatgtagatgtaggtctacatcttggtgccactggatgagctaattgtttctattttgtaccctgtccaataatgtataagagcacaggcatggcaaac

SEQ ID NO: 53568 - DNA, 3211 bp, Zea Mays
ctcctcctcgcctgctcaccgaggccactgctgttggatcaatccgtaggccactggacaaggccagatcctgtgtgctcggtccttgggtgccgtcagggatacctgaaactggagtccaacctcgtccccttacgattcggtagctggtctgagtgttacagagctgcgtgcaaatctagttcagaaatataattatatatatgacaaggtgacagtttttttttcagaaaacttgagcagatatggcagatgccctcttggtcgttctcagaaaagttgctctgtccttggcagaaggagcactagaaaagattggcaaagaggtggtcgaagcagcacccctcatgacagattttgagcatagcatgaaacaaattgagggtgaactctcggttctgcaagccttcattaaccaagttagtgcacagagagtcagtgacaaggcatttgatgcatggttggaccaagtcagagatgttgcccatgaggtagaagacatcattgatgagtatgcttaccttactgcacaagccgttgatacgagcagcttcttcaagagaaagttccaccagttcaagggcattgcagcatggaagaagttccctggccagatcagtcaagtagaagcaaggattcagaggctatcagaaatgaggaaccgatatggtttctcagtcagtcaactagacaggactaacaattttcagctctccattcagttttctctgtcaaattctgcctacctgatagataactctgagatagtaggaaatgctgatgaaatcggaaaactgacacaatggctacttgaggagaaacaagaccgatctctaattgccatccttggtatgggaggtttaggaaaaactgctattgcaagcaccgtctacaagaaccaaaaaatcataacatctttcgactgtcacgcatgggttattgtctctcagacttaccaagtcgaggagctactaagagaaattataaatcagctaataataaaagaaagagcaagcatggcaagtggcttcatgaccatgagtcgcatgagattagttgaggtaatacaaagctatttgagggacaaaaaatacttcgttgtcctggatgatgtatgggacaaagatgcttggttatttttgaactatgcattcgtcagaaacgaacgtggaagtaaagtgctgataacaacccggagaaaagatgtgtcttctttggcagccgacaactatgtcattgaacttaaaacccttaaagatgctgaatcttgggagctgttttgtaagaaggcatttcatgcttcagaagataacatttgtcctgaaaatataagatgttgggcaaccaaaattgttgcaaagtgccaaggattgccactagccattgtaactattggcagtattctgtcataccgtgacttaaaggaacatgagtgggcatttttcttcaaacaacttagctggcagttagccaacaatccagagctcagctggatttccagtgtcttgaagttgagcttgaatgatctaccaagttatcttaggagctgcttcctctactgcagcatctttcctgaagattataagattagaagaaagctgatttccaagctatggatagcggaaggtcttgtggaagagagaggagacggaacaacaatggaggaagttgctgagtgttacctaatggagctcactcaacgctctcttcttcaggtcacagaaaggaaagcatgtggaagagctagaacatttttgatgcatgatcttgtgagagagataacttcaaccattgctaaaaaggagaagtttagcgttgcacttgcacatggtggtgccagtacaagccaagttgcccatgaagctcgtcgcctatgcatccagagaggtgcccagaccttgaattctctcagtagctcacggctccgctcattcattttgtttgacactgaagtaccatgttcttggatacatgatactgtatcatgtttcagactactgagagtcctatgcctaagatttgtcaatgttgaacaagtgccaggtgtaatcacagaactgtataacttgcgctatctagacatgtcttacacaaaagtgaagatgataccagcatcatttggaaagctcgttaacctacaagttttggatctcagagacacctatgtggaggagttaccactggaaataactatgctaactaaattacggcagttacaggtgtatgcactctatgatattctacaaagatcaccgaacagcttcagtgctacaaaattttttggtaacatttgtcatctaaagaatctccaagctttgcaggttgtttcagccaataaagatttggtttcacagctagggaacttgaatttaatgagaagtttggctattgcggaagtgcgacaaagctacattgcagagttatggaactcgctgacaaagatgcctaacctgaaaagactaattatttccacgtgcaatgtgaatgagactctggacatggaaatgctaaagccactgccaaatctgacaacatttgtcctatcaggaaagttggagagaggcttgctcccatcgatattttctgtgaaattaaagcaattaaaattggactggtctagtctgaagaaggatcctgttagctcgctctctcatatgttaaatcttgttgatctattcctcactggaggatatgctggggaacaactaacttttcgcaacagatggtttcccaatctaaaatgtctgcaattagctgacatggaacatctgaattggattgaggtagaggatggaacaatgatgaatctacaatgtttgtcacttgctggtctaaggaatctaaaggctgtacctgacggaatcaagtacattagggcactccatgagatgtttctaacagatatgtcaaatgagttcatagtaagactgcatggaagtgacaatcacattgttcaacacatacccaacatcaaaaagtttgagtcttctgattctcaagcagtaaacaacgtttatataccgtggcttgccgagaagtttggttctggtgctgtggctcatctggctcttgacggttcaatgggagttgtttgtgccagtggtaatcattttaagtctgaagagtgatcaatatgtagatgtaggtcatcttggtgccagtgatgagctaattgtttatgttttgaaccctgtccaataatgcataagag

SEQ ID NO: 53569 - DNA, 3779 bp, Zea Mays
atactaaagtgcagtcaaaacagttgtgctgctactgctgtcctctgctgtgctgctactgctgtcctgcgcagtcaaaagactgcagctgcatgctgtcctgctgcaactgctgctgtcctgcagtagtcaaaaggttgctgctgctgcgcagtcaaaagactgctgctactgctgtcctgcgcagtcaaaaagactgctgcatgttgtcctgctgcaactgctgctgtcctgcagcagtcaaaactgcaactgctgctgaccacatgacttattccatcacgcggctccgctcatttattttgtttgacactgaagtaccatgctcttggatagatgatgttttatcacgtttcagactactgagggtcctatgcctaagatttgcaaatattgcagaagtgcctggcgtggtcacagaattgtataacttgcgctatattgatttttcatacacaaaagtgaagacaataccagcatcattcagaaaacttgtcaacctacaagttttggatctcagattcacctacgtagaggagttgccactggaaataactacgctaactaacttgcgtcatctacatgtgtttgcagtccatgattttcaacaaagatcattgaattgtttaggcgcaacaaaaattcctgttaacatttgtcatctaaagaatctgcaagctatacagatcgttttggccaacaaagatttggtttcacaacttgggaacttgaaattaatgagaagtttggctatagcggaagtgcggcaaagctacattgcagaattatggaagtccctgacaaagatgcctaacctgaataggttggctatttcaacatgcaacatggaggagattcttgattttaaaatgctaaagcccttatcaaatctggttttcttcaagcttgcaggaaagttggagtcaggcgtgcttcctttgatgttgtattattttgagaagttaacatggttacaattagactggtccggtctaaagaaggaccctatgagctccttatctcacatgtcgaaccttgttcatctgttcatgtgcgggtcatattgtggggaacagctaactttttgttcaggatggttccccaagctcaattatctgcaattatctaaaatggagaatctgaattggattgagatagaggatggaacaatgatgtgtctaaataatttgtacttagttgatttagggaatctaaaggctgtgccctatggcatcaagtacatcaggacactgcaccagatgcatctgacagatatgtcaaaggagtttctaggaagtctgcaaggaagcgcgagtcccgttgttcaacatatatgcaacatccatatttttgaatcctctgattctgaagcagtaaataaattcttctttgagccataccttgccaccaagttcggccctggtgcaactaagcatgcccctacttacctgggatcatctggcatctgacagtcggtgagaattcttcttcaatgaaccagccgcgcaatatgctgttcatcttggtgccggaacttgagacggaactgattgttcgtgttgtgcctcgtttatggcttttgaacctagctagtggcctgctatggacttcctccacacaggtgttgcttaatggatctccagggcagcatatatctcatcggcgtgggctcagacaagatgacccactttccccaatgttattcattttggtgatggacgttctgggctttcttattaccaaggctgagaatgaagggttgcttcggccccttgctacaagaactctccatcacagattctctatttatgttgatgatgtggttatatttatccaaccaacagtcggggatatcaggactgtactggacattcttcatatctttggggaggcttccaggttgcgaactaatatccagaaaagcaatgtatgcccaattagatgcggggaacaagacttgaccttactgcaaagcttgctgccttgtgagatctcacaatttccctgcaaatacttgggtctacttcttgccatcaagaaacttaccaaggaccaagtacaaacgattattgataaaattgccaaccaactatcggggtggaaatctgatttgatgactaaggctggatggaaggtccatgtgcagtttgtcctcacagggatggtcatatatctcgcaatggctgtggatttacctccttgggctctcaaagctattgacaagatccgccgaggctttctttggcgatggcgcaaagaagcgagggggggacactgtcttgttgcttggggaaaagtttgtcggccgcttgagcttggtgggctagggatttccaatctcattgatcttgcttgggcacttcgtatgcgttggttttggttagcaaaaactgatccgggacggccatgggcctcccttgctatacaagttcccagcaaggctaaagttttcttctcggtggctatgcaaactgaaattggtaatggagcctctactcttttttggtctgaccgttggttgatgggacacagggtcatggacattgccccaagattactccagaatgttcctaaaaggagggttaataagaggactgttttggatgctctcactaatcagacttggatttcagacatacaaggagctcttgctgttggggttatttctgaataccttgctctatgggatattgtcacctcggttcagcttagacgcgaagtgaatgacactcacttctttcgtctcgccgccaatgggaagtattcaacaaaggcagtctatgagggtttttttccttgggtcgacgatttttgaaccgtaccacataatttggaaaacccgggctcctccaaaggccaagttcttcatgtggctggtcgcgacggctttggacagctaacaggttggaaaagagaggcatggatcaccctacgagctgccctttgtcaggagcaggccatttgctgattgggtgtgtgttcgcccgagatttctggtttaaactactatctcaagttaatctccaaaacatggcctctcagcttgttgatgcatcttttatgggctggtggagatggctgggcaatcagatacatggagtcagtggcaggggaagcagtaaactccctggtaatttcaggagcttggacaatatggaaacgtcggaatagctgtgtcttcgacagaaacagacctaatgtggctcttgctgtcagaatggcgatcaagagcgagagaagcgggagctgactggggcaagaaaactatccttgctgactagtcacatcccgggtctgtaggaatttgtagttttgggtgctttattcatggatgagtatcagtatgtctgtatttggccccctgtgaggtggctgttttgtattatctctgtttttttcttcttaatggaatgaaacacaactctcctgcgttttttagaaaaaaaaaacaatttgcagccaccaacaatgctggattcaggaaacatccgccatctgtctgcatggcggctgaagcatgggtcttgcttgaagattccgtgtttgctgaaaacggccagcaggaaaacagtagacgtttggttgaacagggtgccactgccagagatttgagataggagagtggcagtggttttgcttgagctccgtgtcacctgaaatactttgttgtagcaaggcctgtaggagaatttctcattgtaccatcgctagacttggtcagtctgtactttatacggttagtcgcatgtaaactgtgagtttaccaaaaaagaattacc

SEQ ID NO: 53570 - DNA, 4668 bp, Zea Mays
gtctgtctccccttggttctcggcggctcaagcagcgacagactcatcatcgagttgtcatcgattcctcgtggaggtcttgctcgcggcggaggtatatatttatatatctcaggtgaattcagacatggcagatgccctatttgtagttcttagtaaacttgctgattccttgggagaacagacactagagaggattagcacaaagctgattgaagtagcaccagttttgacagattttgagcatagcatgaagcaaatcgaggctgagctattgattcttcaggcttttattgcacaggttgggacaaaagtcggtgataaggcatttgatgcctggctggaccaagtgagagatgttgcccatgaggtagaagacatcattgatgagtatgcttaccttgaggttcaagccgtggatactggcagcttctttaagaggaagttccttcagataaaaaagttcgctgcatggcagaagtttcatagccagatcagtcatgtagaagctcgaattcagaggctaggtgaaattaggaatcgatatggcatcttgtcaggtgaaatagacaggagtaagaaattgaggagccccaatcggctctttatgtcagattcttcttacttaactgataactctgaaatagtggggcatgttgatgaaattggaagattgacacagtggttacttgagtacaaacaagagcgaactcttattgccgtttttggtatgggaggttcaggaaaaactactattgcaagcagtgcatacaagagtcaaaagatcacaaggactttcaattgtcatgcatgggttactgtatctcagacttaccaagttgaagaactactaagagaaatcataaatcagctaatagatcagagagcaagcatgtcaagtgggtttatgactatgagcggcttgaggctagttgaggtaatacaaagctatttgcaagataaaaaatatttcattgtcttggatgatgtatgggataaagatgcatggctatttctaaactatgcatttgtcagaaacaattgtggaagcaaagtgctgataactactcggagaaaggacgtatctagcttggcagttgatcagtatacaattgagcttaaaactcttcaatatgctgaatcctgggaacttttctgtaaaaaggcatttcgtgcatcaaaggataaccaatgtcctgagaaccttaggttttgtgcagagaaaattgttgctaggtgtcagggattgcccctggctattgtaaccattggaagtgttctatcataccatgaattcgaagagcagggatgggaatctttctacagccaacttagctggcagttagctaacaatccggagctgaattggatatctaatgttctgaatatgagcttgaatgatctcccgagttatctgaggaactgctttctgtactgcagtctttatcctgaagattacaagattaaaagaaaagtgatttccaagctatggatagcagaaggtttagtggaagatagagaagatggaacaacaatggaggaggttgccaattattaccttgtggagctcactcagcgttgtcttcttcgagtcacagaaatccatgattttcaacaaagatcattgaattgtttaggcgcaacaaaaattcctgttaacatttgtcatctaaagaatctgcaagctatacagatcgttttggccaacaaagatttggtttcacaacttgggaacttgaaattaatgagaagtttggctatagcggaagtgcggcaaagctacattgcagaattatggaagtccctgacaaagatgcctaacctgaataggttggctatttcaacatgcaacatggaggagattcttgattttaaaatgctaaagcccttatcaaatctggttttcttcaagcttgcaggaaagttggagtcaggcgtgcttcctttgatgttgtattattttgagaagttaacatggttacaattagactggtccggtctaaagaaggaccctatgagctccttatctcacatgtcgaaccttgttcatctgttcatgtgcgggtcatattgtggggaacagctaactttttgttcaggatggttccccaagctcaattatctgcaattatctaaaatggagaatctgaattggattgagatagaggatggaacaatgatgtgtctaaataatttgtacttagttgatttagggaatctaaaggctgtgccctatggcatcaagtacatcaggacactgcaccagatgcatctgacagatatgtcaaaggagtttctaggaagtctgcaaggaagcgcgagtcccgttgttcaacatatatgcaacatccatatttttgaatcctctgattctgaagcagtaaataaattcttctttgagccataccttgccaccaagttcggccctggtgcaactaagcatgcccctacttacctgggatcatctggcatctgacagtcgtggcctgctatggacttcctccacacaggtgttgcttaatggatctccagggcagcatatatctcatcggcgtgggctcagacaagatgacccactttccccaatgttattcattttggtgatggacgttctgggctttcttattaccaaggctgagaatgaagggttgcttcggccccttgctacaagaactctccatcacagattctctatttatgttgatgatgtggttatatttatccaaccaacagtcggggatatcaggactgtactggacattcttcatatctttggggaggcttccaggttgcgaactaatatccagaaaagcaatgtatgcccaattagatgcggggaacaagacttgaccttactgcaaagcttgctgccttgtgagatctcacaatttccctgcaaatacttgggtctacttcttgccatcaagaaacttaccaaggaccaagtacaaacgattattgataaaattgccaaccaactatcggggtggaaatctgatttgatgactaaggctggatggaaggtccatgtgcagtttgtcctcacagggatggtcatatatctcgcaatggctgtggatttacctccttgggctctcaaagctattgacaagatccgccgaggctttctttggcgatggcgcaaagaagcgagggggggacactgtcttgttgcttggggaaaagtttgtcggccgcttgagcttggtgggctagggatttccaatctcattgatcttgcttgggcacttcgtatgcgttggttttggttagcaaaaactgatccgggacggccatgggcctcccttgctatacaagttcccagcaaggctaaagttttcttctcggtggctatgcaaactgaaattggtaatggagcctctactcttttttggtctgaccgttggttgatgggacacagggtcatggacattgccccaagattactccagaatgttcctaaaaggagggttaataagaggactgttttggatgctctcactaatcagacttggatttcagacatacaaggagctcttgctgttggggttatttctgaataccttgctctatgggatattgtcacctcggttcagcttagacgcgaagtgaatgacactcacttctttcgtctcgccgccaatgggaagtattcaacaaaggcagtctatgagggtttttttccttgggtcgacgatttttgaaccgtaccacataatttggaaaacccgggctcctccaaaggccaagttcttcatgtggctggtcgcgacggctttggacagctaacaggttggaaaagagaggcatggatcaccctacgagctgccctttgtcaggagcaggccatttgctgattgggtgtgtgttcgcccgagatttctggtttaaactactatctcaagttaatctccaaaacatggcctctcagcttgttgatgcatcttttatgggctggtggagatggctgggcaatcagatacatggagtcagtggcaggggaagcagtaaactccctggtaatttcaggagcttggacaatatggaaacgtcggaatagctgtgtcttcgacagaaacagacctaatgtggctcttgctgtcagaatggcgatcaagagcgagagaagcgggagctgactggggcaagaaaactatccttgctgactagtcacatcccgggtctgtaggaatttgtagttttgggtgctttattcatggatgagtatcagtatgtctgtatttggccccctgtgaggtggctgttttgtattatctctgtttttttcttcttaatggaatgaaacacaactctcctgcgttttttagaaaaaaaaaacaatttgcagccaccaacaatgctggattcaggaaacatccgccatctgtctgcatggcggctgaagcatgggtcttgcttgaagattccgtgtttgctgaaaacggccagcaggaaaacagtagacgtttggttgaacagggtgccactgccagagatttgagataggagagtggcagtggttttgcttgagctccgtgtcacctgaaatactttgttgtagcaaggcctgtaggagaatttctcattgtaccatcgctagacttggtcagtctgtactttatacggttagtcgcatgtaaactgtgagtttaccaaaaaagaattacc

SEQ ID NO: 53571 - DNA, 3136 bp, Zea Mays
cacagacttgttgtctgtctccccttggttctcggcggctcaagcagcgacagactcatcatcgagttgtcatcgattcctcgtggaggtcttgctcgcggcggaggtatatatttatatatctcaggtgaattcagacatggcagatgccctatttgtagttcttagtaaacttgctgattccttgggagaacagacactagagaggattagcacaaagctgattgaagtagcaccagttttgacagattttgagcatagcatgaagcaaatcgaggctgagctattgattcttcaggcttttattgcacaggttgggacaaaagtcggtgataaggcatttgatgcctggctggaccaagtgagagatgttgcccatgaggtagaagacatcattgatgagtatgcttaccttgaggttcaagccgtggatactggcagcttctttaagaggaagttccttcagataaaaaagttcgctgcatggcagaagtttcatagccagatcagtcatgtagaagctcgaattcagaggctaggtgaaattaggaatcgatatggcatcttgtcaggtgaaatagacaggagtaagaaattgaggagccccaatcggctctttatgtcagattcttcttacttaactgataactctgaaatagtggggcatgttgatgaaattggaagattgacacagtggttacttgagtacaaacaagagcgaactcttattgccgtttttggtatgggaggttcaggaaaaactactattgcaagcagtgcatacaagagtcaaaagatcacaaggactttcaattgtcatgcatgggttactgtatctcagacttaccaagttgaagaactactaagagaaatcataaatcagctaatagatcagagagcaagcatgtcaagtgggtttatgactatgagcggcttgaggctagttgaggtaatacaaagctatttgcaagataaaaaatatttcattgtcttggatgatgtatgggataaagatgcatggctatttctaaactatgcatttgtcagaaacaattgtggaagcaaagtgctgataactactcggagaaaggacgtatctagcttggcagttgatcagtatacaattgagcttaaaactcttcaatatgctgaatcctgggaacttttctgtaaaaaggcatttcgtgcatcaaaggataaccaatgtcctgagaaccttaggttttgtgcagagaaaattgttgctaggtgtcagggattgcccctggctattgtaaccattggaagtgttctatcataccatgaattcgaagagcagggatgggaatctttctacagccaacttagctggcagttagctaacaatccggagctgaattggatatctaatgttctgaatatgagcttgaatgatctcccgagttatctgaggaactgctttctgtactgcagtctttatcctgaagattacaagattaaaagaaaagtgatttccaagctatggatagcagaaggtttagtggaagatagagaagatggaacaacaatggaggaggttgccaattattaccttgtggagctcactcagcgttgtcttcttcgagtcacagaaagtaatgcatgtggaaggccgagagcttttgttatgcatgatcttgtgcgagagttaacctccaacattgctaaaaaggagaagtttggtattgcatatggcgatgctagtacaacccaagttccccctgaagttcgccgcttatgcatacaaagaggtgcccaaaccttgaattctatagcaaggctaaagttttcttctcggtggctatgcaaactgaaattggtaatggagcctctactcttttttggtctgaccgttggttgatgggacacagggtcatggacattgccccaagattactccagaatgttcctaaaaggagggttaataagaggactgttttggatgctctcactaatcagacttggatttcagacatacaaggagctcttgctgttggggttatttctgaataccttgctctatgggatattgtcacctcggttcagcttagacgcgaagtgaatgacactcacttctttcgtctcgccgccaatgggaagtattcaacaaaggcagtctatgagggtttttttccttgggtcgacgatttttgaaccgtaccacataatttggaaaacccgggctcctccaaaggccaagttcttcatgtggctggtcgcgacggctttggacagctaacaggttggaaaagagaggcatggatcaccctacgagctgccctttgtcaggagcaggccatttgctgattgggtgtgtgttcgcccgagatttctggtttaaactactatctcaagttaatctccaaaacatggcctctcagcttgttgatgcatcttttatgggctggtggagatggctgggcaatcagatacatggagtcagtggcaggggaagcagtaaactccctggtaatttcaggagcttggacaatatggaaacgtcggaatagctgtgtcttcgacagaaacagacctaatgtggctcttgctgtcagaatggcgatcaagagcgagagaagcgggagctgactggggcaagaaaactatccttgctgactagtcacatcccgggtctgtaggaatttgtagttttgggtgctttattcatggatgagtatcagtatgtctgtatttggccccctgtgaggtggctgttttgtattatctctgtttttttcttcttaatggaatgaaacacaactctcctgcgttttttagaaaaaaaaaacaatttgcagccaccaacaatgctggattcaggaaacatccgccatctgtctgcatggcggctgaagcatgggtcttgcttgaagattccgtgtttgctgaaaacggccagcaggaaaacagtagacgtttggttgaacagggtgccactgccagagatttgagataggagagtggcagtggttttgcttgagctccgtgtcacctgaaatactttgttgtagcaaggcctgtaggagaatttctcattgtaccatcgctagacttggtcagtctgtactttatacggttagtcgcatgtaaactgtgagtttaccaaaaaagaattacc

SEQ ID NO: 53572 - DNA, 4990 bp, Zea Mays
cacagacttgttgtctgtctccccttggttctcggcggctcaagcagcgacagactcatcatcgagttgtcatcgattcctcgtggaggtcttgctcgcggcggaggtatatatttatatatctcaggtgaattcagacatggcagatgccctatttgtagttcttagtaaacttgctgattccttgggagaacagacactagagaggattagcacaaagctgattgaagtagcaccagttttgacagattttgagcatagcatgaagcaaatcgaggctgagctattgattcttcaggcttttattgcacaggttgggacaaaagtcggtgataaggcatttgatgcctggctggaccaagtgagagatgttgcccatgaggtagaagacatcattgatgagtatgcttaccttgaggttcaagccgtggatactggcagcttctttaagaggaagttccttcagataaaaaagttcgctgcatggcagaagtttcatagccagatcagtcatgtagaagctcgaattcagaggctaggtgaaattaggaatcgatatggcatcttgtcaggtgaaatagacaggagtaagaaattgaggagccccaatcggctctttatgtcagattcttcttacttaactgataactctgaaatagtggggcatgttgatgaaattggaagattgacacagtggttacttgagtacaaacaagagcgaactcttattgccgtttttggtatgggaggttcaggaaaaactactattgcaagcagtgcatacaagagtcaaaagatcacaaggactttcaattgtcatgcatgggttactgtatctcagacttaccaagttgaagaactactaagagaaatcataaatcagctaatagatcagagagcaagcatgtcaagtgggtttatgactatgagcggcttgaggctagttgaggtaatacaaagctatttgcaagataaaaaatatttcattgtcttggatgatgtatgggataaagatgcatggctatttctaaactatgcatttgtcagaaacaattgtggaagcaaagtgctgataactactcggagaaaggacgtatctagcttggcagttgatcagtatacaattgagcttaaaactcttcaatatgctgaatcctgggaacttttctgtaaaaaggcatttcgtgcatcaaaggataaccaatgtcctgagaaccttaggttttgtgcagagaaaattgttgctaggtgtcagggattgcccctggctattgtaaccattggaagtgttctatcataccatgaattcgaagagcagggatgggaatctttctacagccaacttagctggcagttagctaacaatccggagctgaattggatatctaatgttctgaatatgagcttgaatgatctcccgagttatctgaggaactgctttctgtactgcagtctttatcctgaagattacaagattaaaagaaaagtgatttccaagctatggatagcagaaggtttagtggaagatagagaagatggaacaacaatggaggaggttgccaattattaccttgtggagctcactcagcgttgtcttcttcgagtcacagaaagtaatgcatgtggaaggccgagagcttttgttatgcatgatcttgtgcgagagttaacctccaacattgctaaaaaggagaagtttggtattgcatatggcgatgctagtacaacccaagttccccctgaagttcgccgcttatgcatacaaagaggtgcccaaaccttgaattctataggtagttcgcggttccatgattttcaacaaagatcattgaattgtttaggcgcaacaaaaattcctgttaacatttgtcatctaaagaatctgcaagctatacagatcgttttggccaacaaagatttggtttcacaacttgggaacttgaaattaatgagaagtttggctatagcggaagtgcggcaaagctacattgcagaattatggaagtccctgacaaagatgcctaacctgaataggttggctatttcaacatgcaacatggaggagattcttgattttaaaatgctaaagcccttatcaaatctggttttcttcaagcttgcaggaaagttggagtcaggcgtgcttcctttgatgttgtattattttgagaagttaacatggttacaattagactggtccggtctaaagaaggaccctatgagctccttatctcacatgtcgaaccttgttcatctgttcatgtgcgggtcatattgtggggaacagctaactttttgttcaggatggttccccaagctcaattatctgcaattatctaaaatggagaatctgaattggattgagatagaggatggaacaatgatgtgtctaaataatttgtacttagttgatttagggaatctaaaggctgtgccctatggcatcaagtacatcaggacactgcaccagatgcatctgacagatatgtcaaaggagtttctaggaagtctgcaaggaagcgcgagtcccgttgttcaacatatatgcaacatccatatttttgaatcctctgattctgaagcagtaaataaattcttctttgagccataccttgccaccaagttcggccctggtgcaactaagcatgcccctacttacctgggatcatctggcatctgacagtcggtgagaattcttcttcaatgaaccagccgcgcaatatgctgttcatcttggtgccggaacttgagacggaactgattgttcgtgttgtgcctcgtttatggcttttgaacctagctagtggcctgctatggacttcctccacacaggtgttgcttaatggatctccagggcagcatatatctcatcggcgtgggctcagacaagatgacccactttccccaatgttattcattttggtgatggacgttctgggctttcttattaccaaggctgagaatgaagggttgcttcggccccttgctacaagaactctccatcacagattctctatttatgttgatgatgtggttatatttatccaaccaacagtcggggatatcaggactgtactggacattcttcatatctttggggaggcttccaggttgcgaactaatatccagaaaagcaatgtatgcccaattagatgcggggaacaagacttgaccttactgcaaagcttgctgccttgtgagatctcacaatttccctgcaaatacttgggtctacttcttgccatcaagaaacttaccaaggaccaagtacaaacgattattgataaaattgccaaccaactatcggggtggaaatctgatttgatgactaaggctggatggaaggtccatgtgcagtttgtcctcacagggatggtcatatatctcgcaatggctgtggatttacctccttgggctctcaaagctattgacaagatccgccgaggctttctttggcgatggcgcaaagaagcgagggggggacactgtcttgttgcttggggaaaagtttgtcggccgcttgagcttggtgggctagggatttccaatctcattgatcttgcttgggcacttcgtatgcgttggttttggttagcaaaaactgatccgggacggccatgggcctcccttgctatacaagttcccagcaaggctaaagttttcttctcggtggctatgcaaactgaaattggtaatggagcctctactcttttttggtctgaccgttggttgatgggacacagggtcatggacattgccccaagattactccagaatgttcctaaaaggagggttaataagaggactgttttggatgctctcactaatcagacttggatttcagacatacaaggagctcttgctgttggggttatttctgaataccttgctctatgggatattgtcacctcggttcagcttagacgcgaagtgaatgacactcacttctttcgtctcgccgccaatgggaagtattcaacaaaggcagtctatgagggtttttttccttgggtcgacgatttttgaaccgtaccacataatttggaaaacccgggctcctccaaaggccaagttcttcatgtggctggtcgcgacggctttggacagctaacaggttggaaaagagaggcatggatcaccctacgagctgccctttgtcaggagcaggccatttgctgattgggtgtgtgttcgcccgagatttctggtttaaactactatctcaagttaatctccaaaacatggcctctcagcttgttgatgcatcttttatgggctggtggagatggctgggcaatcagatacatggagtcagtggcaggggaagcagtaaactccctggtaatttcaggagcttggacaatatggaaacgtcggaatagctgtgtcttcgacagaaacagacctaatgtggctcttgctgtcagaatggcgatcaagagcgagagaagcgggagctgactggggcaagaaaactatccttgctgactagtcacatcccgggtctgtaggaatttgtagttttgggtgctttattcatggatgagtatcagtatgtctgtatttggccccctgtgaggtggctgttttgtattatctctgtttttttcttcttaatggaatgaaacacaactctcctgcgttttttagaaaaaaaaaacaatttgcagccaccaacaatgctggattcaggaaacatccgccatctgtctgcatggcggctgaagcatgggtcttgcttgaagattccgtgtttgctgaaaacggccagcaggaaaacagtagacgtttggttgaacagggtgccactgccagagatttgagataggagagtggcagtggttttgcttgagctccgtgtcacctgaaatactttgttgtagcaaggcctgtaggagaatttctcattgtaccatcgctagacttggtcagtctgtactttatacggttagtcgcatgtaaactgtgagtttaccaaaaaagaattacc

SEQ ID NO: 53573 - DNA, 5149 bp, Zea Mays
cacagacttgttgtctgtctccccttggttctcggcggctcaagcagcgacagactcatcatcgagttgtcatcgattcctcgtggaggtcttgctcgcggcggaggtatatatttatatatctcaggtgaattcagacatggcagatgccctatttgtagttcttagtaaacttgctgattccttgggagaacagacactagagaggattagcacaaagctgattgaagtagcaccagttttgacagattttgagcatagcatgaagcaaatcgaggctgagctattgattcttcaggcttttattgcacaggttgggacaaaagtcggtgataaggcatttgatgcctggctggaccaagtgagagatgttgcccatgaggtagaagacatcattgatgagtatgcttaccttgaggttcaagccgtggatactggcagcttctttaagaggaagttccttcagataaaaaagttcgctgcatggcagaagtttcatagccagatcagtcatgtagaagctcgaattcagaggctaggtgaaattaggaatcgatatggcatcttgtcaggtgaaatagacaggagtaagaaattgaggagccccaatcggctctttatgtcagattcttcttacttaactgataactctgaaatagtggggcatgttgatgaaattggaagattgacacagtggttacttgagtacaaacaagagcgaactcttattgccgtttttggtatgggaggttcaggaaaaactactattgcaagcagtgcatacaagagtcaaaagatcacaaggactttcaattgtcatgcatgggttactgtatctcagacttaccaagttgaagaactactaagagaaatcataaatcagctaatagatcagagagcaagcatgtcaagtgggtttatgactatgagcggcttgaggctagttgaggtaatacaaagctatttgcaagataaaaaatatttcattgtcttggatgatgtatgggataaagatgcatggctatttctaaactatgcatttgtcagaaacaattgtggaagcaaagtgctgataactactcggagaaaggacgtatctagcttggcagttgatcagtatacaattgagcttaaaactcttcaatatgctgaatcctgggaacttttctgtaaaaaggcatttcgtgcatcaaaggataaccaatgtcctgagaaccttaggttttgtgcagagaaaattgttgctaggtgtcagggattgcccctggctattgtaaccattggaagtgttctatcataccatgaattcgaagagcagggatgggaatctttctacagccaacttagctggcagttagctaacaatccggagctgaattggatatctaatgttctgaatatgagcttgaatgatctcccgagttatctgaggaactgctttctgtactgcagtctttatcctgaagattacaagattaaaagaaaagtgatttccaagctatggatagcagaaggtttagtggaagatagagaagatggaacaacaatggaggaggttgccaattattaccttgtggagctcactcagcgttgtcttcttcgagtcacagaaagtaatgcatgtggaaggccgagagcttttgttatgcatgatcttgtgcgagagttaacctccaacattgctaaaaaggagaagtttggtattgcatatggcgatgctagtacaacccaagttccccctgaagttcgccgcttatgcatacaaagagaagtgcctggcgtggtcacagaattgtataacttgcgctatattgatttttcatacacaaaagtgaagacaataccagcatcattcagaaaacttgtcaacctacaagttttggatctcagattcacctacgtagaggagttgccactggaaataactacgctaactaacttgcgtcatctacatgtgtttgcagtccatgattttcaacaaagatcattgaattgtttaggcgcaacaaaaattcctgttaacatttgtcatctaaagaatctgcaagctatacagatcgttttggccaacaaagatttggtttcacaacttgggaacttgaaattaatgagaagtttggctatagcggaagtgcggcaaagctacattgcagaattatggaagtccctgacaaagatgcctaacctgaataggttggctatttcaacatgcaacatggaggagattcttgattttaaaatgctaaagcccttatcaaatctggttttcttcaagcttgcaggaaagttggagtcaggcgtgcttcctttgatgttgtattattttgagaagttaacatggttacaattagactggtccggtctaaagaaggaccctatgagctccttatctcacatgtcgaaccttgttcatctgttcatgtgcgggtcatattgtggggaacagctaactttttgttcaggatggttccccaagctcaattatctgcaattatctaaaatggagaatctgaattggattgagatagaggatggaacaatgatgtgtctaaataatttgtacttagttgatttagggaatctaaaggctgtgccctatggcatcaagtacatcaggacactgcaccagatgcatctgacagatatgtcaaaggagtttctaggaagtctgcaaggaagcgcgagtcccgttgttcaacatatatgcaacatccatatttttgaatcctctgattctgaagcagtaaataaattcttctttgagccataccttgccaccaagttcggccctggtgcaactaagcatgcccctacttacctgggatcatctggcatctgacagtcggtgagaattcttcttcaatgaaccagccgcgcaatatgctgttcatcttggtgccggaacttgagacggaactgattgttcgtgttgtgcctcgtttatggcttttgaacctagctagtggcctgctatggacttcctccacacaggtgttgcttaatggatctccagggcagcatatatctcatcggcgtgggctcagacaagatgacccactttccccaatgttattcattttggtgatggacgttctgggctttcttattaccaaggctgagaatgaagggttgcttcggccccttgctacaagaactctccatcacagattctctatttatgttgatgatgtggttatatttatccaaccaacagtcggggatatcaggactgtactggacattcttcatatctttggggaggcttccaggttgcgaactaatatccagaaaagcaatgtatgcccaattagatgcggggaacaagacttgaccttactgcaaagcttgctgccttgtgagatctcacaatttccctgcaaatacttgggtctacttcttgccatcaagaaacttaccaaggaccaagtacaaacgattattgataaaattgccaaccaactatcggggtggaaatctgatttgatgactaaggctggatggaaggtccatgtgcagtttgtcctcacagggatggtcatatatctcgcaatggctgtggatttacctccttgggctctcaaagctattgacaagatccgccgaggctttctttggcgatggcgcaaagaagcgagggggggacactgtcttgttgcttggggaaaagtttgtcggccgcttgagcttggtgggctagggatttccaatctcattgatcttgcttgggcacttcgtatgcgttggttttggttagcaaaaactgatccgggacggccatgggcctcccttgctatacaagttcccagcaaggctaaagttttcttctcggtggctatgcaaactgaaattggtaatggagcctctactcttttttggtctgaccgttggttgatgggacacagggtcatggacattgccccaagattactccagaatgttcctaaaaggagggttaataagaggactgttttggatgctctcactaatcagacttggatttcagacatacaaggagctcttgctgttggggttatttctgaataccttgctctatgggatattgtcacctcggttcagcttagacgcgaagtgaatgacactcacttctttcgtctcgccgccaatgggaagtattcaacaaaggcagtctatgagggtttttttccttgggtcgacgatttttgaaccgtaccacataatttggaaaacccgggctcctccaaaggccaagttcttcatgtggctggtcgcgacggctttggacagctaacaggttggaaaagagaggcatggatcaccctacgagctgccctttgtcaggagcaggccatttgctgattgggtgtgtgttcgcccgagatttctggtttaaactactatctcaagttaatctccaaaacatggcctctcagcttgttgatgcatcttttatgggctggtggagatggctgggcaatcagatacatggagtcagtggcaggggaagcagtaaactccctggtaatttcaggagcttggacaatatggaaacgtcggaatagctgtgtcttcgacagaaacagacctaatgtggctcttgctgtcagaatggcgatcaagagcgagagaagcgggagctgactggggcaagaaaactatccttgctgactagtcacatcccgggtctgtaggaatttgtagttttgggtgctttattcatggatgagtatcagtatgtctgtatttggccccctgtgaggtggctgttttgtattatctctgtttttttcttcttaatggaatgaaacacaactctcctgcgttttttagaaaaaaaaaacaatttgcagccaccaacaatgctggattcaggaaacatccgccatctgtctgcatggcggctgaagcatgggtcttgcttgaagattccgtgtttgctgaaaacggccagcaggaaaacagtagacgtttggttgaacagggtgccactgccagagatttgagataggagagtggcagtggttttgcttgagctccgtgtcacctgaaatactttgttgtagcaaggcctgtaggagaatttctcattgtaccatcgctagacttggtcagtctgtactttatacggttagtcgcatgtaaactgtgagtttaccaaaaaagaattacc

SEQ ID NO: 53574 - DNA, 4836 bp, Zea Mays
cacagacttgttgtctgtctccccttggttctcggcggctcaagcagcgacagactcatcatcgagttgtcatcgattcctcgtggaggtcttgctcgcggcggaggtatatatttatatatctcaggtgaattcagacatggcagatgccctatttgtagttcttagtaaacttgctgattccttgggagaacagacactagagaggattagcacaaagctgattgaagtagcaccagttttgacagattttgagcatagcatgaagcaaatcgaggctgagctattgattcttcaggcttttattgcacaggttgggacaaaagtcggtgataaggcatttgatgcctggctggaccaagtgagagatgttgcccatgaggtagaagacatcattgatgagtatgcttaccttgaggttcaagccgtggatactggcagcttctttaagaggaagttccttcagataaaaaagttcgctgcatggcagaagtttcatagccagatcagtcatgtagaagctcgaattcagaggctaggtgaaattaggaatcgatatggcatcttgtcaggtgaaatagacaggagtaagaaattgaggagccccaatcggctctttatgtcagattcttcttacttaactgataactctgaaatagtggggcatgttgatgaaattggaagattgacacagtggttacttgagtacaaacaagagcgaactcttattgccgtttttggtatgggaggttcaggaaaaactactattgcaagcagtgcatacaagagtcaaaagatcacaaggactttcaattgtcatgcatgggttactgtatctcagacttaccaagttgaagaactactaagagaaatcataaatcagctaatagatcagagagcaagcatgtcaagtgggtttatgactatgagcggcttgaggctagttgaggtaatacaaagctatttgcaagataaaaaatatttcattgtcttggatgatgtatgggataaagatgcatggctatttctaaactatgcatttgtcagaaacaattgtggaagcaaagtgctgataactactcggagaaaggacgtatctagcttggcagttgatcagtatacaattgagcttaaaactcttcaatatgctgaatcctgggaacttttctgtaaaaaggcatttcgtgcatcaaaggataaccaatgtcctgagaaccttaggttttgtgcagagaaaattgttgctaggtgtcagggattgcccctggctattgtaaccattggaagtgttctatcataccatgaattcgaagagcagggatgggaatctttctacagccaacttagctggcagttagctaacaatccggagctgaattggatatctaatgttctgaatatgagcttgaatgatctcccgagttatctgaggaactgctttctgtactgcagtctttatcctgaagattacaagattaaaagaaaagtgatttccaagctatggatagcagaaggtttagtggaagatagagaagatggaacaacaatggaggaggttgccaattattaccttgtggagctcactcagcgttgtcttcttcgagtcacagaaagtaatgcatgtggaaggccgagagcttttgttatgcatgatcttgtgcgagagttaacctccaacattgctaaaaaggagaagtttggtattgcatatggcgatgctagtacaacccaagttccccctgaagttcgccgcttatgcatacaaagagtccatgattttcaacaaagatcattgaattgtttaggcgcaacaaaaattcctgttaacatttgtcatctaaagaatctgcaagctatacagatcgttttggccaacaaagatttggtttcacaacttgggaacttgaaattaatgagaagtttggctatagcggaagtgcggcaaagctacattgcagaattatggaagtccctgacaaagatgcctaacctgaataggttggctatttcaacatgcaacatggaggagattcttgattttaaaatgctaaagcccttatcaaatctggttttcttcaagcttgcaggaaagttggagtcaggcgtgcttcctttgatgttgtattattttgagaagttaacatggttacaattagactggtccggtctaaagaaggaccctatgagctccttatctcacatgtcgaaccttgttcatctgttcatgtgcgggtcatattgtggggaacagctaactttttgttcaggatggttccccaagctcaattatctgcaattatctaaaatggagaatctgaattggattgagatagaggatggaacaatgatgtgtctaaataatttgtacttagttgatttagggaatctaaaggctgtgccctatggcatcaagtacatcaggacactgcaccagatgcatctgacagatatgtcaaaggagtttctaggaagtctgcaaggaagcgcgagtcccgttgttcaacatatatgcaacatccatatttttgaatcctctgattctgaagcagtaaataaattcttctttgagccataccttgccaccaagttcggccctggtgcaactaagcatgcccctacttacctgggatcatctggcatctgacagtcgtggcctgctatggacttcctccacacaggtgttgcttaatggatctccagggcagcatatatctcatcggcgtgggctcagacaagatgacccactttccccaatgttattcattttggtgatggacgttctgggctttcttattaccaaggctgagaatgaagggttgcttcggccccttgctacaagaactctccatcacagattctctatttatgttgatgatgtggttatatttatccaaccaacagtcggggatatcaggactgtactggacattcttcatatctttggggaggcttccaggttgcgaactaatatccagaaaagcaatgtatgcccaattagatgcggggaacaagacttgaccttactgcaaagcttgctgccttgtgagatctcacaatttccctgcaaatacttgggtctacttcttgccatcaagaaacttaccaaggaccaagtacaaacgattattgataaaattgccaaccaactatcggggtggaaatctgatttgatgactaaggctggatggaaggtccatgtgcagtttgtcctcacagggatggtcatatatctcgcaatggctgtggatttacctccttgggctctcaaagctattgacaagatccgccgaggctttctttggcgatggcgcaaagaagcgagggggggacactgtcttgttgcttggggaaaagtttgtcggccgcttgagcttggtgggctagggatttccaatctcattgatcttgcttgggcacttcgtatgcgttggttttggttagcaaaaactgatccgggacggccatgggcctcccttgctatacaagttcccagcaaggctaaagttttcttctcggtggctatgcaaactgaaattggtaatggagcctctactcttttttggtctgaccgttggttgatgggacacagggtcatggacattgccccaagattactccagaatgttcctaaaaggagggttaataagaggactgttttggatgctctcactaatcagacttggatttcagacatacaaggagctcttgctgttggggttatttctgaataccttgctctatgggatattgtcacctcggttcagcttagacgcgaagtgaatgacactcacttctttcgtctcgccgccaatgggaagtattcaacaaaggcagtctatgagggtttttttccttgggtcgacgatttttgaaccgtaccacataatttggaaaacccgggctcctccaaaggccaagttcttcatgtggctggtcgcgacggctttggacagctaacaggttggaaaagagaggcatggatcaccctacgagctgccctttgtcaggagcaggccatttgctgattgggtgtgtgttcgcccgagatttctggtttaaactactatctcaagttaatctccaaaacatggcctctcagcttgttgatgcatcttttatgggctggtggagatggctgggcaatcagatacatggagtcagtggcaggggaagcagtaaactccctggtaatttcaggagcttggacaatatggaaacgtcggaatagctgtgtcttcgacagaaacagacctaatgtggctcttgctgtcagaatggcgatcaagagcgagagaagcgggagctgactggggcaagaaaactatccttgctgactagtcacatcccgggtctgtaggaatttgtagttttgggtgctttattcatggatgagtatcagtatgtctgtatttggccccctgtgaggtggctgttttgtattatctctgtttttttcttcttaatggaatgaaacacaactctcctgcgttttttagaaaaaaaaaacaatttgcagccaccaacaatgctggattcaggaaacatccgccatctgtctgcatggcggctgaagcatgggtcttgcttgaagattccgtgtttgctgaaaacggccagcaggaaaacagtagacgtttggttgaacagggtgccactgccagagatttgagataggagagtggcagtggttttgcttgagctccgtgtcacctgaaatactttgttgtagcaaggcctgtaggagaatttctcattgtaccatcgctagacttggtcagtctgtactttatacggttagtcgcatgtaaactgtgagtttaccaaaaaagaattacc

SEQ ID NO: 53575 - DNA, 4751 bp, Zea Mays
ataactcgccacagacttgttgtctgtctccccttggttctcggcggctcaagcagcgacagactcatcatcgagttgtcatcgattcctcgtggaggtcttgctcgcggcggaggtatatatttatatatctcaggtgaattcagacatggcagatgccctatttgtagttcttagtaaacttgctgattccttgggagaacagacactagagaggattagcacaaagctgattgaagtagcaccagttttgacagattttgagcatagcatgaagcaaatcgaggctgagctattgattcttcaggcttttattgcacaggttgggacaaaagtcggtgataaggcatttgatgcctggctggaccaagtgagagatgttgcccatgaggtagaagacatcattgatgagtatgcttaccttgaggttcaagccgtggatactggcagcttctttaagaggaagttccttcagataaaaaagttcgctgcatggcagaagtttcatagccagatcagtcatgtagaagctcgaattcagaggctaggtgaaattaggaatcgatatggcatcttgtcaggtgaaatagacaggagtaagaaattgaggagccccaatcggctctttatgtcagattcttcttacttaactgataactctgaaatagtggggcatgttgatgaaattggaagattgacacagtggttacttgagtacaaacaagagcgaactcttattgccgtttttggtatgggaggttcaggaaaaactactattgcaagcagtgcatacaagagtcaaaagatcacaaggactttcaattgtcatgcatgggttactgtatctcagacttaccaagttgaagaactactaagagaaatcataaatcagctaatagatcagagagcaagcatgtcaagtgggtttatgactatgagcggcttgaggctagttgagaaacaattgtggaagcaaagtgctgataactactcggagaaaggacgtatctagcttggcagttgatcagtatacaattgagcttaaaactcttcaatatgctgaatcctgggaacttttctgtaaaaaggcatttcgtgcatcaaaggataaccaatgtcctgagaaccttaggttttgtgcagagaaaattgttgctaggtgtcagggattgcccctggctattgtaaccattggaagtgttctatcataccatgaattcgaagagcagggatgggaatctttctacagccaacttagctggcagttagctaacaatccggagctgaattggatatctaatgttctgaatatgagcttgaatgatctcccgagttatctgaggaactgctttctgtactgcagtctttatcctgaagattacaagattaaaagaaaagtgatttccaagctatggatagcagaaggtttagtggaagatagagaagatggaacaacaatggaggaggttgccaattattaccttgtggagctcactcagcgttgtcttcttcgagtcacagaaagtaatgcatgtggaaggccgagagcttttgttatgcatgatcttgtgcgagagttaacctccaacattgctaaaaaggagaagtttggtattgcatatggcgatgctagtacaacccaagttccccctgaagttcgccgcttatgcatacaaagagtccatgattttcaacaaagatcattgaattgtttaggcgcaacaaaaattcctgttaacatttgtcatctaaagaatctgcaagctatacagatcgttttggccaacaaagatttggtttcacaacttgggaacttgaaattaatgagaagtttggctatagcggaagtgcggcaaagctacattgcagaattatggaagtccctgacaaagatgcctaacctgaataggttggctatttcaacatgcaacatggaggagattcttgattttaaaatgctaaagcccttatcaaatctggttttcttcaagcttgcaggaaagttggagtcaggcgtgcttcctttgatgttgtattattttgagaagttaacatggttacaattagactggtccggtctaaagaaggaccctatgagctccttatctcacatgtcgaaccttgttcatctgttcatgtgcgggtcatattgtggggaacagctaactttttgttcaggatggttccccaagctcaattatctgcaattatctaaaatggagaatctgaattggattgagatagaggatggaacaatgatgtgtctaaataatttgtacttagttgatttagggaatctaaaggctgtgccctatggcatcaagtacatcaggacactgcaccagatgcatctgacagatatgtcaaaggagtttctaggaagtctgcaaggaagcgcgagtcccgttgttcaacatatatgcaacatccatatttttgaatcctctgattctgaagcagtaaataaattcttctttgagccataccttgccaccaagttcggccctggtgcaactaagcatgcccctacttacctgggatcatctggcatctgacagtcgctagtggcctgctatggacttcctccacacaggtgttgcttaatggatctccagggcagcatatatctcatcggcgtgggctcagacaagatgacccactttccccaatgttattcattttggtgatggacgttctgggctttcttattaccaaggctgagaatgaagggttgcttcggccccttgctacaagaactctccatcacagattctctatttatgttgatgatgtggttatatttatccaaccaacagtcggggatatcaggactgtactggacattcttcatatctttggggaggcttccaggttgcgaactaatatccagaaaagcaatgtatgcccaattagatgcggggaacaagacttgaccttactgcaaagcttgctgccttgtgagatctcacaatttccctgcaaatacttgggtctacttcttgccatcaagaaacttaccaaggaccaagtacaaacgattattgataaaattgccaaccaactatcggggtggaaatctgatttgatgactaaggctggatggaaggtccatgtgcagtttgtcctcacagggatggtcatatatctcgcaatggctgtggatttacctccttgggctctcaaagctattgacaagatccgccgaggctttctttggcgatggcgcaaagaagcgagggggggacactgtcttgttgcttggggaaaagtttgtcggccgcttgagcttggtgggctagggatttccaatctcattgatcttgcttgggcacttcgtatgcgttggttttggttagcaaaaactgatccgggacggccatgggcctcccttgctatacaagttcccagcaaggctaaagttttcttctcggtggctatgcaaactgaaattggtaatggagcctctactcttttttggtctgaccgttggttgatgggacacagggtcatggacattgccccaagattactccagaatgttcctaaaaggagggttaataagaggactgttttggatgctctcactaatcagacttggatttcagacatacaaggagctcttgctgttggggttatttctgaataccttgctctatgggatattgtcacctcggttcagcttagacgcgaagtgaatgacactcacttctttcgtctcgccgccaatgggaagtattcaacaaaggcagtctatgagggtttttttccttgggtcgacgatttttgaaccgtaccacataatttggaaaacccgggctcctccaaaggccaagttcttcatgtggctggtcgcgacggctttggacagctaacaggttggaaaagagaggcatggatcaccctacgagctgccctttgtcaggagcaggccatttgctgattgggtgtgtgttcgcccgagatttctggtttaaactactatctcaagttaatctccaaaacatggcctctcagcttgttgatgcatcttttatgggctggtggagatggctgggcaatcagatacatggagtcagtggcaggggaagcagtaaactccctggtaatttcaggagcttggacaatatggaaacgtcggaatagctgtgtcttcgacagaaacagacctaatgtggctcttgctgtcagaatggcgatcaagagcgagagaagcgggagctgactggggcaagaaaactatccttgctgactagtcacatcccgggtctgtaggaatttgtagttttgggtgctttattcatggatgagtatcagtatgtctgtatttggccccctgtgaggtggctgttttgtattatctctgtttttttcttcttaatggaatgaaacacaactctcctgcgttttttagaaaaaaaaaacaatttgcagccaccaacaatgctggattcaggaaacatccgccatctgtctgcatggcggctgaagcatgggtcttgcttgaagattccgtgtttgctgaaaacggccagcaggaaaacagtagacgtttggttgaacagggtgccactgccagagatttgagataggagagtggcagtggttttgcttgagctccgtgtcacctgaaatactttgttgtagcaaggcctgtaggagaatttctcattgtaccatcgctagacttggtcagtctgtactttatacggttagtcgcatgtaaactgtgagtttaccaaaaaagaattacc

SEQ ID NO: 53576 - DNA, 2879 bp, Zea Mays
gagaagtcagcgaatatggcagacgcgctgtttgttgttctcaggaaagttgccctttccctgggagaaggcgcgctggtgaagattggcacggacgtggtcgaggcagcgcccatcttgacagattttgagcatggcatgcgacaaaccgagggcgagctcttggtcctgcaggcctttatcgggcaggtccgggcgcagaaggccggtgacaaggcgttcggcgcatggttggaccaggttagagatgtcgcccatgaggtagaagatatcgttgacgagtatgcttaccttaccacgcaagccatggatgcaagcagcttcttcaagagaaagttccatcaggtgaagaactttgcagcgtggcagaagctaccgatccggatcagtcaagtggaagctcgggtccggaggctgtccgaaatgaggagccggtatgggatttcggtaggcgaacaagacaggggtagcaagttacagcaatccaatcagttctctgcgtcagattttgcttacctaactgatgattctgaaatagtagggcatggcgaggaaatcgagagactgacacagtggctgcttgaggagaatcaggaccgaactctgatagccatctttggtatgggtggtctaggtaaaactactgttgcaagcagtgtctacaagaaccaaaagatcaggagaacttttgattgccatgcatgggtcacggtatctcagacttaccaagctgaagagcttctgagagaaatcatgaaccagttaatagagcagagagcaagtttggcaagtggcttcatgaccatgagtcgcatgagattagttgagatgatacagaactatttgcgggacaaaaaatattttattgtcttggatgatgtatgggataaagatgcttggttgtttctgaactatgcatttgccagaaacaattgtggaagtaaagtgctgataacaacccggagaaaagatgtgtattctttggcagttcacagtcatgtaattgaacttaaaactcttaactatgctgaatcatgggaactcttctgcaaaaaagcattttttgcattggagggcaacatatgccctaagaatctcacgtctttggtggagaaagtcgttgataagtgtcaaggattgccattggctatcatagccatcggaaggattctatcatgccatggattagatgaatgggagtgggcatttttctacaaccaacttaattggcagttagctaacaattcagagctaagctggatctctactgtcttgaatctgagcttggatgatctcccaagtcatctgaggagctgctttctatactgcagcctatttcctgaagatcactttattaaaagaaaacagatagccaagttatggattgcggaaggtcttgtggatgagagaggggatgggacaacaatggaggaagttgctgagcattaccttgcagagctaactcaccgttctcttcttcaggtcatagaaagaaatgcaagcggaaggccaagaacgtttgttatgcatgatcttgtgcgggaagtgacctcaataaccgctgaaaaggaaaagttcgcggtgatacatggccatgttggtacaacccaagtttcccatgatgcgcgccgcttgtgcatccaaaaaagaaagatgaagggaggcgtgctcccatcgatattcaacaagtttgagaagctaacacagttaaaaatggactggtctggtctgaataaggaccctataagctccttttcttacatgctaactctagtcgatgtgtggttcttcggggcatattgtggggaatatctatctttttgtgctggatggttccccaatctcaaatctctgcacattgctgatatggaacatctgactcggattgagatagaggatggaacaatgatgggcctgcatcatctggaacttgttggtttaaggaatatgaggctagttcctaagggtatcaagtatattagaacactccgtcagatgatcctgactgatatgccaaaggagttagttgaaagcctgcgaggaagtgacgcgcacattgttcagcatgttcccaacatccatatttttgactccagtgatcctgaagcagtaaataacttcatattctggcctcatcttgccaagaagtacggctctggtgtaactaagtatgaccctagaaaatgaggatcatctggaacctggaaaattattgggaggtttcagcaataaatatgtctctgatttgtaggacaaccacttgagcagtgagaaaatcatcaaaatgtacttgttgatcttggtgccaaaactctagatgagtgtgttttgtgtgtaatatatgttactcatggattttggccctcgctaccgaatggtttcctactgccaataatgattcattcgaacagaattcaccatcaaaaaatggagaaggaaacatgtggaagctaaaagattgtgcattcacttataaatgggcatcatccctctaggagtgaggcgccttggacaaaccgcagaagtctcacatatgcagtgcttgagagtggcaggccaactaaataactattgcctatgagagtttgtgaagccatctgtgccgtcttagatcttgtcgtatgctaatatcttaaaacaacaataatttcttattttgtttgttgaaacctatgagtggaaccattgagttggtgttactatttgtcagctatgagagttttccagttactatttgtcagctattatcagtggcttatcagttatggttaccacaaagaaaatatgctgctaggtgctatgtaatgatcaatcgacaaacaccaaggttagttcaaatcagctcccaatttgtttgatctgtgcaatttctagacccg

SEQ ID NO: 53577 - DNA, 3998 bp, Zea Mays
cattggttctcgtctggctagctaagtccgcacgctttctttccttgtttctccaagcccccgccccctccccgagctatgataccaaccgtacaggcagatattgtagatagattgcccctcatgtctcgcgcgcttgcgattagtgttatcaacccgtaggagcagcaggaggccaggagcttatgtgccttcttgtacgctgccatctgtcatgtgaccaattcgtcgagcatcctataggcatcgggcaatgccaaatcctgggcagttgatccagcgtccttgttgttttcctgatgaattcggctgctggtgttagctattgaacctcgttctttcccctcacacactgatgaaacccgaagtctcctgttgctagtcggacagcgcgcgcggcggctgtttttcttggttatctcttgattcttggttggaaatataccatacagcagtaaggagaagtcagcgaatatggcagacgcgctgtttgttgttctcaggaaagttgccctttccctgggagaaggcgcgctggtgaagattggcacggacgtggtcgaggcagcgcccatcttgacagattttgagcatggcatgcgacaaaccgagggcgagctcttggtcctgcaggcctttatcgggcaggtccgggcgcagaaggccggtgacaaggcgttcggcgcatggttggaccaggttagagatgtcgcccatgaggtagaagatatcgttgacgagtatgcttaccttaccacgcaagccatggatgcaagcagcttcttcaagagaaagttccatcaggtgaagaactttgcagcgtggcagaagctaccgatccggatcagtcaagtggaagctcgggtccggaggctgtccgaaatgaggagccggtatgggatttcggtaggcgaacaagacaggggtagcaagttacagcaatccaatcagttctctgcgtcagattttgcttacctaactgatgattctgaaatagtagggcatggcgaggaaatcgagagactgacacagtggctgcttgaggagaatcaggaccgaactctgatagccatctttggtatgggtggtctaggtaaaactactgttgcaagcagtgtctacaagaaccaaaagatcaggagaacttttgattgccatgcatgggtcacggtatctcagacttaccaagctgaagagcttctgagagaaatcatgaaccagttaatagagcagagagcaagtttggcaagtggcttcatgaccatgagtcgcatgagattagttgagatgatacagaactatttgcgggacaaaaaatattttattgtcttggatgatgtatgggataaagatgcttggttgtttctgaactatgcatttgccagaaacaattgtggaagtaaagtgctgataacaacccggagaaaagatgtgtattctttggcagttcacagtcatgtaattgaacttaaaactcttaactatgctgaatcatgggaactcttctgcaaaaaagcattttttgcattggagggcaacatatgccctaagaatctcacgtctttggtggagaaagtcgttgataagtgtcaaggattgccattggctatcatagccatcggaaggattctatcatgccatggattagatgaatgggagtgggcatttttctacaaccaacttaattggcagttagctaacaattcagagctaagctggatctctactgtcttgaatctgagcttggatgatctcccaagtcatctgaggagctgctttctatactgcagcctatttcctgaagatcactttattaaaagaaaacagatagccaagttatggattgcggaaggtcttgtggatgagagaggggatgggacaacaatggaggaagttgctgagcattaccttgcagagctaactcaccgttctcttcttcaggtcatagaaagaaatgcaagcggaaggccaagaacgtttgttatgcatgatcttgtgcgggaagtgacctcaataaccgctgaaaaggaaaagttcgcggtgatacatggccatgttggtacaacccaagtttcccatgatgcgcgccgcttgtgcatccaaaaaagtgcagattctcaaaactctttagcaaattcacatcttcgatcattcattttatttgacaatttagtaccgtcttcctggataaatgatgtctcatcacgtttcagactgctgagggtcttaggcctaagatttactaatattgaacaaatgccgtgcggggtcacagaactgtataacttgcgttatctggatatttcgtacacaaaagtcaagcagataccggcatcattcagaaaactcatgcaccttcaagttttagatctgaggttcacctgcgtggaggagttgccatttgaaataactacgctaactaatttacgccatttacatgttgctgcggtccatgatcttcaagaaagatcactgaattgcttcagtgctacaaaaattcctggcaacatttgtggcctaaagaatcttcaatctttacatacggtttcagctaatgaagatttggtttcacagttgggaaatttgactcttatgagaagcttgactataatgaatgtgcggcaaagctatatcgcagagctatggaactccctgacaaaaatgcctaacctgagtgtcctgattatttttgcatctgatatggatgagattcttgatttgagaatgctgaggcccttacctaaccttaagttgttctggctggcaggaaagatgaagggaggcgtgctcccatcgatattcaacaagtttgagaagctaacacagttaaaaatggactggtctggtctgaataaggaccctataagctccttttcttacatgctaactctagtcgatgtgtggttcttcggggcatattgtggggaatatctatctttttgtgctggatggttccccaatctcaaatctctgcacattgctgatatggaacatctgactcggattgagatagaggatggaacaatgatgggcctgcatcatctggaacttgttggtttaaggaatatgaggctagttcctaagggtatcaagtatattagaacactccgtcagatgatcctgactgatatgccaaaggagttagttgaaagcctgcgaggaagtgacgcgcacattgttcagcatgttcccaacatccatatttttgactccagtgatcctgaagcagtaaataacttcatattctggcctcatcttgccaagaagtacggctctggtgtaactaagtatgaccctagaaaatgaggatcatctggaacctggaaaattattgggaggtttcagcaataaatatgtctctgatttgtaggacaaccacttgagcagtgagaaaatcatcaaaatgtacttgttgatcttggtgccaaaactctagatgagtgtgttttgtgtgtaatatatgttactcatggattttggccctcgctaccgaatggtttcctactgccaataatgattcattcgaacagaattcaccatcaaaaaatggagaaggaaacatgtggaagctaaaagattgtgcattcacttataaatgggcatcatccctctaggagtgaggcgccttggacaaaccgcagaagtctcacatatgcagtgcttgagagtggcaggccaactaaataactattgcctatgagagtttgtgaagccatctgtgccgtcttagatcttgtcgtatgctaatatcttaaaacaacaataatttcttattttgtttgttgaaacctatgagtggaaccattgagttggtgttactatttgtcagctatgagagttttccagttactatttgtcagctattatcagtggcttatcagttatggttaccacaaagaaaatatgctgctaggtgctatgtaatgatcaatcgacaaacaccaaggttagttcaaatcagctcccaatttgtttgatctgtgcaatttctagacccg

SEQ ID NO: 53578 - DNA, 2773 bp, Zea Mays
ccagatttcatgatgcttccgtcatctactatctcgtgtatcagtccccgccggcttccgtccccaattactcgctcaaaccctagccccaccgcgcgaatggccgatgtgcttgacccggcctccgacgcgccgcgcgcgcgccgtccgccgccacctcccccggatagcccggaggaccgctcgccgcagctgcccccgcctccacccgggggccccccggcggcgagccggaagcggagtcgctctccgccgccgccgccgccgcctccgctgggttcgtcccggccccaaaggtatcgggaccaccgcagcggcggagggcggggcgggagcagccccagcccgccgccgtaccggggcagccgccgccactcgccgtccaggagatccccgtcgccgccattcaagcggtcgcggagggacgacgggtacgaccgccgcgggggccgcgggagcccgccgcgttacgggtacgatgataggaggcgaggttatgaccatgagcgaggtggcggcagaggtgggtatgaagatgacaggaaccagggcagatatctgaaccgtgctccagattggcctgattcggggtacggagcggccaatgatggtccaggggtcacccaaagggaaggtttgatgacatacaaacagttcatgcaagttcttgaggatgatatttcaccaagtgaagctgaacgcaggtaccaagagtatagaactgagtatatcactactcagaaacgtgcttattttgatctccacaagaatgaagattggttaaaagacaagtaccacccaactaacttgttgtctgttatcgaaaggaggaatgaacgttgcaaggttatagcaaaggatttctttcttgatttgcagaatggaactctggacctaggccctggaataactgccggtgcagcaagtaaactaggtggtagtgatggaaattctgaggatgacatggacaatgacaagagaagaaagcatggcaaagattcctcaaaagcaactgattctctttctggtgcccccaaggctcatccagttagttctgaatcacgtcgagtccaagctgacatagagcaaactctagctctcgtgcgtaagcttgatgctgagaagggcattgatggcaatgtactgtcaagtggtgatcatgacaagtcagatgtagacaaatcacacataggatctatggggcctatagttataatcagaggtttaacgactgtcaaaggcctggaaggcgttgagctcctagacactattcttacctatttgtggcgtattcatggtgttgattactatggcacatcagagtcgcatgaggccaagggccttcgtcacgtgagagtagacagtaagacttctagcacatctgatgtcagttctgctgattgggagaagaagctggatactttctggcaggaaagactgaatggtcaggaccagctggtcatacttactgccaaggacaaaattgatgcagcagctgctgaagttttagaacctcttgtcaggaaaatcagggatgaaaagtatggatggaaatatggctgtggagccaagggctgtacaaagctttttcatgctcctgagtttgttcacaagcatttgaagctcaagcatccagaccttgtattagagtcaacgtcaaaagttcgagaggatctttattttcaaaattacatgaatgatcctaacgcaccaggtggaaccccagtgatgcaacagtctgcaccaaggaagacggagacctagcatggacagtcgtctgaaatttgaccgtggcagtaacagagaccatgataaagctgatagagatggagtcaggtatggtagaggtgaccactctccaagccgtgatgggcctgatgatcagatgtttgatggtttccgcggacggccctcgaatgctccttttgttgctgaattcccagctccaccgatattgatgccagtacctggtgctggtcccttgggcccatttgttcctgcacctccagagatagcgatgcatatgctgagagagcaagggccacctcctccttttgaaccaaatggcgcaccacatggcaatgctggaatgcttgggccaatgatgggtggcccagcaccgattatagctatgcctccaaatttccgccatgatcctcgccgcctgagaagttataacgacctcgatgctcctgatgaggaagtcactgtccttgactacagaagcttgtagggtccagcacctccagatacccgtagtcaagtttcccgttcccccattggtgaattgggcttttttctctttatgaaggcaaaagatggaaggttatgttcaattaaaccaatttttgggtcacctgtagtctgttagattctgttgtaacttgaatactctgtggatgcactgcggttgctacagttcttgtccaacttttttttgacacagtgctgtaataaataggcgtctgtttggaacctgggtggggtggttgtagtgagagatacgtacttcgccaccttgttgcagtctgcaatgccccttgaacatttgctgcaatccgtgacttcgtcagaagtcagaacgaagacttggtactgggtgttgaacggtttacaaacaataaggtcaaaattcttatcaactcgcaatatctggactcaggtattggcagtgtagcgaaagtgtgtagtacccatgaacgtgcatgatttgtttgttgtaaaaaatgtagaaagaaaaagcatgtgacaacaacaacagtcttccaattaa

SEQ ID NO: 53579 - DNA, 2763 bp, Zea Mays
ccagatttcatgatgcttccgtcatctactatctcgtgtatcagtccccgccggcttccgtccccaattactcgctcaaaccctagccccaccgcgcgaatggccgatgtgcttgacccggcctccgacgcgccgcgcgcgcgccgtccgccgccacctcccccggatagcccggaggaccgctcgccgcagctgcccccgcctccacccgggggccccccggcggcgagccggaagcggagtcgctctccgccgccgccgccgccgcctccgctgggttcgtcccggccccaaaggtatcgggaccaccgcagcggcggagggcggggcgggagcagccccagcccgccgccgtaccggggcagccgccgccactcgccgtccaggagatccccgtcgccgccattcaagcggtcgcggagggacgacgggtacgaccgccgcgggggccgcgggagcccgccgcgttacgggcgaggttatgaccatgagcgaggtggcggcagaggtgggtatgaagatgacaggaaccagggcagatatctgaaccgtgctccagattggcctgattcggggtacggagcggccaatgatggtccaggggtcacccaaagggaaggtttgatgacatacaaacagttcatgcaagttcttgaggatgatatttcaccaagtgaagctgaacgcaggtaccaagagtatagaactgagtatatcactactcagaaacgtgcttattttgatctccacaagaatgaagattggttaaaagacaagtaccacccaactaacttgttgtctgttatcgaaaggaggaatgaacgttgcaaggttatagcaaaggatttctttcttgatttgcagaatggaactctggacctaggccctggaataactgccggtgcagcaagtaaactaggtggtagtgatggaaattctgaggatgacatggacaatgacaagagaagaaagcatggcaaagattcctcaaaagcaactgattctctttctggtgcccccaaggctcatccagttagttctgaatcacgtcgagtccaagctgacatagagcaaactctagctctcgtgcgtaagcttgatgctgagaagggcattgatggcaatgtactgtcaagtggtgatcatgacaagtcagatgtagacaaatcacacataggatctatggggcctatagttataatcagaggtttaacgactgtcaaaggcctggaaggcgttgagctcctagacactattcttacctatttgtggcgtattcatggtgttgattactatggcacatcagagtcgcatgaggccaagggccttcgtcacgtgagagtagacagtaagacttctagcacatctgatgtcagttctgctgattgggagaagaagctggatactttctggcaggaaagactgaatggtcaggaccagctggtcatacttactgccaaggacaaaattgatgcagcagctgctgaagttttagaacctcttgtcaggaaaatcagggatgaaaagtatggatggaaatatggctgtggagccaagggctgtacaaagctttttcatgctcctgagtttgttcacaagcatttgaagctcaagcatccagaccttgtattagagtcaacgtcaaaagttcgagaggatctttattttcaaaattacatgaatgatcctaacgcaccaggtggaaccccagtgatgcaacagtctgcaccagacagaggaagacggagacctagcatggacagtcgtctgaaatttgaccgtggcagtaacagagaccatgataaagctgatagagatggagtcaggtatggtagaggtgaccactctccaagccgtgatgggcctgatgatcagatgtttgatggtttccgcggacggccctcgaatgctccttttgttgctgaattcccagctccaccgatattgatgccagtacctggtgctggtcccttgggcccatttgttcctgcacctccagagatagcgatgcatatgctgagagagcaagggccacctcctccttttgaaccaaatggcgcaccacatggcaatgctggaatgcttgggccaatgatgggtggcccagcaccgattatagctatgcctccaaatttccgccatgatcctcgccgcctgagaagttataacgacctcgatgctcctgatgaggaagtcactgtccttgactacagaagcttgtagggtccagcacctccagatacccgtagtcaagtttcccgttcccccattggtgaattgggcttttttctctttatgaaggcaaaagatggaaggttatgttcaattaaaccaatttttgggtcacctgtagtctgttagattctgttgtaacttgaatactctgtggatgcactgcggttgctacagttcttgtccaacttttttttgacacagtgctgtaataaataggcgtctgtttggaacctgggtggggtggttgtagtgagagatacgtacttcgccaccttgttgcagtctgcaatgccccttgaacatttgctgcaatccgtgacttcgtcagaagtcagaacgaagacttggtactgggtgttgaacggtttacaaacaataaggtcaaaattcttatcaactcgcaatatctggactcaggtattggcagtgtagcgaaagtgtgtagtacccatgaacgtgcatgatttgtttgttgtaaaaaatgtagaaagaaaaagcatgtgacaacaacaacagtcttccaattaa

SEQ ID NO: 53580 - DNA, 2273 bp, Zea Mays
ccagatttcatgatgcttccgtcatctactatctcgtgtatcagtccccgccggcttccgtccccaattactcgctcaaaccctagccccaccgcgcgaatggccgatgtgcttgacccggcctccgacgcgccgcgcgcgcgccgtccgccgccacctcccccggatagcccggaggaccgctcgccgcagctgcccccgcctccacccgggggccccccggcggcgagccggaagcggagtcgctctccgccgccgccgccgccgcctccgctgggttcgtcccggccccaaaggtatcgggaccaccgcagcggcggagggcggggcgggagcagccccagcccgccgccgtaccggggcagccgccgccactcgccgtccaggagatccccgtcgccgccattcaagcggtcgcggagggacgacgggtacgaccgccgcgggggccgcgggagcccgccgcgttacgggtacgatgataggaggcgaggttatgaccatgagcgaggtggcggcagaggtgggtatgaagatgacaggaaccagggcagatatctgaaccgtgctccagattggcctgattcggggtacggagcggccaatgatggtccaggggtcacccaaagggaaggtttgatgacatacaaacagttcatgcaagttcttgaggatgatatttcaccaagtgaagctgaacgcaggtaccaagagtatagaactgagtatatcactactcagaaacgtgcttattttgatctccacaagaatgaagattggttaaaagacaagtaccacccaactaacttgttgtctgttatcgaaaggtggagttgcattctgtgtggactttggtcttgtaatatctaggaccttatatgctctagtacaaaggaggaatgaacgttgcaaggttatagcaaaggatttctttcttgatttgcagaatggaactctggacctaggccctggaataactgccggtgcagcaagtaaactaggtggtagtgatggaaattctgaggatgacatggacaatgacaagagaagaaagcatggcaaagattcctcaaaagcaactgattctctttctggtgcccccaaggctcatccagttagttctgaatcacgtcgagtccaagctgacatagagcaaactctagctctcgtgcgtaagcttgatgctgagaagggcattgatggcaatgtactgtcaagtggtgatcatgacaagtcagatgtagacaaatcacacataggatctatggggcctatagttataatcagaggtttaacgactgtcaaaggcctggaaggcgttgagctcctagacactattcttacctatttgtggcgtattcatggtgttgattactatggcacatcagagtcgcatgaggccaagggccttcgtcacgtgagagtagacagtaagacttctagcacatctgatgtcagttctgctgattgggagaagaagctggatactttctggcaggaaagactgaatggtcaggaccagctggtcatacttactgccaaggacaaaattgatgcagcagctgctgaagttttagaacctcttgtcaggaaaatcagggatgaaaagtatggatggaaatatggctgtggagccaagggctgtacaaagctttttcatgctcctgagtttgttcacaagcatttgaagctcaagcatccagaccttgtattagagtcaacgtcaaaagttcgagaggatctttattttcaaaattacatgaatgatcctaacgcaccaggtggaaccccagtgatgcaacagtctgcaccagacagaggaagacggagacctagcatggacagtcgtctgaaatttgaccgtggcagtaacagagaccatgataaagctgatagagatggagtcaggtatggtagaggtgaccactctccaagccgtgatgggcctgatgatcagatgtttgatggtttccgcggacggccctcgaatgctccttttgttgctgaattcccagctccaccgatattgatgccagtacctggtgctggtcccttgggcccatttgttcctgcacctccagagatagcgatgcatatgctgagagagcaagggccacctcctccttttgaaccaaatggcgcaccacatggcaatgctggaatgcttgggccaatgatgggtggcccagcaccgattatagctatgcctccaaatttccgccatgatcctcgccgcctgagaagtgggattttttttggcaacaaaatgcaac

SEQ ID NO: 53581 - DNA, 810 bp, Zea Mays
gtttggagaagggctaaatcgagatgtcatcactgtggtactaatgcaacagctacaccaatgatgcgtcgcggacctgatggaccaagaacattatgcaatgcatgtggcctcatgtgggcaaataagggtctcctgagggacgtaacaaaatctcctgtacctctccaagctacgcaatcagctccgcatctagatggtggtaatggaagcgccatgtctgcgcctggctctgagctagagaatgctgcagcagccatgaccaatggccacgagtcatcgagtagtggtgtttaatccagcgatggggtaaaagccacgaggagcatcatcccggagtgatctctgcagtaggcggtcagctgctgtactataattgagttggaggctgcttagatatggaatccttccatttaccttggtgccctgtagttaagagctatgacagtgctttatcccgtgtcatgtttgcagccgctgcgtctataacgaagctatttcttgtcttgaggcgtgactgttaagaaccgttgaagtccactcagttttaaccgtgcagcaacgtcttcgatcaatatctcagagtacttagggagcgcttgccacacggagcagctaaaccaccgaaacgtttccattttcaactagaatcggactgtgccattttgaaatgcgtcaccgaaatgtaatcgatgtatatcgaattggcagaaggttggttccgtatatgaaccatctcagtttctttgcctgaattgcaaacttgcaatggtactttttttagtgcaaacttttaacttcgaaaatcag

SEQ ID NO: 53582 - DNA, 863 bp, Zea Mays
aagcaagtttgctaaaagaaaaaagaaacacttgttggtgtacctagcatgcattgacacatgcttctttcaaaagatgtcatcactgtggtactaatgcaacagctacaccaatgatgcgtcgcggacctgatggaccaagaacattatgcaatgcatgtggcctcatgtgggcaaataagggtctcctgagggacgtaacaaaatctcctgtacctctccaagctacgcaatcagctccgcatctagatggtggtaatggaagcgccatgtctgcgcctggctctgagctagagaatgctgcagcagccatgaccaatggccacgagtcatcgagtagtggtgtttaatccagcgatggggtaaaagccacgaggagcatcatcccggagtgatctctgcagtaggcggtcagctgctgtactataattgagttggaggctgcttagatatggaatccttccatttaccttggtgccctgtagttaagagctatgacagtgctttatcccgtgtcatgtttgcagccgctgcgtctataacgaagctatttcttgtcttgaggcgtgactgttaagaaccgttgaagtccactcagttttaaccgtgcagcaacgtcttcgatcaatatctcagagtacttagggagcgcttgccacacggagcagctaaaccaccgaaacgtttccattttcaactagaatcggactgtgccattttgaaatgcgtcaccgaaatgtaatcgatgtatatcgaattggcagaaggttggttccgtatatgaaccatctcagtttctttgcctgaattgcaaacttgcaatggtactttttttagtgcaaacttttaacttcgaaaatcag

SEQ ID NO: 53583 - DNA, 1458 bp, Zea Mays
actacgtcgtcttcgtctctccaacccggggacattttccaccctccaaatcgaaaccagattgaaatcctaggggctagggttaccctccatcccatcgtccgatccgatccgatcccgccgctcatccatgtcccaccacgacggaagcaagccataccagccgcgccgggggcccgagcggcacccgcagccagcggatgggatcgccgccccgcctcccgccgccgttgccccgtcggtggagagcacgttcccatggacgcggatgctgctgccgcggcggcggcggccgcagtctcgcagatggacccgcactcggcgttggtggctgggaccgtgccacccatggcgaccaaccagctcaccctctcgttccagggcgaggtctatgtgttcgactccgtctcccctgataaggtccaagccgtgcttttgctgcttggagggagggagctgagcagcctgggcggagcgtcgtcctctgcaccttatagtaagaggttgaattatccacatcgggtggcatctctgatgagatttagggaaaagcggaaggagcggaactttgataagaagatccgatactctgtccggaaggaagttgcacttaggatgcagcgtaatcgaggtcaatttacatcttcaaaaccaaagcctgatgaaatagcagcatcagaaatggcatccgcagatggctccccgaattgggcattagttgaaggccgacctccatctgctgccgaatgtcatcactgtggtactaatgcaacagctacaccaatgatgcgtcgcggacctgatggaccaagaacattatgcaatgcatgtggcctcatgtgggcaaataagaatggaagcgccatgtctgcgcctggctctgagctagagaatgctgcagcagccatgaccaatggccacgagtcatcgagtagtggtgtttaatccagcgatggggtaaaagccacgaggagcatcatcccggagtgatctctgcagtaggcggtcagctgctgtactataattgagttggaggctgcttagatatggaatccttccatttaccttggtgccctgtagttaagagctatgacagtgctttatcccgtgtcatgtttgcagccgctgcgtctataacgaagctatttcttgtcttgaggcgtgactgttaagaaccgttgaagtccactcagttttaaccgtgcagcaacgtcttcgatcaatatctcagagtacttagggagcgcttgccacacggagcagctaaaccaccgaaacgtttccattttcaactagaatcggactgtgccattttgaaatgcgtcaccgaaatgtaatcgatgtatatcgaattggcagaaggttggttccgtatatgaaccatctcagtttctttgcctgaattgcaaacttgcaatggtactttttttagtgcaaacttttaacttcgaaaatcag

SEQ ID NO: 53584 - DNA, 680 bp, Zea Mays
ttgctatatataggccttctcgtctcgtcatccacccgctcgcccattcccctatccacgagcaaggcacagcagcaggggagtcggagtgacagccgcccgcaggatgccgacactaaacctgagcaccaacgtgccggtggacgcggtggtcgccgccgacatcctcagggactgctccaaggccgtcgccaggatcatcggcaagcccgaatcctatgtcatggtgtcggtcaacgggtcggtgcccatgtcgttcgcggccagcgaagagccggcggcgtacggcgagctcgtgtccatcggcggcatcggccccggcgtcaacggcaagctgagcgccgccgtcgccgaggtactcgaggccaagctctccgtcagcaggtccagattctacatcaagttcgatgacgtgcggggacacaacttcggcttcaacggatccacattctaagtcgactccagcagaaaccgaagatgatggtcgctgcgtccaaacatccagctcaatacataccaacaccactacatcaataaacgctgatcatgtgtcatccatcacccgcacgtccatggaaaatcccgctcgagcacgagacgcaccaccactagtttatgggctttgtactttcacctgaaagcatgcagtgcatgatggtgtaacaggaaattgcactgac

SEQ ID NO: 53585 - DNA, 870 bp, Zea Mays
ctctctcttgctatatataggccttctcgtctcgtcatccacccgctcgcccattcccctatccacgagcaaggcacagcagcaggggagtcggagtgacagccgcccgcaggatgccgacactaaacctgagcaccaacgtgccggtggacgcggtggtcgccgccgacatcctcagggactgctccaaggccgtcgccaggatcatcggcaagcccgaatccgctccctcccggtcgctggtcagcggcggcttggctcagtgccctttctgatgaaacgaaacattccccacgtgctgcgctgcggcctgcggtgcagtatgtcatggtgtcggtcaacgggtcggtgcccatgtcgttcgcggccagcgaagagccggcggcgtacggcgagctcgtgtccatcggcggcatcggccccggcgtcaacggcaagctgagcgccgccgtcgccgaggtactcgaggccaagctctccgtcagcaggtccagattctacatcaagttcgatgacgtgcggggacacaacttcggcttcaacggatccacattctaagtcgactccagcagaaaccgaagatgatggtcgctgcgtccaaacatccagctcaatacataccaacaccactacatcaataaacgctgatcatgtgtcatccatcacccgcacgtccatggaaaatcccgctcgagcacgagacgcaccaccactagtttatgggctttgtactttcacctgaaagcatgcagtgcatgatggcatgtatctgattccaaattttattgaacttcattttttcagtaatgcaattctacagccctaaagaaaatgtaggcgggaacaggtgtaacaggaaattgcactgac

SEQ ID NO: 53586 - DNA, 1255 bp, Zea Mays
aacacacacagacagacagacaggcagcttcagagactcttgcccctgcggggaacatcgcctcaaggagtcgggttctggcgcataccttgacccgaggccggtagtaccgactctgcttgttggaggggaggggagtgcatggcttctgcttgcgctgcatcttcagaatgttgccttccctgataacagcgccggtaccattctttgggaagagatcattgtcttcatgtttaacctgcgatggaagttccacacttgccagtgagaagcatgtctcgtctcttcagtaaaagtgtagctttatatgcaagaagtttctcaaaaacaaaaaaacatatatatgtttgaaagaaaaccaggttcatgtacagtgtacaacagcaagttggggataggcaattgatcattaacatgtcttaccaaacgagccagttttagcacaatgagacagttttttgcaaaatgcggggcaattgatcattaacatgtctatgtcaggagagccaacaaaagctttaacgaatgggtttctttccaaaagcacagccgctccaatatacttgctattcaaaagcagaaaggccaggttggctggggttcattgcgctagcttttgcacagccaaattgagcccaaccactctaccaacaattgaactgagcatatgcatacatgccttggggtacctgcatgtcttctgtgctgaagtggttactggctatctatggctcgttaaaatggttaggataactgggcaactgtaagggaaagctcagccatttgacataagttacttaaataaggggacttccacgaacgaagtatagaaatctgaaagatagttgctggatgagcgtttgtttccagcagggatcataaggcctgcgtcttaagttttaatgctgaagaaacgataccagcttcttcactctggattttccttttcctgatcgttgttgcttttaataatcctttattcggtttctgtttctggcgatcagcttcagaatccagaaatacgcaaataagcatttacttcacaatttcagtttaaggcacaggcctccaatgtaggacctgtgaattacaatggtttgaagttttttttgtccaaagcaattaggaccaaactaagatatttccttttacttcaattgaattcaaaaattgcagatacagcataatgagggctaagtttgttataatgattcaactcgaagaaaacaaccatttggaatttccttctgcctgg

SEQ ID NO: 53587 - DNA, 1959 bp, Zea Mays
gtcaagcagaagcagaagcgctgaagcagcgcgtttgcagactgcaaagacccctgtgaatttgtgatgtactgaggtgttgtccagccaacagtccttgctcccaagattcttccgtactcccccctccatcggaccatcctctaccatagatctcccgaactccgccgtaatcgggacgaatcccgcgcgtgctcttgctccctgtcgttctccgcggccggcgcgagctgccggtggttcgttgccgtcgacctcgtctggccgctcctctgccctgccagctgccggattcctgctgctggactggattgctgcgcgtggagtcgtgagtatagctccatctatcctgactgatacggatcgacctctcctctcgtgggtttttgggttttcatcagttctatcagaggagtgcttatggatgattgcatggctgtagctagctaggccctgctttcctgtttgtaaagatacatcatggcaccacgcagtagggctccatctagaaggcctctctggttcattgtcttggttgcctttgtctgtgtagtagccattggagcctatctttatactccacagcattacacagcctgttatctggtaccatcagaagcctgcaattctcggcctcctccagaacctgctagggtatacactgatgatgagattgctgctcgtgttatcatgagagacatcattcgggctcggccagtgcagtcaaagaacacaaaaattgctttcatgttcttaacacccagtttattgccatttgagaagctatgggaaaaattcttcatgggtcatgaagacagatacaccatatacgtgcatgcatcaagagatataccgagtcattcaagtccaatattcgctggcagggatattcgaagcgaaaaggtgatatggggcacgatttctatgcttgatgctgaaaagaggctcttggcccatgccctacaagatcctgaaaaccagcattttgtcttgctttctgagagttgtgtgccacttcataacttcgattatatatatagttatctcatggagacaaacgtcagttttgttgactgctttgatgatcctggtccacatggagcaggtagatattctgagcatatgctacctgaaattgtgaagaaagattggagaaagggtgcgcagtggtttacagtgaaacggcagcatgcgattcttattctcgcggacaccctttactatgggaagttcaagcgttactgtaagccaggaaacgaatggcataactgctattcagacgagcactacttgccaaccctctttaacatggttgatccgactggaatctcgaactggtcggtgacgcatgtcgactggtccgaagggaagtggcatcccaaagtctacagggctgcggacacaagcttcgatctgctcaaggacatcgcgcatgtcgcgcagaggaggccgtgcgtgtggaacggcatgaagcggccctgctacctgttcgcgcgcaagttctacccagaggcgctggacaacctgctgaacatattctcgaacttcaccatcatctgagcgagcggtggatcggggaggggtttccgtcctccctcttgagtgctgcggcatcagcggccgcccgccgtggtaactggtgaggccgtccggccgtctacttggtgacgggaatctagtagctgaaggaagcaggaacacggttaccggagcacgcagatctgggagatcgggattcagatgttgccacctgcttgctcatcctgccgcactcgtgtgatctcgctctagtagatcgctggtgtttttgcaggtgtagacattggctaggctggtgttggatgcacttctgttggtgttgatgaagaactgtgattaatttaataataatacgtacgtactaagttgtactcctccgtcccaaaatataactagttttagactaaccatacatctatt

SEQ ID NO: 53588 - DNA, 4013 bp, Zea Mays
agacactccagtccagttctgcaccaccaatgctctcgagcgttcaagaactggatcgccggtgcgaaaacaaagcgaaacagaagaagaagaagaaaatgtcggtggcgtggacggagatcgtacagactggtggttgctgtcacggggatgcgatagcagatagcacacaacagatttcccacctgattgatgccaagacaagtcgtcgatcggtctccacctctcaggcgcgtgaaggcgttgaaccaggcgaggctagaggcgtccgtgcgggcgtacggcggtgggtcggacgggaggcaggcagccggcagcaagagatggccgagcccgtacgtcctcctctgcgggctcctcctcgtcgtctcgctcttcgagcgcctctggcctcccctcaagtggtgcgcgctggcggcggcggccgccggcctgccgccgatcgccctcaggagcttcgcggccgcgcggaggctcaccctcgacgtcaacatactcatgctcatcgcagtttccggggcgatagctctcaaggactactccgaggctgggttcatcgtgttcctgttcactacggccgaatggctggagaccagggcgagccacaaggtaggtagacacctgcttccgtctcttttttcagcagttttgttcttgcattgcatttgcatacacaacaagtaatgatagtggtgagacctcttagttctaaatgactgtttggcacgcacgtcacgtacgtatgtaggcgactgctgggatgtcgtcgctgatgagcatggcgccacagaaggctgtcgtagcagagacgggggaggtggtggcggctcaggacgtcaaggtgggcacggtgctagccgtcaaagccggggaggtcgtgcccatcgacggcgtggtcgtggacgggcggagcgaggtcgacgagagcaccctcaccggggagtccttcccggtcgccaagcagccggagtcccaggtctgggccggcacgctcaacatcgatggctacatcgctgtcaggacaactgccatggcggacaactctgccgtcgctaagatggcgaggatggttgaggaagcacagaacagtaggtcccgaactcagaggctgattgatacgtgcgccaagtactatacgcccgctgttgtggtcatggctgcgggggtggcggtggttcctgtggtggtgagagcgcacaacctcaagcactggttccaactggccctggtcctgctggtgagcgcgtgcccgtgcgcactagtgctgtcgacgccggtggccaccttctgcgctctcctgacggccgcgaggacggggctcctcatcaaaggaggggacgtcctcgaaaccctggccaggatcaagattgccgcctttgataagacaggtacgatcactcgaggggagttcagcgtcgaggagttccaggcggttggcgagcgcgtcactacgccacagctcctttactgggtctcgagcattgagagcagatcgagccacccaatggcgtctgtgctggttgattatgcccagtcgaagtcagttggacccaaatctgataatgtcgccgagttccaaatcttccccggtgaggggatttacggtgagatcgatggggaaggtgtgtatattgggaacaagaggattttgtcaagggcctcatgtgaaacagttcctgacatgaaagatatgaaaggagttaccgtcggatacgttgcctgcaaagggcagttaatcggagtattcactctctcggattcctgccgaactggatcagatgaggccatcagggagctgaggtcgctgggcatcaagtcagtgatgcttactggggatagttctgcagcagcttcatatgcacagaaccagcttgggaacatacttgatgaggttcactctgagcttcttccagaggacaaggtgaggatcgtcgacgagctcaaggcaaagcatggcccgactctgatgatcggcgacggcatgaacgatgccccagcgctggccaaggccgacgtcggagtctcgatgggggtatctgggtcagcggttgcgatggagacgagccacataaccctgatgtcaaacgacatccgccggatcccgatggccgtccagctggcgcggaggacgcaccggacgatcgtcgtcaacatcgtcttctcggtgatcaccaagcttgcgatcgtcgggctcgcgctcgccgggcatccgctcatctgggcagccgtcctcgcggacgtcggcacatgcatgctggtgatcatgtacagcatgctgctgctgagatcggaatcgaacggcggccggaaggtgaagaagtgctgtgcctcgtcgcagcatgggtcacactcacacgccaggaagaagcattgtgtctcccaccactgttcagatggcccgtgcaacaagtcgacggcaggctgttccaaggaatcgccgtctgctggtaagcatgcttgcagtgatcatggccatgcccacacccactgcaaagagccgagcaaccaccggccggaaaggcatgcctgtcatgatcacggccacagccataaccactgcaaagagcccagcagccatgtggttacagaaaagcatgtctgccatgaccacggcaacacccatagccactgcgaagaggcaggcaaccagctgctgcttgtagagagccacggttgcaatgaccatggccatgggcatagccatgaccgctgcaaagagctcagcagcccgcgcttcaccagcaagcacgagtgccatgaccatgagcatagccactgcaaagagcccaagactccgtgtgctgacagtgaggctgcttgccatggccatggccatggacacgaacatcggcactgcgaaggggacagccactcacacgctacaggtgagcatggctgccatgaacatgatgcgcacagccactgcgaggagcacggccattcagacaccgctgttgagcatgcttgcgagcatgagtgccatggtgagcaccaaactgtgcacgctgtggaaacacaccactgccatgaccacgaccatgagcacggacagcatgagcttggggagatcgaggaacctgagaaggactgccacgaccacagccaccactgctgccatgagcctcacggcaaggacaaggtcgcggccgagccagttgaagaggtcacgatctcaatcgctgccctgcccaaagacgaaggccaccaccacagcgaggaacaacacaatggggagcactgcaggaaggcgaaagactgcggcggcggcggcggcgctgctcccaccgactgcgctgcgagcaagaactgctgcggcgtcaaaggtggagacgcctgctcgagcgtgcaggccgcgcgtgctagggagaccggcccgtgctgccggagctacgtgaagtgccccaggacggcggcggcgagcaggagcagctgctgcggccacagcatgctgaagctgcccgagatcgtggtagagtagtagtagtactgtagtagggtggaaattccaccgtgggagaagggtgtgcacatatgaacaagcaactgtgaggtgagtgtgactcgccggcgtaaatgtagactaagatcgccggtgcagggtgtttgatctagtagtctagttactatataggtttgctggagaaaaaaatgatgtaggattttgactgagcagagcagggggtctgaaaggtggaaggaagggctctgcttggttttcctgcacactgctcctctgtttgcgtcttctgtggcggcggcggcaatggagactgtcacagacgaaggatgtcatgtgactagtgccggccggggccaacactaatattcaggaactatccatatccatttcggtcccttttaaaatgggagtttctttttctatctcctacgttttctattttagaataaattgatttatgtgactgcgattgcgttttagaataaattgatttatgtgactgtggctatgaaattactgggttctaaaatttctgtgctacggcccgatcgtg

SEQ ID NO: 53589 - DNA, 3986 bp, Zea Mays
ctccgcttccgcagacggccaggccaacgcaaccgctcctgccatccgcaccagtccccccctcccctccctcccggactcacccggccgccagcggggtttggccgcttcctcctcctctgcggcgggagcgggacaacagacacaggggcacagaggaaccggcgcggggcggcgcaatgggggacgctgcggcggcggggaccctgcacaagagctacttcgacgtgctggggatctgctgcccctccgaggtgcccctcgtcgagaagctgctgcggccgctgcccggcgtgcgcaccgtcaccgtcatcgtcccgtcccgcaccgtcatcgtgctccacgacgccgccgccacctcgcccgcgcaaatcgtgaaggcgttgaaccaggcgaggctagaggcgtccgtgcgggcgtacggcggtgggtcggacgggaggcaggcagccggcagcaagagatggccgagcccgtacgtcctcctctgcgggctcctcctcgtcgtctcgctcttcgagcgcctctggcctcccctcaagtggtgcgcgctggcggcggcggccgccggcctgccgccgatcgccctcaggagcttcgcggccgcgcggaggctcaccctcgacgtcaacatactcatgctcatcgcagtttccggggcgatagctctcaaggactactccgaggctgggttcatcgtgttcctgttcactacggccgaatggctggagaccagggcgagccacaaggcgactgctgggatgtcgtcgctgatgagcatggcgccacagaaggctgtcgtagcagagacgggggaggtggtggcggctcaggacgtcaaggtgggcacggtgctagccgtcaaagccggggaggtcgtgcccatcgacggcgtggtcgtggacgggcggagcgaggtcgacgagagcaccctcaccggggagtccttcccggtcgccaagcagccggagtcccaggctacatcgctgtcaggacaactgccatggcggacaactctgccgtcgctaagatggcgaggatggttgaggaagcacagaacagtaggtcccgaactcagaggctgattgatacgtgcgccaagtactatacgcccgctgttgtggtcatggctgcgggggtggcggtggttcctgtggtggtgagagcgcacaacctcaagcactggttccaactggccctggtcctgctggtgagcgcgtgcccgtgcgcactagtgctgtcgacgccggtggccaccttctgcgctctcctgacggccgcgaggacggggctcctcatcaaaggaggggacgtcctcgaaaccctggccaggatcaagattgccgcctttgataagacaggtacgatcactcgaggggagttcagcgtcgaggagttccaggcggttggcgagcgcgtcactacgccacagctcctttactgggtctcgagcattgagagcagatcgagccacccaatggcgtctgtgctggttgattatgcccagtcgaagtcagttggacccaaatctgataatgtcgccgagttccaaatcttccccggtgaggggatttacggtgagatcgatggggaaggtgtgtatattgggaacaagaggattttgtcaagggcctcatgtgaaacagttcctgacatgaaagatatgaaaggagttaccgtcggatacgttgcctgcaaagggcagttaatcggagtattcactctctcggattcctgccgaactggatcagatgaggccatcagggagctgaggtcgctgggcatcaagtcagtgatgcttactggggatagttctgcagcagcttcatatgcacagaaccagcttgggaacatacttgatgaggttcactctgagcttcttccagaggacaaggtgaggatcgtcgacgagctcaaggcaaagcatggcccgactctgatgatcggcgacggcatgaacgatgccccagcgctggccaaggccgacgtcggagtctcgatgggggtatctgggtcagcggttgcgatggagacgagccacataaccctgatgtcaaacgacatccgccggatcccgatggccgtccagctggcgcggaggacgcaccggacgatcgtcgtcaacatcgtcttctcggtgatcaccaagcttgcgatcgtcgggctcgcgctcgccgggcatccgctcatctgggcagccgtcctcgcggacgtcggcacatgcatgctggtgatcatgtacagcatgctgctgctgagatcggaatcgaacggcggccggaaggtgaagaagtgctgtgcctcgtcgcagcatgggtcacactcacacgccaggaagaagcattgtgtctcccaccactgttcagatggcccgtgcaacaagtcgacggcaggctgttccaaggaatcgccgtctgctggtaagcatgcttgcagtgatcatggccatgcccacacccactgcaaagagccgagcaaccaccggccggaaaggcatgcctgtcatgatcacggccacagccataaccactgcaaagagcccagcagccatgtggttacagaaaagcatgtctgccatgaccacggcaacacccatagccactgcgaagaggcaggcaaccagctgctgcttgtagagagccacggttgcaatgaccatggccatgggcatagccatgaccgctgcaaagagctcagcagcccgcgcttcaccagcaagcacgagtgccatgaccatgagcatagccactgcaaagagcccaagactccgtgtgctgacagtgaggctgcttgccatggccatggccatggacacgaacatcggcactgcgaaggggacagccactcacacgctacaggtgagcatggctgccatgaacatgatgcgcacagccactgcgaggagcacggccattcagacaccgctgttgagcatgcttgcgagcatgagtgccatggtgagcaccaaactgtgcacgctgtggaaacacaccactgccatgaccacgaccatgagcacggacagcatgagcttggggagatcgaggaacctgagaaggactgccacgaccacagccaccactgctgccatgagcctcacggcaaggacaaggtcgcggccgagccagttgaagaggtcacgatctcaatcgctgccctgcccaaagacgaaggccaccaccacagcgaggaacaacacaatggggagcactgcaggaaggcgaaagactgcggcggcggcggcggcgctgctcccaccgactgcgctgcgagcaagaactgctgcggcgtcaaaggtggagacgcctgctcgagcgtgcaggccgcgcgtgctagggagaccggcccgtgctgccggagctacgtgaagtgccccaggacggcggcggcgagcaggagcagctgctgcggccacagcatgctgaagctgcccgagatcgtggtagagtagtagtagtactgtagtagggtggaaattccaccgtgggagaagggtgtgcacatatgaacaagcaactgtgaggtgagtgtgactcgccggcgtaaatgtagactaagatcgccggtgcagggtgtttgatctagtagtctagttactatataggtttgctggagaaaaaaatgatgtaggattttgactgagcagagcagggggtctgaaaggtggaaggaagggctctgcttggttttcctgcacactgctcctctgtttgcgtcttctgtggcggcggcggcaatggagactgtcacagacgaaggatgtcatgtgactagtgccggccggggccaacactaatattcaggaactatccatatccatttcggtcccttttaaaatgggagtttctttttctatctcctacgttttctattttagaataaattgatttatgtgactgcgattgcgttttagaataaattgatttatgtgactgtggctatgaaattactgggttctaaaatttctgtgctacggcccgatcgtg

SEQ ID NO: 53590 - DNA, 3758 bp, Zea Mays
ctccgcttccgcagacggccaggccaacgcaaccgctcctgccatccgcaccagtccccccctcccctccctcccggactcacccggccgccagcggggtttggccgcttcctcctcctctgcggcgggagcgggacaacagacacaggggcacagaggaaccggcgcggggcggcgcaatgggggacgctgcggcggcggggaccctgcacaagagctacttcgacgtgctggggatctgctgcccctccgaggtgcccctcgtcgagaagctgctgcggccgctgcccggcgtgcgcaccgtcaccgtcatcgtcccgtcccgcaccgtcatcgtgctccacgacgccgccgccacctcgcccgcgcaaatcgtgaaggcgttgaaccaggcgaggctagaggcgtccgtgcgggcgtacggcggtgggtcggacgggaggcaggcagccggcagcaagagatggccgagcccgtacgtcctcctctgcgggctcctcctcgtcgtctcgctcttcgagcgcctctggcctcccctcaagtggtgcgcgctggcggcggcggccgccggcctgccgccgatcgccctcaggagcttcgcggccgcgcggaggctcaccctcgacgtcaacatactcatgctcatcgcagtttccggggcgatagctctcaaggactactccgaggctgggttcatcgtgttcctgttcactacggccgaatggctggagaccagggcgagccacaaggctacatcgctgtcaggacaactgccatggcggacaactctgccgtcgctaagatggcgaggatggttgaggaagcacagaacagtaggtcccgaactcagaggctgattgatacgtgcgccaagtactatacgcccgctgttgtggtcatggctgcgggggtggcggtggttcctgtggtggtgagagcgcacaacctcaagcactggttccaactggccctggtcctgctggtgagcgcgtgcccgtgcgcactagtgctgtcgacgccggtggccaccttctgcgctctcctgacggccgcgaggacggggctcctcatcaaaggaggggacgtcctcgaaaccctggccaggatcaagattgccgcctttgataagacaggtacgatcactcgaggggagttcagcgtcgaggagttccaggcggttggcgagcgcgtcactacgccacagctcctttactgggtctcgagcattgagagcagatcgagccacccaatggcgtctgtgctggttgattatgcccagtcgaagtcagttggacccaaatctgataatgtcgccgagttccaaatcttccccggtgaggggatttacggtgagatcgatggggaaggtgtgtatattgggaacaagaggattttgtcaagggcctcatgtgaaacagttcctgacatgaaagatatgaaaggagttaccgtcggatacgttgcctgcaaagggcagttaatcggagtattcactctctcggattcctgccgaactggatcagatgaggccatcagggagctgaggtcgctgggcatcaagtcagtgatgcttactggggatagttctgcagcagcttcatatgcacagaaccagcttgggaacatacttgatgaggttcactctgagcttcttccagaggacaaggtgaggatcgtcgacgagctcaaggcaaagcatggcccgactctgatgatcggcgacggcatgaacgatgccccagcgctggccaaggccgacgtcggagtctcgatgggggtatctgggtcagcggttgcgatggagacgagccacataaccctgatgtcaaacgacatccgccggatcccgatggccgtccagctggcgcggaggacgcaccggacgatcgtcgtcaacatcgtcttctcggtgatcaccaagcttgcgatcgtcgggctcgcgctcgccgggcatccgctcatctgggcagccgtcctcgcggacgtcggcacatgcatgctggtgatcatgtacagcatgctgctgctgagatcggaatcgaacggcggccggaaggtgaagaagtgctgtgcctcgtcgcagcatgggtcacactcacacgccaggaagaagcattgtgtctcccaccactgttcagatggcccgtgcaacaagtcgacggcaggctgttccaaggaatcgccgtctgctggtaagcatgcttgcagtgatcatggccatgcccacacccactgcaaagagccgagcaaccaccggccggaaaggcatgcctgtcatgatcacggccacagccataaccactgcaaagagcccagcagccatgtggttacagaaaagcatgtctgccatgaccacggcaacacccatagccactgcgaagaggcaggcaaccagctgctgcttgtagagagccacggttgcaatgaccatggccatgggcatagccatgaccgctgcaaagagctcagcagcccgcgcttcaccagcaagcacgagtgccatgaccatgagcatagccactgcaaagagcccaagactccgtgtgctgacagtgaggctgcttgccatggccatggccatggacacgaacatcggcactgcgaaggggacagccactcacacgctacaggtgagcatggctgccatgaacatgatgcgcacagccactgcgaggagcacggccattcagacaccgctgttgagcatgcttgcgagcatgagtgccatggtgagcaccaaactgtgcacgctgtggaaacacaccactgccatgaccacgaccatgagcacggacagcatgagcttggggagatcgaggaacctgagaaggactgccacgaccacagccaccactgctgccatgagcctcacggcaaggacaaggtcgcggccgagccagttgaagaggtcacgatctcaatcgctgccctgcccaaagacgaaggccaccaccacagcgaggaacaacacaatggggagcactgcaggaaggcgaaagactgcggcggcggcggcggcgctgctcccaccgactgcgctgcgagcaagaactgctgcggcgtcaaaggtggagacgcctgctcgagcgtgcaggccgcgcgtgctagggagaccggcccgtgctgccggagctacgtgaagtgccccaggacggcggcggcgagcaggagcagctgctgcggccacagcatgctgaagctgcccgagatcgtggtagagtagtagtagtactgtagtagggtggaaattccaccgtgggagaagggtgtgcacatatgaacaagcaactgtgaggtgagtgtgactcgccggcgtaaatgtagactaagatcgccggtgcagggtgtttgatctagtagtctagttactatataggtttgctggagaaaaaaatgatgtaggattttgactgagcagagcagggggtctgaaaggtggaaggaagggctctgcttggttttcctgcacactgctcctctgtttgcgtcttctgtggcggcggcggcaatggagactgtcacagacgaaggatgtcatgtgactagtgccggccggggccaacactaatattcaggaactatccatatccatttcggtcccttttaaaatgggagtttctttttctatctcctacgttttctattttagaataaattgatttatgtgactgcgattgcgttttagaataaattgatttatgtgactgtggctatgaaattactgggttctaaaatttctgtgctacggcccgatcgtg

SEQ ID NO: 53591 - DNA, 3934 bp, Zea Mays
ataaatacccgccctccagcttcccagttcccactcctctctcctttcccctccgcttccgcagacggccaggccaacgcaaccgctcctgccatccgcaccagtccccccctcccctccctcccggactcacccggccgccagcggggtaagtcgccggcgggctttctttgcatgtttatttatgtaacccggcccggccgaaacaaaacccccggccgcgcgcacgccaagattgctgcccccacccccctggcctccgctcaaaccaccgctcgacttctcctcgtgtaggtttggccgcttcctcctcctctgcggcgggagcgggacaacagacacaggggcacagaggaaccggcgcggggcggcgcaatgggggacgctgcggcggcggggaccctgcacaagagctacttcgacgtgctggggatctgctgcccctccgaggtgcccctcgtcgagaagctgctgcggccgctgcccggcgtgcgcaccgtcaccgtcatcgtcccgtcccgcaccgtcatcgtgctccacgacgccgccgccacctcgcccgcgcaaatcgtttccggggcgatagctctcaaggactactccgaggctgggttcatcgtgttcctgttcactacggccgaatggctggagaccagggcgagccacaaggcgactgctgggatgtcgtcgctgatgagcatggcgccacagaaggctgtcgtagcagagacgggggaggtggtggcggctcaggacgtcaaggtgggcacggtgctagccgtcaaagccggggaggtcgtgcccatcgacggcgtggtcgtggacgggcggagcgaggtcgacgagagcaccctcaccggggagtccttcccggtcgccaagcagccggagtcccaggtctgggccggcacgctcaacatcgatggctacatcgctgtcaggacaactgccatggcggacaactctgccgtcgctaagatggcgaggatggttgaggaagcacagaacagtaggtcccgaactcagaggctgattgatacgtgcgccaagtactatacgcccgctgttgtggtcatggctgcgggggtggcggtggttcctgtggtggtgagagcgcacaacctcaagcactggttccaactggccctggtcctgctggtgagcgcgtgcccgtgcgcactagtgctgtcgacgccggtggccaccttctgcgctctcctgacggccgcgaggacggggctcctcatcaaaggaggggacgtcctcgaaaccctggccaggatcaagattgccgcctttgataagacaggtacgatcactcgaggggagttcagcgtcgaggagttccaggcggttggcgagcgcgtcactacgccacagctcctttactgggtctcgagcattgagagcagatcgagccacccaatggcgtctgtgctggttgattatgcccagtcgaagtcagttggacccaaatctgataatgtcgccgagttccaaatcttccccggtgaggggatttacggtgagatcgatggggaaggtgtgtatattgggaacaagaggattttgtcaagggcctcatgtgaaacagttcctgacatgaaagatatgaaaggagttaccgtcggatacgttgcctgcaaagggcagttaatcggagtattcactctctcggattcctgccgaactggatcagatgaggccatcagggagctgaggtcgctgggcatcaagtcagtgatgcttactggggatagttctgcagcagcttcatatgcacagaaccagcttgggaacatacttgatgaggttcactctgagcttcttccagaggacaaggtgaggatcgtcgacgagctcaaggcaaagcatggcccgactctgatgatcggcgacggcatgaacgatgccccagcgctggccaaggccgacgtcggagtctcgatgggggtatctgggtcagcggttgcgatggagacgagccacataaccctgatgtcaaacgacatccgccggatcccgatggccgtccagctggcgcggaggacgcaccggacgatcgtcgtcaacatcgtcttctcggtgatcaccaagcttgcgatcgtcgggctcgcgctcgccgggcatccgctcatctgggcagccgtcctcgcggacgtcggcacatgcatgctggtgatcatgtacagcatgctgctgctgagatcggaatcgaacggcggccggaaggtgaagaagtgctgtgcctcgtcgcagcatgggtcacactcacacgccaggaagaagcattgtgtctcccaccactgttcagatggcccgtgcaacaagtcgacggcaggctgttccaaggaatcgccgtctgctggtaagcatgcttgcagtgatcatggccatgcccacacccactgcaaagagccgagcaaccaccggccggaaaggcatgcctgtcatgatcacggccacagccataaccactgcaaagagcccagcagccatgtggttacagaaaagcatgtctgccatgaccacggcaacacccatagccactgcgaagaggcaggcaaccagctgctgcttgtagagagccacggttgcaatgaccatggccatgggcatagccatgaccgctgcaaagagctcagcagcccgcgcttcaccagcaagcacgagtgccatgaccatgagcatagccactgcaaagagcccaagactccgtgtgctgacagtgaggctgcttgccatggccatggccatggacacgaacatcggcactgcgaaggggacagccactcacacgctacaggtgagcatggctgccatgaacatgatgcgcacagccactgcgaggagcacggccattcagacaccgctgttgagcatgcttgcgagcatgagtgccatggtgagcaccaaactgtgcacgctgtggaaacacaccactgccatgaccacgaccatgagcacggacagcatgagcttggggagatcgaggaacctgagaaggactgccacgaccacagccaccactgctgccatgagcctcacggcaaggacaaggtcgcggccgagccagttgaagaggtcacgatctcaatcgctgccctgcccaaagacgaaggccaccaccacagcgaggaacaacacaatggggagcactgcaggaaggcgaaagactgcggcggcggcggcggcgctgctcccaccgactgcgctgcgagcaagaactgctgcggcgtcaaaggtggagacgcctgctcgagcgtgcaggccgcgcgtgctagggagaccggcccgtgctgccggagctacgtgaagtgccccaggacggcggcggcgagcaggagcagctgctgcggccacagcatgctgaagctgcccgagatcgtggtagagtagtagtagtactgtagtagggtggaaattccaccgtgggagaagggtgtgcacatatgaacaagcaactgtgaggtgagtgtgactcgccggcgtaaatgtagactaagatcgccggtgcagggtgtttgatctagtagtctagttactatataggtttgctggagaaaaaaatgatgtaggattttgactgagcagagcagggggtctgaaaggtggaaggaagggctctgcttggttttcctgcacactgctcctctgtttgcgtcttctgtggcggcggcggcaatggagactgtcacagacgaaggatgtcatgtgactagtgccggccggggccaacactaatattcaggaactatccatatccatttcggtcccttttaaaatgggagtttctttttctatctcctacgttttctattttagaataaattgatttatgtgactgcgattgcgttttagaataaattgatttatgtgactgtggctatgaaattactgggttctaaaatttctgtgctacggcccgatcgtg

SEQ ID NO: 53592 - DNA, 3987 bp, Zea Mays
gcgcgccacgccatgccatgccatggcatggcattgccagtgccaactgccaagccaaagccacgcacgcgtccgtttcaccgtccggcggcctggcctccgctgccgtctccgcaacttaccaccaccggtgccgccagtgcgctgtgtgtgtgcctcacgcgtcggcacccacccaccagtccaccaccaccacccgctccagtcacagcgagcgagcgagcgcgggccatggccgagtccatccataaatacccgccctccagcttcccagttcccactcctctctcctttcccctccgcttccgcagacggccaggccaacgcaaccgctcctgccatccgcaccagtccccccctcccctccctcccggactcacccggccgccagcggggtttggccgcttcctcctcctctgcggcgggagcgggacaacagacacaggggcacagaggaaccggcgcggggcggcgcaatgggggacgctgcggcggcggggaccctgcacaagagctacttcgacgtgctggggatctgctgcccctccgaggtgcccctcgtcgagaagctgctgcggccgctgcccggcgtgcgcaccgtcaccgtcatcgtcccgtcccgcaccgtcatcgtgctccacgacgccgccgccacctcgcccgcgcaaatcgtgaaggcgttgaaccaggcgaggctagaggcgtccgtgcgggcgtacggcggtgggtcggacgggaggcaggcagccggcagcaagagatggccgagcccgtacgtcctcctctgcgggctcctcctcgtcgtctcgctcttcgagcgcctctggcctcccctcaagtggtgcgcgctggcggcggcggccgccggcctgccgccgatcgccctcaggagcttcgcggccgcgcggaggctcaccctcgacgtcaacatactcatgctcatcgcagtttccggggcgatagctctcaaggactactccgaggctgggttcatcgtgttcctgttcactacggccgaatggctggagaccagggcgagccacaaggcgactgctgggatgtcgtcgctgatgagcatggcgccacagaaggctgtcgtagcagagacgggggaggtggtggcggctcaggacgtcaaggtgggcacggtgctagccgtcaaagccggggaggtcgtgcccatcgacggcgtggtcgtggacgggcggagcgaggtcgacgagagcaccctcaccggggagtccttcccggtcgccaagcagccggagtcccaggtctgggccggcacgctcaacatcgatggctacatcgctgtcaggacaactgccatggcggacaactctgccgtcgctaagatggcgaggatggttgaggaagcacagaacagtaggtcccgaactcagaggctgattgatacgtgcgccaagtactatacgcccgctgttgtggtcatggctgcgggggtggcggtggttcctgtggtggtgagagcgcacaacctcaagcactggttccaactggccctggtcctgctggtgagcgcgtgcccgtgcgcactagtgctgtcgacgccggtggccaccttctgcgctctcctgacggccgcgaggacggggctcctcatcaaaggaggggacgtcctcgaaaccctggccaggatcaagattgccgcctttgataagacaggtacgatcactcgaggggagttcagcgtcgaggagttccaggcggttggcgagcgcgtcactacgccacagctcctttactgggtctcgagcattgagagcagatcgagccacccaatggcgtctgtgctggttgattatgcccagtcgaagtcagttggacccaaatctgataatgtcgccgagttccaaatcttccccggtgaggggatttacggtgagatcgatggggaaggtgtgtatattgggaacaagaggattttgtcaagggcctcatgtgaaacagttcctgacatgaaagatatgaaaggagttaccgtcggatacgttgcctgcaaagggcagttaatcggagtattcactctctcggattcctgccgaactggatcagatgaggccatcagggagctgaggtcgctgggcatcaagtcagtgatgcttactggggatagttctgcagcagcttcatatgcacagaaccagcttgggaacatacttgatgaggttcactctgagcttcttccagaggacaaggtgaggatcgtcgacgagctcaaggcaaagcatggcccgactctgatgatcggcgacggcatgaacgatgccccagcgctggccaaggccgacgtcggagtctcgatgggggtatctgggtcagcggttgcgatggagacgagccacataaccctgatgtcaaacgacatccgccggatcccgatggccgtccagctggcgcggaggacgcaccggacgatcgtcgtcaacatcgtcttctcggtgatcaccaagcttgcgatcgtcgggctcgcgctcgccgggcatccgctcatctgggcagccgtcctcgcggacgtcggcacatgcatgctggtgatcatgtacagcatgctgctgctgagatcggaatcgaacggcggccggaaggtgaagaagtgctgtgcctcgtcgcagcatgggtcacactcacacgccaggaagaagcattgtgtctcccaccactgttcagatggcccgtgcaacaagtcgacggcaggctgttccaaggaatcgccgtctgctggtaagcatgcttgcagtgatcatggccatgcccacacccactgcaaagagccgagcaaccaccggccggaaaggcatgcctgtcatgatcacggccacagccataaccactgcaaagagcccagcagccatgtggttacagaaaagcatgtctgccatgaccacggcaacacccatagccactgcgaagagcccaagactccgtgtgctgacagtgagcaccaaactgtgcacgctgtggaaacacaccactgccatgaccacgaccatgagcacggacagcatgagcttggggagatcgaggaacctgagaaggactgccacgaccacagccaccactgctgccatgagcctcacggcaaggacaaggtcgcggccgagccagttgaagaggtcacgatctcaatcgctgccctgcccaaagacgaaggccaccaccacagcgaggaacaacacaatggggagcactgcaggaaggcgaaagactgcggcggcggcggcggcgctgctcccaccgactgcgctgcgagcaagaactgctgcggcgtcaaaggtggagacgcctgctcgagcgtgcaggccgcgcgtgctagggagaccggcccgtgctgccggagctacgtgaagtgccccaggacggcggcggcgagcaggagcagctgctgcggccacagcatgctgaagctgcccgagatcgtggtagagtagtagtagtactgtagtagggtggaaattccaccgtgggagaagggtgtgcacatatgaacaagcaactgtgaggtgagtgtgactcgccggcgtaaatgtagactaagatcgccggtgcagggtgtttgatctagtagtctagttactatataggtttgctggagaaaaaaatgatgtaggattttgactgagcagagcagggggtctgaaaggtggaaggaagggctctgcttggttttcctgcacactgctcctctgtttgcgtcttctgtggcggcggcggcaatggagactgtcacagacgaaggatgtcatgtgactagtgccggccggggccaacactaatattcaggaactatccatatccatttcggtcccttttaaaatgggagtttctttttctatctcctacgttttctattttagaataaattgatttatgtgactgcgattgcgttttagaataaattgatttatgtgactgtggctatgaaattactgggttctaaaatttctgtgctacggcccgatcgtg

SEQ ID NO: 53593 - DNA, 1901 bp, Zea Mays
acatggaatgagaggcaaacacgggcccaggaacggcccacgggagagagaaaccctacccttcccttcgcggtggtggcatccgagacccgtccacaaccaccacagacacggtgcaacccccccccccccccccccccccccccctcttaaaagccgcctctcgccgccgcccgcaaaccctcatttttctctctcctgcgccgcgacgtccctcgccttcgccgccgaatccgagactccgatctcgggttcaccgcagcgcacagagcagccccgactcccggcccgatccgcgctctcctctccgtcgcttcaggaatggcacctgagggttctcagttcgatgctaagcactatgattctaagatgcaggagctgctgagcaccggtgagactgaggagttcttcacttcatatgatgaagtttttgagagttttgatgatatgggcctccaagagaatcttctgagaggcatttatgcttatggttttgagaagccatctgcaattcagcagagaggaattgttcccttctgcaagggtcttgatgtcattcagcaagcacaatctggtacaggaaagacagcaaccttctgttctgggatcttgcagcagctggactatggcctggttgaatgccaggccctggtccttgctcccacccgtgagcttgcacagcaaatcgagaaagtcatgcgcgcgcttggtgattaccttggtgttaaggtccatgcatgtgtgggaggaacatccgtccgtgaggaccaaaggattcttggcagtggtgtgcatgttgttgttggtacacctggtcgtgtgtttgatatgctgcgcagacagtccctccgccctgataacatcaagatgtttgttctagatgaagctgatgaaatgctttctcgtggtttcaaggatcagatttacgacatcttccagcttctcccagccaagattcaggttggagtcttctctgctaccatgccccctgaggcccttgagattacccgcaagttcatgaacaagccagtgagaatcctcgtgaagagagatgagctgactcttgagggtatcaagcagttctatgtgaatgtggataaggaagactggaagctggacacactgtgtgacctgtacgagacccttgccatcacccagagtgtcatctttgtcaacacccgccgcaaggtggactggctcactgacaagatgaggagcagggaccacactgtttctgccactcatggtgacatggaccagaacactagagacatcatcatgagggagttccggtctggctcctcccgtgtgctcatcaccaccgacctgcttgctcgtggtattgatgttcagcaggtgtccctggtcatcaactatgatctccccacccagccagagaattacctgcatcgcattggtcgtagtggtcgtttcggtaggaagggtgttgccatcaactttgtgacccgcgacgacgagcggatgctgttcgacatccagaagttctacaacgtgttgattgaggagctgcctgccaacgtcgctgaccttctgtgatcattttgaagaaaaacagaactaaaagaacggtggtgggggtgatctggtaaggcttggttttgccgaaatattgtgggggaggagtgataaggtcggtggggtttctatgttaaagtcgtggtctcgggcaatatgcgatttttctttatgccatgttttgggaaattttgtagctgcctaggcctcgtgctgttgtggtggttcattagtatgaagacgaaggctctgctggctatgggagtcctttttctttttgttagtattttgtttaaaactatgtatgaccgaattatttgtcatccttgactcaattctgctgcaaccagttgtatcaaaaataa

SEQ ID NO: 53594 - DNA, 2699 bp, Zea Mays
tcccccgcggaaggacgacgacgcaactggcagtcaccgacgcgacgcgggtcgtctcctcagccctcctgttcagcctcctcgccagcgatggcttcgggcgccgacgccgcggcgctggtgacctccggcgccgacgagtgggcagcggcgtgtccgccgctgcggcggaacctgcagctgctcgcgcctgacgaggttgagctagcaaaaatgctgttgaatgagggccagattcacctatttgaacactggcctgaaccaggcattgatgacgacaagaaaagaggcttctttgatcaggttcgccggcttaattcaagctatcctggaggtctggtatcttacatcaagaatgccaaaaaacttcttgcagattcaaaggcaggaaaaaacccatatgatggtttcaccccttctgtgccttcaggggaaattttgaacttcggcgatgacaattttgtttcactggaagcagctgggataaaagaagcccacaatgctgcatttgttcttgtagctggagggcttggtgaaaggcttggttacaaaggaattaaggtagcacttccccgggaaacaacaactggaaaatgtttcattcaacattatatagagtctatcctggttttacaagaggccagctgcaaaacggttgatgatgggtgccaaaaaaagattccatttgtcattatgacttctgatgatacaaatgcactaactatcaagcttttggagtcaaactcttactttggaatggaaccatctcaagtgaaattgctaaagcaggaaaaagtagcttgtctagctgacaatgatgcaaggcttgcattagacccaagtgacaagtacaaaattcagacaaagccacatgggcatggagatgttcattctcttctttattcaagtggcttgcttgagcaatggaagagtgaagggcggaagtgggttctctttttccaggatacaaatggattgcttttcaatgcaattccgtctgctttaggtgtcagtgccaccaagggttacaatgtaaattctctcgcagttcctaggaaggctaaggaagcaattggaggaattaccaaacttactcatgttgatggtagaacaatggtcatcaatgtagagtacaatcagcttgatccactccttcgtgcaactggttatcctgatggagatacaaattctgagacaggctattctccataccctggaaatataaaccaggtaaactatattttccaaagggataatttaccatatgacacgagatccattgattgttccgctcttatgatctggaggtgtaatgctaacaccaatgagttttgtggatgttgttaccttcaatgtcacattatgtgtgttataacctttcatgttcattttgtccattgcttttgaaactgggtggaattttgtcaaagctgttatatgatcttacattcaagctacaaattttgttgggctaataaaaacactgagcttttctagttgatactggagcttggaccatacattgaggagctaaagaaaacgcatggtgccatttctgaatttgtaaatcccaagtatactgattcgaccaagacatcatttaaatcatccactcgtctagagtgcatgatgcaagactatccaaagacgttgccaccctcaacaaaagttggattcacggtgatggatacatggcttgcttatgctcctgtgaagaataatcctgaagacgcggctaaagttccaaaaggcaatccttatcatagtgcaacctcaggagagatggcaatttacagggcaaacagccttattttgagaaaggctggtgcgcagatagctgaccctgtcgttgataccttcaacgggcaagaggtagaggtctggccacgcgtaacctggagtccacggtggggtctcaccttccagagcgtcaaggagaaagtgcatggcagctgttcagtttctcagaggtcagctttggtcatcgatggccggagtgtcttcctcgacggactttcattggacggcacccttattgtcaatgctgtggatggtgcagagttactggtcatgtagaaaataagggctggactatccggcatgtggactacaaggacacctcggagaaggaagaggtcaggatccgtgggttcaagttcaacaagtctgagcagctagaggtgaactacaccgagccaggaaagcatagcttgagtgcgtgaaaagaaaacattcttgacctgactagcttcgtaccaaaatggaaatagctcacatctgggtcgcctcccagattctgggagggaggccaatgccagcgtagctgaaaccgttcttctccttcccccacgtacaacaaggagcaaagtgcttcaccaagcactcaacattctttatgtatatcttgtacagaactcctcttcagtgcaatcagagttcattgtttgtttgggatctgatgtttatgttacaattttttattttagaaaacttggcactgaatcaagtaataagtgtggtagtgtgtagaagtatagtaacgggctataagcctacttatgtggcattttttgtctgtgtggatgagagacattaaaaagtggaggtgggctctcatgcaagagtcagcttctatatgagctcttagataaaaggatgaaatagaaagatacactataatgatctaagagtcaactttg

SEQ ID NO: 53595 - DNA, 2371 bp, Zea Mays
tcccccgcggaaggacgacgacgcaactggcagtcaccgacgcgacgcgggtcgtctcctcagccctcctgttcagcctcctcgccagcgatggcttcgggcgccgacgccgcggcgctggtgacctccggcgccgacgagtgggcagcggcgtgtccgccgctgcggcggaacctgcagctgctcgcgcctgacgaggttgagctagcaaaaatgctgttgaatgagggccagattcacctatttgaacactggcctgaaccaggcattgatgacgacaagaaaagaggcttctttgatcaggttcgccggcttaattcaagctatcctggaggtctggtatcttacatcaagaatgccaaaaaacttcttgcagattcaaaggcaggaaaaaacccatatgatggtttcaccccttctgtgccttcaggggaaattttgaacttcggcgatgacaattttgtttcactggaagcagctgggataaaagaagcccacaatgctgcatttgttcttgtagctggagggcttggtgaaaggcttggttacaaaggaattaaggtagcacttccccgggaaacaacaactggaaaatgtttcattcaacattatatagagtctatcctggttttacaagaggccagctgcaaaacggttgatgatgggtgccaaaaaaagattccatttgtcattatgacttctgatgatacaaatgcactaactatcaagcttttggagtcaaactcttactttggaatggaaccatctcaagtgaaattgctaaagcaggaaaaagtagcttgtctagctgacaatgatgcaaggcttgcattagacccaagtgacaagtacaaaattcagacaaagccacatgggcatggagatgttcattctcttctttattcaagtggcttgcttgagcaatggcaattccgtctgctttaggtgtcagtgccaccaagggttacaatgtaaattctctcgcagttcctaggaaggctaaggaagcaattggaggaattaccaaacttactcatgttgatggtagaacaatggtcatcaatgtagagtacaatcagcttgatccactccttcgtgcaactggttatcctgatggagatacaaattctgagacaggctattctccataccctggaaatataaaccagttgatactggagcttggaccatacattgaggagctaaagaaaacgcatggtgccatttctgaatttgtaaatcccaagtatactgattcgaccaagacatcatttaaatcatccactcgtctagagtgcatgatgcaagactatccaaagacgttgccaccctcaacaaaagttggattcacggtgatggatacatggcttgcttatgctcctgtgaagaataatcctgaagacgcggctaaagttccaaaaggcaatccttatcatagtgcaacctcaggagagatggcaatttacagggcaaacagccttattttgagaaaggctggtgcgcagatagctgaccctgtcgttgataccttcaacgggcaagaggtagaggtctggccacgcgtaacctggagtccacggtggggtctcaccttccagagcgtcaaggagaaagtgcatggcagctgttcagtttctcagaggtcagctttggtcatcgatggccggagtgtcttcctcgacggactttcattggacggcacccttattgtcaatgctgtggatggtgcagagttactggtcatgtagaaaataagggctggactatccggcatgtggactacaaggacacctcggagaaggaagaggtcaggatccgtgggttcaagttcaacaagtctgagcagctagaggtgaactacaccgagccaggaaagcatagcttgagtgcgtgaaaagaaaacattcttgacctgactagcttcgtaccaaaatggaaatagctcacatctgggtcgcctcccagattctgggagggaggccaatgccagcgtagctgaaaccgttcttctccttcccccacgtacaacaaggagcaaagtgcttcaccaagcactcaacattctttatgtatatcttgtacagaactcctcttcagtgcaatcagagttcattgtttgtttgggatctgatgtttatgttacaattttttattttagaaaacttggcactgaatcaagtaataagtgtggtagtgtgtagaagtatagtaacgggctataagcctacttatgtggcattttttgtctgtgtggatgagagacattaaaaagtggaggtgggctctcatgcaagagtcagcttctatatgagctcttagataaaaggatgaaatagaaagatacactataatgatctaagagtcaactttg

SEQ ID NO: 53596 - DNA, 2362 bp, Zea Mays
tcccccgcggaaggacgacgacgcaactggcagtcaccgacgcgacgcgggtcgtctcctcagccctcctgttcagcctcctcgccagcgatggcttcgggcgccgacgccgcggcgctggtgacctccggcgccgacgagtgggcagcggcgtgtccgccgctgcggcggaacctgcagctgctcgcgcctgacgaggttgagctagcaaaaatgctgttgaatgagggccagattcacctatttgaacactggcctgaaccaggcattgatgacgacaagaaaagaggcttctttgatcaggttcgccggcttaattcaagctatcctggaggtctggtatcttacatcaagaatgccaaaaaacttcttgcagattcaaaggcaggaaaaaacccatatgatggtttcaccccttctgtgccttcaggggaaattttgaacttcggcgatgacaattttgtttcactggaagcagctgggataaaagaagcccacaatgctgcatttgttcttgtagctggagggcttggtgaaaggcttggttacaaaggaattaaggtagcacttccccgggaaacaacaactggaaaatgtttcattcaacattatatagagtctatcctggttttacaagaggccagctgcaaaacggttgatgatgggtgccaaaaaaagattccatttgtcattatgacttctgatgatacaaatgcactaactatcaagcttttggagtcaaactcttactttggaatggaaccatctcaagtgaaattgctaaagcaggaaaaagtagcttgtctagctgacaatgatgcaaggcttgcattagacccaagtgacaagtacaaaattcagacaaagccacatgggcatggagatgttcattctcttctttattcaagtggcttgcttgagcaatggaagagtgaagggcggaagtgggttctctttttccaggatacaaatggattgcttttcaatgcaattccgtctgctttaggtgtcagtgccaccaagggttacaatgtaaattctctcgcagttcctaggaaggctaaggaagcaattggaggaattaccaaacttactcatgttgatggtagaacaatggtcatcaatgtagagtacaatcagcttgatccactccttcgtgcaactggttatcctgatggagatacaaattctgagacaggctattctccataccctggaaatataaaccaggtatactgattcgaccaagacatcatttaaatcatccactcgtctagagtgcatgatgcaagactatccaaagacgttgccaccctcaacaaaagttggattcacggtgatggatacatggcttgcttatgctcctgtgaagaataatcctgaagacgcggctaaagttccaaaaggcaatccttatcatagtgcaacctcaggagagatggcaatttacagggcaaacagccttattttgagaaaggctggtgcgcagatagctgaccctgtcgttgataccttcaacgggcaagaggtagaggtctggccacgcgtaacctggagtccacggtggggtctcaccttccagagcgtcaaggagaaagtgcatggcagctgttcagtttctcagaggtcagctttggtcatcgatggccggagtgtcttcctcgacggactttcattggacggcacccttattgtcaatgctgtggatggtgcagaggttaaagttactggtcatgtagaaaataagggctggactatccggcatgtggactacaaggacacctcggagaaggaagaggtcaggatccgtgggttcaagttcaacaagtctgagcagctagaggtgaactacaccgagccaggaaagcatagcttgagtgcgtgaaaagaaaacattcttgacctgactagcttcgtaccaaaatggaaatagctcacatctgggtcgcctcccagattctgggagggaggccaatgccagcgtagctgaaaccgttcttctccttcccccacgtacaacaaggagcaaagtgcttcaccaagcactcaacattctttatgtatatcttgtacagaactcctcttcagtgcaatcagagttcattgtttgtttgggatctgatgtttatgttacaattttttattttagaaaacttggcactgaatcaagtaataagtgtggtagtgtgtagaagtatagtaacgggctataagcctacttatgtggcattttttgtctgtgtggatgagagacattaaaaagtggaggtgggctctcatgcaagagtcagcttctatatgagctcttagataaaaggatgaaatagaaagatacactataatgatctaagagtcaactttg

SEQ ID NO: 53597 - DNA, 551 bp, Zea Mays
aacccagcagcctcccaaatccccaaagcctccgacccccttcctctctccctccgccgccgctgcgcacgcagggaacaagcgacatgggcgtctacacctttgtgtgccgcaacaacggcggcgagtggaccgccaagcagcactccggcgagatcgaggctcccaaggaggagaagaaggaagaggagaaggaagagagcgacgacgacatgggattctccctgttcgactagagttgtgtgtgtcatctggatctcagaagtggtggtttggtcctgttgccgtagttaattttgctgtcctgtctgtgaacctgaagaactcttggtaattgttacaagcgacctgttccagtttatgtgagaatttgatatgttgtttggaatcatatattctccttgccatttgttgtgattttcggtgccaaaaggttactgtttcctgtaatgataatatgtagctagtacttgttcaagaaattgaacagcaacagtactacttgttcaagaaattgaacagcaacagctcgtcatgcaccttctttctct

SEQ ID NO: 53598 - DNA, 3377 bp, Zea Mays
cgttcttcaattgttaacgtacaagtattacgatggtatcactctgctatttctgccccgggctcacaacgcggtcccggatgcccgtgaagcggtacaagaagatccttgctgaaatctttcccaaaacacaggatgaagagcctaacgagagaaggattgggaagctgtgcgagtacgcttcgaaaaaccctcttcgagtgccaaagatcacagtttacttggagcaacatatttatcgggacttaagaagtgagcaatacggctttgcaaaagttgtgatgttgatataccgcagactgtcagtttcctgtaaagaacagatgcctctgtttgcaagtagcctattaagcattgtccacacccttttagaccaaaagaggcaggatgatttatgtatcgttggatgcgaaaccttgtttgattttgctgtcaatcaggtggacggtacatatcagttcaatttggaagggctggtcccaagactgtgtgaaatagcacaagaagtaggagaagatgagcgagcaagtgccctacgagcggcagccctgcaatctctttcagctatggtctggtttatgggggagctttctcatatctcgtcagagtttgacaatgttgttcaagttgtactggaaaactacaaacctcagaagatgcaaaatgatgatcaaggtaccaatgatgccgacaaccagttggtgcaggaagaccagaaggctgagcaccccccttcccctttcattatcactccggccccctcttgggagagcatagttaatgttaagggaggagtcaacctaccagaggaagatgctagagatcccaaattttggtccagaatctgtgtgcacaatatggccaagctttctagggaggcaaccacattccgccgcatcttggaatgtttgtttcggtactttggtaacaatagttcatggttatcagaaaatggacttgctttgtgtgtcttgttggacatgcaacttttagtagaaagctcaggacaaaatatgcacttaatgctttcactgctgataaagcatattgagcacaaaacaatgttgaagcagccggacatgcagcttagcatcgtggaggtggcagctacccttgcagaacaatccagtgctatcgcttcaccaacaactatgggtgccataagtgatcttgtgaggcatttgaaaaggacattccatattactcttggcagcaaagatacggaattagtaaaatggaatgagaaattccggaagggcatagatgaatgcttagttcagctgtcaaagaaggtgtctgatgctgggccagttcttgacatgatggctgttatgctagaaaacattgcgagcactcctgttgtagctagatcaactgcagctgctgtttatcgcacagctcaaataattgcttcggtgccaaatttgcaataccagaataaggtgtttcctgaagctctgtttcatcagttgctgttaacaatgatacaccctgaccatgaagctcgtgttgctgcacaccgcatttttgccattgtcttagtcccatcttctgtttccccttcgattcaagccagtccatctagccgaccaaagaaacatgacatgcagaggacactctctagggctgtctctgtattttcttcttcagctgctatctttgacaagatgaaaaaggacaagaactcagaaaattcacaaggagaaagcaaggacaatagtatgcatagcgttggtgaagggaccggacaatcaaagagtcaaaaccttcacgtgtctcaaagccgccgtagcatgaaagctccgaatttttccatgaaaagaggtccttcaatggccatgagagctccttcagtagcgatcagagctccctcaatatctctgagaggtccttcaatgtctttgagagcatcttctatgtctgtaaaggaagaccaaagttcctcaaacaagtcagatgaggaaacggaatctgtgttggtgaagctgagcgcacgtcagatcacacttttgctgtcatccatttgggctcaatcaacatcccctgaaaatactcctgtgaactatgaagccattgctcatacttacagtttgcttctgttgttctctggatctaaggcatcaacttttgaggctcttactcagagttttcaggttgcattttctttgaggagctattcactcactgaagcagattcattacaaccgtctcggcgccggtcattgtttactctgtccacagccatgattattttctcgtcaagagcttacaatgtcttgccactcatcccgatctgtaaacaaatgatcaatgatcgtgcggccgatccgttccttcatttggtggatgagagcagacttacagctgttaaggattcttcaaatgatccttcaaaaatatatggatcaccagaggacaacaataatgcactgaagtccctttcagaaatagaactatcagaaagtcaatctcgagaatgcatagtctccacaatcatgaacaacatcgcaaatatgctggatgcggaattgcataatgtgagaagccaattgctaagtgatttcactcccgatgacatgtgtcctacaagcactcagttctttgaagtgcatgctgataacccttcatcagggtcttatgagactggtcaccatcaagagggcttgctgattgacctagggaatgaccatgatgcttttggggaagcttcagaaagcgcagaagcttccgcatcttctatacctgcatcagatcttctgagtatcgatcagcttcttgaaacggttggtgcagaaccagcacctcaggctggagtagtgtcagcagacattgggttcaaggatatgactagccactgcgaagccctgacgattgggaaacagcagaaaatgtccgccttcatgagcttccagcaaagcgtgcaagcggcagggctgccgagcagccagcccaaccagatggagctggacctttcccaagacccgcagttgcctcagaccggggcacatagcacgaacccattcactgatgacagccttcagggatatccacagtacacgaaggggcccaacggcgacaacgcacagccaggccaggacttccaacaacagtccctgaagttaccggcggcgagcccatatgacaatttcctcagagctgctggctatagccacgaactttccattccgcaggaaatcaaggaagagagcctactcgctgtcatgggacaccatgaagacgtgatcgcaaagcttgctgcaaaacttacaggtgactcgaacgattgttccggctttgtcgtctttccaccctctgttttgggcttttggcatgagaggaggcttctgcaggaatacgccacttctcctccgtactag

SEQ ID NO: 53599 - DNA, 2438 bp, Zea Mays
atggagctcgccggggacgtcctccatgggggcacaccagatctggccatggacacgccggatccgggcatgggctcgccggaattggcctccggcgacccacaaagacgacctggccgccatgaacggagcaacccgtggggaagccaaccacgcagagaggagaggagggccccaccgccgtccttgcaccgacgtgagcttcctggccgcgtgctcgagcggcggcgaggcggagtgtctgatgctgggccagttcttgacatgatggctgttatgctagaaaacattgcgagcactcctgttgtagctagatcaactgcagctgctgtttatcgcacagctcaaataattgcttcggtgccaaatttgcaataccagaataaggtgtttcctgaagctctgtttcatcagttgctgttaacaatgatacaccctgaccatgaagctcgtgttgctgcacaccgcatttttgccattgtcttagtcccatcttctgtttccccttcgattcaagccagtccatctagccgaccaaagaaacatgacatgcagaggacactctctagggctgtctctgtattttcttcttcagctgctatctttgacaagatgaaaaaggacaagaactcagaaaattcacaaggagaaagcaaggacaatagtatgcatagcgttggtgaagggaccggacaatcaaagagtcaaaaccttcacgtgtctcaaagccgccgtagcatgaaagctccgaatttttccatgaaaagaggtccttcaatggccatgagagctccttcagtagcgatcagagctccctcaatatctctgagaggtccttcaatgtctttgagagcatcttctatgtctgtaaaggaagaccaaagttcctcaaacaagtcagatgaggaaacggaatctgtgttggtgaagctgagcgcacgtcagatcacacttttgctgtcatccatttgggctcaatcaacatcccctgaaaatactcctgtgaactatgaagccattgctcatacttacagtttgcttctgttgttctctggatctaaggcatcaacttttgaggctcttactcagagttttcaggttgcattttctttgaggagctattcactcactgaagcagattcattacaaccgtctcggcgccggtcattgtttactctgtccacagccatgattattttctcgtcaagagcttacaatgtcttgccactcatcccgatctgtaaacaaatgatcaatgatcgtgcggccgatccgttccttcatttggtggatgagagcagacttacagctgttaaggattcttcaaatgatccttcaaaaatatatggatcaccagaggacaacaataatgcactgaagtccctttcagaaatagaactatcagaaagtcaatctcgagaatgcatagtctccacaatcatgaacaacatcgcaaatatgctggatgcggaattgcataatgtgagaagccaattgctaagtgatttcactcccgatgacatgtgtcctacaagcactcagttctttgaagtgcatgctgataacccttcatcagggtcttatgagactggtcaccatcaagagggcttgctgattgacctagggaatgaccatgatgcttttggggaagcttcagaaagcgcagaagcttccgcatcttctatacctgcatcagatcttctgagtatcgatcagcttcttgaaacggttggtgcagaaccagcacctcaggctggagtagtgtcagcagacattgggttcaaggatatgactagccactgcgaagccctgacgattgggaaacagcagaaaatgtccgccttcatgagcttccagcaaagcgtgcaagcggcagggctgccgagcagccagcccaaccagatggagctggacctttcccaagacccgcagttgcctcagaccggggcacatagcacgaacccattcactgatgacagccttcagggatatccacagtacacgaaggggcccaacggcgacaacgcacagccaggccaggacttccaacaacagtccctgaagttaccggcggcgagcccatatgacaatttcctcagagctgctggctgttagaggtccagcttgcagcagccaaaacatcatttacatggacgatggcaatttcaagatagccacgaactttccattccgcaggaaatcaaggaagaggtatgtccgtgtatgaggtcttagctagagactcaaccggattcgacacccattctttatgtatagctgtatatatgtataggttggctctttgctgctgctgctgctgctgtttttgccaatgcaacgagtagagggactgggggggagcagtgccttctatcacagactgtacatgtaaacatgttgcagaaatatatgaagaaaaaaaatgacgtttgaagaaa

SEQ ID NO: 53600 - DNA, 3461 bp, Zea Mays
atggtatcactctgctatttctgccccgggctcacaacgcggtcccggatgcccgtgaagcggtacaagaagatccttgctgaaatctttcccaaaacacaggatgaagagcctaacgagagaaggattgggaagctgtgcgagtacgcttcgaaaaaccctcttcgagtgccaaagatcacagtttacttggagcaacatatttatcgggacttaagaagtgagcaatacggctttgcaaaagttgtgatgttgatataccgcagactgtcagtttcctgtaaagaacagatgcctctgtttgcaagtagcctattaagcattgtccacacccttttagaccaaaagaggcaggatgatttatgtatcgttggatgcgaaaccttgtttgattttgctgtcaatcaggtggacggtacatatcagttcaatttggaagggctggtcccaagactgtgtgaaatagcacaagaagtaggagaagatgagcgagcaagtgccctacgagcggcagccctgcaatctctttcagctatggtctggtttatgggggagctttctcatatctcgtcagagtttgacaatgttgttcaagttgtactggaaaactacaaacctcagaagatgcaaaatgatgatcaaggtaccaatgatgccgacaaccagttggtgcaggaagaccagaaggctgagcaccccccttcccctttcattatcactccggccccctcttgggagagcatagttaatgttaagggaggagtcaacctaccagaggaagatgctagagatcccaaattttggtccagaatctgtgtgcacaatatggccaagctttctagggaggcaaccacattccgccgcatcttggaatgtttgtttcggtactttggtaacaatagttcatggttatcagaaaatggacttgctttgtgtgtcttgttggacatgcaacttttagtagaaagctcaggacaaaatatgcacttaatgctttcactgctgataaagcatattgagcacaaaacaatgttgaagcagccggacatgcagcttagcatcgtggaggtggcagctacccttgcagaacaatccagtgctatcgcttcaccaacaactatgggtgccataagtgatcttgtgaggcatttgaaaaggacattccatattactcttggcagcaaagatacggaattagtaaaatggaatgagaaattccggaagggcatagatgaatgcttagttcagctgtcaaagaaggtgtctgatgctgggccagttcttgacatgatggctgttatgctagaaaacattgcgagcactcctgttgtagctagatcaactgcagctgctgtttatcgcacagctcaaataattgcttcggtgccaaatttgcaataccagaataaggtgtttcctgaagctctgtttcatcagttgctgttaacaatgatacaccctgaccatgaagctcgtgttgctgcacaccgcatttttgccattgtcttagtcccatcttctgtttccccttcgattcaagccagtccatctagccgaccaaagaaacatgacatgcagaggacactctctagggctgtctctgtattttcttcttcagctgctatctttgacaagatgaaaaaggacaagaactcagaaaattcacaaggagaaagcaaggacaatagtatgcatagcgttggtgaagggaccggacaatcaaagagtcaaaaccttcacgtgtctcaaagccgccgtagcatgaaagctccgaatttttccatgaaaagaggtccttcaatggccatgagagctccttcagtagcgatcagagctccctcaatatctctgagaggtccttcaatgtctttgagagcatcttctatgtctgtaaaggaagaccaaagttcctcaaacaagtcagatgaggaaacggaatctgtgttggtgaagctgagcgcacgtcagatcacacttttgctgtcatccatttgggctcaatcaacatcccctgaaaatactcctgtgaactatgaagccattgctcatacttacagtttgcttctgttgttctctggatctaaggcatcaacttttgaggctcttactcagagttttcaggttgcattttctttgaggagctattcactcactgaagcagattcattacaaccgtctcggcgccggtcattgtttactctgtccacagccatgattattttctcgtcaagagcttacaatgtcttgccactcatcccgatctgtaaacaaatgatcaatgatcgtgcggccgatccgttccttcatttggtggatgagagcagacttacagctgttaaggattcttcaaatgatccttcaaaaatatatggatcaccagaggacaacaataatgcactgaagtccctttcagaaatagaactatcagaaagtcaatctcgagaatgcatagtctccacaatcatgaacaacatcgcaaatatgctggatgcggaattgcataatgtgagaagccaattgctaagtgatttcactcccgatgacatgtgtcctacaagcactcagttctttgaagtgcatgctgataacccttcatcagggtcttatgagactggtcaccatcaagagggcttgctgattgacctagggaatgaccatgatgcttttggggaagcttcagaaagcgcagaagcttccgcatcttctatacctgcatcagatcttctgagtatcgatcagcttcttgaaacggttggtgcagaaccagcacctcaggctggagtagtgtcagcagacattgggttcaaggatatgactagccactgcgaagccctgacgattgggaaacagcagaaaatgtccgccttcatgagcttccagcaaagcgtgcaagcggcagggctgccgagcagccagcccaaccagatggagctggacctttcccaagacccgcagttgcctcagaccggggcacatagcacgaacccattcactgatgacagccttcagggatatccacagtacacgaaggggcccaacggcgacaacgcacagccaggccaggacttccaacaacagtccctgaagttaccggcggcgagcccatatgacaatttcctcagagctgctggctgttagaggtccagcttgcagcagccaaaacatcatttacatggacgatggcaatttcaagatagccacgaactttccattccgcaggaaatcaaggaagaggtatgtccgtgtatgaggtcttagctagagactcaaccggattcgacacccattctttatgtatagctgtatatatgtataggttggctctttgctgctgctgctgctgctgtttttgccaatgcaacgagtagagggactgggggggagcagtgccttctatcacagactgtacatgtaaacatgttgcagaaatatatgaagaaaaaaaatgacgtttgaagaaa

SEQ ID NO: 53601 - DNA, 1584 bp, Zea Mays
ctatgccggtggctgtttggacatctgttgacacaccccaccccgttgccaagcggcgccaaaccaacgagagcacccggaccagacgcccaagtcgatcgccatggcgatgaagccggcggcggcggctccccctaccccggccgcggcgcacagcgtgttcgtctacggcagcctgatggcggacgaggtggtccgcaccatcctcaagcgcgtcccgcccgccgccccggccctcctcccaaactaccaccggttcaacatcaagggccgcatttacccggcgatcctgcccgttgagagcaagagagttgctgggagggttatcatgggtgttactgatgaagagctccagcttcttgacgcgtttgaagacgtggagtacacgaggacaagagttgagatatcattggctgactcttccgagaacatgctggctgacacttacgtgtggagtgatgcagaggatctcaatctttatggagaatgggactttgaggtgatatgacttgtttcctgcagtcctggggtgttaatgctatgtgattatcatgctacgtggatcatatcaaaatgatgaactctatcagctactgccgtcctcgggatctaaaattctgttgcaaccacgcacaatgaatgtagtgattttctcgcatatataatactccctttgtcccaaaatataattcgttttagactaaacacacatttattaattaatctacggatgtagtttgtactgcatttattgtcattcggatgatgaatgtgaggactagaaagaactatattttagaacggagggagtggagggagtactgaaaacagaggcctatttctggcgacaactctttatcaatacagtagtccatgcccccatctatctgtttccattacacccatagcccagaatgtgcttatgtgcccaaaatgtggtaggagtatgtacaaatgtgaccttgtgctttctaactacaaagtttatctcctctccacaggagtggaagaaactgcacatgaaggatttccttgcgatgacgaacggtttcatgcacgagctcgagcagcctgaatcgaagacccgggtggagacctaccaggaattcatgcaacaacaggaacagcctgcgccggggacccaggtggagggttgagagctgcaatccgctggctgctgatctacatctagtcaattcccatggaggaattgcattggcattggactgtaccgtatctaataggtcacctatatcatttgtgaagatcaggattatccggtctataataactaaacatacaaataaaatgtccaccgaggtttctgttgattctttatgtcattgttgaccccatggctgctgctcaactgctgatgcgcggtctctataatttgtgaaagaagatagtgattaacttacataatgcaatagttaagtacatgtatatgaaacagttttccttgagatttctgttgattattttgtcgttgttcatcccatggctgtttgtggaatatgattaggagtaacctgtgagatagaataattaagtacagcgatgaagttgtcactgagattgttg

SEQ ID NO: 53602 - DNA, 1009 bp, Zea Mays
ctatgccggtggctgtttggacatctgttgacacaccccaccccgttgccaagcggcgccaaaccaacgagagcacccggaccagacgcccaagtcgatcgccatggcgatgaagccggcggcggcggctccccctaccccggccgcggcgcacagcgtgttcgtctacggcagcctgatggcggacgaggtggtccgcaccatcctcaagcgcgtcccgcccgccgccccggccctcctcccaaactagttatcatgggtgttactgatgaagagctccagcttcttgacgcgtttgaagacgtggagtacacgaggacaagagttgagatatcattggctgactcttccgagaacatgctggctgacacttacgtgtggagtgatgcagaggatctcaatctttatggagaatgggactttgaggagtggaagaaactgcacatgaaggatttccttgcgatgacgaacggtttcatgcacgagctcgagcagcctgaatcgaagacccgggtggagacctaccaggaattcatgcaacaacaggaacagcctgcgccggggacccaggtggagggttgagagctgcaatccgctggctgctgatctacatctagtcaattcccatggaggaattgcattggcattggactgtaccgtatctaataggtcacctatatcatttgtgaagatcaggattatccggtctataataactaaacatacaaataaaatgtccaccgaggtttctgttgattctttatgtcattgttgaccccatggctgctgctcaactgctgatgcgcggtctctataatttgtgaaagaagatagtgattaacttacataatgcaatagttaagtacatgtatatgaaacagttttccttgagatttctgttgattattttgtcgttgttcatcccatggctgtttgtggaatatgattaggagtaacctgtgagatagaataattaagtacagcgatgaagttgtcactgagattgttg

SEQ ID NO: 53603 - DNA, 2834 bp, Zea Mays
aggagaaaggttgccatctcgtgtgtgtgtgtctgttggatggatctctgtgagccatgccctctttgtcttcttgcttttgctttcttggtcccttcccttctcttttctagcagagctctcgtggttcttggccttccgtgtgtctgccaggtagaaattttaaccgaaaaaaagattcttccgagcaaaggaggttagatgcttgattccacacccagcatttcccctccttttctgtataaaacaatattccttttttattttggtttgcatcctctttgcccccacccccatacacacaaaagaaactggattcggtgcctattggttcttgtgttggtgggaacagtagggcagcgccaataatgcagtgctgaggtaattgctgcgaaagatgagagagggtcttggatgtgggtggttgtgatggtggataggcatataggatagggccaaacctagatggggctgaggatagggaaggcatgcatgatagggacttcaaagacccaggtgagagctcagtcgacggtaatgccgccgcagctcctttagtcgccaggcgattggcatgccacggttcctggttcatctcgcagagttagtttgagttcgaggcttgtgtggtgttgctgattgcgcacaagaggtccaggaacatataggcggcggatctggctgcgttctttctgtttcgtcagagaaggggtttcagcgctgccagctttcacataaacaagttggggaagcagttgaggttttctaattcttcttggaaggattgagatctccagttctgataatgggttcttttgggatgaactggaatcagaaggaccccatggtgtgggattgggaacatctagtaccgtctgtctcaaatgcagttacaaggcacggatctgctaattcatctggtggtactcttacttctaactcagagctagggcatggttcatccaagagctctatttcagcgtccattgattcaccctctggagtagggaacagcttagagttcaacttcgccgctgttgagaggcatgttaagaacacgggcacgaacggcagagtcgatgactcggggaattctccatcgtcaatgatagctttcaaccaaggagagccattaatcagcctgaaacttgggaagagggcttacttcgaaaacgcctgcggaggacaggatgccaaggtttctgcagcttcagacgttacttctgcagccagcgtggtcaagaagactaaggtgtctcagcagaatgcaaagaactggtactgtcaggttgaagggtgcaaagttgacctgtcttctgctaaagattacaatcgcaagcacaaggtctgtgtagtccattctaaagctaccaaggtggttgttgctggtctagagcgtcggttttgtcaacagtgtagccggtgagatttccttccattaaaactgagttctcctttcattctacgatattcatatttgtatttgccaagttacttttttttggcatctttaatgagggagggagctttgaaaatgtgaccagctgaaagcaataccagccactcaagttgtagagcgaagtggacttgtgctagtctatatgatgctcaattattttgcttggctcagactctcatgatatttatgttatttaatcttttctaattaaggtacacaggaacgctagcatgaaatgaatagtgaagaaaaattggcaattccttttgtttctggcactagctgtaatggtgtaggactgcctaagtggagtgttgaactgttgatgcaacatcttgagaaggagaaattgtacacaagcttataactaacatttacactttgatctgttgttgacataatgaagctccatttccctcttttctttaatccttctctgtttgtagttttcatggtttagcggagtttgatcagaacaaacgaagctgtcgtaggcgtctgatgcatcataatgcacggaggaggaaacctcaggcagacacaatttcattcaattcatcgacaatgttttatgatacaaggcagcggacaaatcttttctttagtcaaccactttatggccaagtgaggagcaatgcagggtcttcatgggataacttgggaggcttaaaattcatggagacgaaacatccgccagtgcatccaacaaaaacagcatcccctgatgaactgcatttctcagccctccagataactagtgctgcggctcacaccggacatcatcatgatctcgatgggttcatggcgttcaagggaaccagcacaaaggtccttaaccaaggcgtggaggcttgggcggccgcttccagctcgaacaacggaggcccagaaggtgggcgtgctctctctcttctgtcagacggctcgtggggctcgagttcagccgtcatccagcagcccacatctcacgcggacgccggtgcattgctgccgcccctcgccaccgttgccgtctccaacgccgccgccgccgccgggcatcctctggacccgtccccgggaaggttctggccgcaagacgatcatcccccgctcgtcgacggacccgccacgcagattccggagctggcgcacctccggatatggtgaaaggaaacgcatgtgatgcggtgactggtgacatgccagttcgagggcctggctgggaacacatctggttggttagcctgccgctctggcttgaatttgccggcgacgacagtctttgtttgtatcttttgatcagaacggacacagacatgtttgcacaatataatgtgacgagtccctctttggggttgaggagtgaggagatggagaacgataggaggcaaaa

SEQ ID NO: 53604 - DNA, 3056 bp, Zea Mays
aggagaaaggttgccatctcgtgtgtgtgtgtctgttggatggatctctgtgagccatgccctctttgtcttcttgcttttgctttcttggtcccttcccttctcttttctagcagagctctcgtggttcttggccttccgtgtgtctgccaggtagaaattttaaccgaaaaaaagattcttccgagcaaaggaggttagatgcttgattccacacccagcatttcccctccttttctgtataaaacaatattccttttttattttggtttgcatcctctttgcccccacccccatacacacaaaagaaactggattcggtgcctattggttcttgtgttggtgggaacagtagggcagcgccaataatgcagtgctgaggtaattgctgcgaaagatgagagagggtcttggatgtgggtggttgtgatggtggataggcatataggatagggccaaacctagatggggctgaggatagggaaggcatgcatgatagggacttcaaagacccaggtgagagctcagtcgacggtaatgccgccgcagctcctttagtcgccaggcgattggcatgccacggttcctggttcatctcgcagagttagtttgagttcgaggcttgtgtggtgttgctgattgcgcacaagaggtccaggaacatataggcggcggatctggctgcgttctttctgtttcgtcagagaaggggtttcaggtctctgatcttttatccctgtcctattgtcccaatacctgttcattctgttcttgctgtgattctctcacgaaatgagctgcacatggttcattgacacagtcttttttatagttatatcttgtgcgaatcgcaagttttaagcaagttgactatctgggttcatctgtttcagttctgtactttgtctttgacatttattctttctactcttccctgcagcgctgccagctttcacataaacaagttggggaagcagttgaggttttctaattcttcttggaaggattgagatctccagttctgataatgggttcttttgggatgaactggaatcagaaggaccccatggtgtgggattgggaacatctagtaccgtctgtctcaaatgcagttacaaggcacggatctgctaattcatctggtggtactcttacttctaactcagagctagggcatggttcatccaagagctctatttcagcgtccattgattcaccctctggagtagggaacagcttagagttcaacttcgccgctgttgagaggcatgttaagaacacgggcacgaacggcagagtcgatgactcggggaattctccatcgtcaatgatagctttcaaccaaggagagccattaatcagcctgaaacttgggaagagggcttacttcgaaaacgcctgcggaggacaggatgccaaggtttctgcagcttcagacgttacttctgcagccagcgtggtcaagaagactaaggtgtctcagcagaatgcaaagaactggtactgtcaggttgaagggtgcaaagttgacctgtcttctgctaaagattacaatcgcaagcacaaggtctgtgtagtccattctaaagctaccaaggtggttgttgctggtctagagcgtcggttttgtcaacagtgtagccggtgagatttccttccattaaaactgagttctcctttcattctacgatattcatatttgtatttgccaagttacttttttttggcatctttaatgagggagggagctttgaaaatgtgaccagctgaaagcaataccagccactcaagttgtagagcgaagtggacttgtgctagtctatatgatgctcaattattttgcttggctcagactctcatgatatttatgttatttaatcttttctaattaaggtacacaggaacgctagcatgaaatgaatagtgaagaaaaattggcaattccttttgtttctggcactagctgtaatggtgtaggactgcctaagtggagtgttgaactgttgatgcaacatcttgagaaggagaaattgtacacaagcttataactaacatttacactttgatctgttgttgacataatgaagctccatttccctcttttctttaatccttctctgtttgtagttttcatggtttagcggagtttgatcagaacaaacgaagctgtcgtaggcgtctgatgcatcataatgcacggaggaggaaacctcaggcagacacaatttcattcaattcatcgacaatgttttatgatacaaggcagcggacaaatcttttctttagtcaaccactttatggccaagtgaggagcaatgcagggtcttcatgggataacttgggaggcttaaaattcatggagacgaaacatccgccagtgcatccaacaaaaacagcatcccctgatgaactgcatttctcagccctccagataactagtgctgcggctcacaccggacatcatcatgatctcgatgggttcatggcgttcaagggaaccagcacaaaggtccttaaccaaggcgtggaggcttgggcggccgcttccagctcgaacaacggaggcccagaaggtgggcgtgctctctctcttctgtcagacggctcgtggggctcgagttcagccgtcatccagcagcccacatctcacgcggacgccggtgcattgctgccgcccctcgccaccgttgccgtctccaacgccgccgccgccgccgggcatcctctggacccgtccccgggaaggttctggccgcaagacgatcatcccccgctcgtcgacggacccgccacgcagattccggagctggcgcacctccggatatggtgaaaggaaacgcatgtgatgcggtgactggtgacatgccagttcgagggcctggctgggaacacatctggttggttagcctgccgctctggcttgaatttgccggcgacgacagtctttgtttgtatcttttgatcagaacggacacagacatgtttgcacaatataatgtgacgagtccctctttggggttgaggagtgaggagatggagaacgataggaggcaaaa

SEQ ID NO: 53605 - DNA, 2182 bp, Zea Mays
aggagaaaggttgccatctcgtgtgtgtgtgtctgttggatggatctctgtgagccatgccctctttgtcttcttgcttttgctttcttggtcccttcccttctcttttctagcagagctctcgtggttcttggccttccgtgtgtctgccagcgctgccagctttcacataaacaagttggggaagcagttgaggttttctaattcttcttggaaggattgagatctccagttctgataatgggttcttttgggatgaactggaatcagaaggaccccatggtgtgggattgggaacatctagtaccgtctgtctcaaatgcagttacaaggcacggatctgctaattcatctgggaacagcttagagttcaacttcgccgctgttgagaggcatgttaagaacacgggcacgaacggcagagtcgatgactcggggaattctccatcgtcaatgatagctttcaaccaaggagagccattaatcagcctgaaacttgggaagagggcttacttcgaaaacgcctgcggaggacaggatgccaaggtttctgcagcttcagacgttacttctgcagccagcgtggtcaagaagactaaggtgtctcagcagaatgcaaagaactggtactgtcaggttgaagggtgcaaagttgacctgtcttctgctaaagattacaatcgcaagcacaaggtctgtgtagtccattctaaagctaccaaggtggttgttgctggtctagagcgtcggttttgtcaacagtgtagccggtgagatttccttccattaaaactgagttctcctttcattctacgatattcatatttgtatttgccaagttacttttttttggcatctttaatgagggagggagctttgaaaatgtgaccagctgaaagcaataccagccactcaagttgtagagcgaagtggacttgtgctagtctatatgatgctcaattattttgcttggctcagactctcatgatatttatgttatttaatcttttctaattaaggtacacaggaacgctagcatgaaatgaatagtgaagaaaaattggcaattccttttgtttctggcactagctgtaatggtgtaggactgcctaagtggagtgttgaactgttgatgcaacatcttgagaaggagaaattgtacacaagcttataactaacatttacactttgatctgttgttgacataatgaagctccatttccctcttttctttaatccttctctgtttgtagttttcatggtttagcggagtttgatcagaacaaacgaagctgtcgtaggcgtctgatgcatcataatgcacggaggaggaaacctcaggcagacacaatttcattcaattcatcgacaatgttttatgatacaaggcagcggacaaatcttttctttagtcaaccactttatggccaagtgaggagcaatgcagggtcttcatgggataacttgggaggcttaaaattcatggagacgaaacatccgccagtgcatccaacaaaaacagcatcccctgatgaactgcatttctcagccctccagataactagtgctgcggctcacaccggacatcatcatgatctcgatgggttcatggcgttcaagggaaccagcacaaaggtccttaaccaaggcgtggaggcttgggcggccgcttccagctcgaacaacggaggcccagaaggtgggcgtgctctctctcttctgtcagacggctcgtggggctcgagttcagccgtcatccagcagcccacatctcacgcggacgccggtgcattgctgccgcccctcgccaccgttgccgtctccaacgccgccgccgccgccgggcatcctctggacccgtccccgggaaggttctggccgcaagacgatcatcccccgctcgtcgacggacccgccacgcagattccggagctggcgcacctccggatatggtgaaaggaaacgcatgtgatgcggtgactggtgacatgccagttcgagggcctggctgggaacacatctggttggttagcctgccgctctggcttgaatttgccggcgacgacagtctttgtttgtatcttttgatcagaacggacacagacatgtttgcacaatataatgtgacgagtccctctttggggttgaggagtgaggagatggagaacgataggaggcaaaa

SEQ ID NO: 53606 - DNA, 2312 bp, Zea Mays
aggagaaaggttgccatctcgtgtgtgtgtgtctgttggatggatctctgtgagccatgccctctttgtcttcttgcttttgctttcttggtcccttcccttctcttttctagcagagctctcgtggttcttggccttccgtgtgtctgccaggtagaaattttaaccgaaaaaaagattcttccgagcaaaggagcgctgccagctttcacataaacaagttggggaagcagttgaggttttctaattcttcttggaaggattgagatctccagttctgataatgggttcttttgggatgaactggaatcagaaggaccccatggtgtgggattgggaacatctagtaccgtctgtctcaaatgcagttacaaggcacggatctgctaattcatctggtggtactcttacttctaactcagagctagggcatggttcatccaagagctctatttcagcgtccattgattcaccctctggagtagggaacagcttagagttcaacttcgccgctgttgagaggcatgttaagaacacgggcacgaacggcagagtcgatgactcggggaattctccatcgtcaatgatagctttcaaccaaggagagccattaatcagcctgaaacttgggaagagggcttacttcgaaaacgcctgcggaggacaggatgccaaggtttctgcagcttcagacgttacttctgcagccagcgtggtcaagaagactaaggtgtctcagcagaatgcaaagaactggtactgtcaggttgaagggtgcaaagttgacctgtcttctgctaaagattacaatcgcaagcacaaggtctgtgtagtccattctaaagctaccaaggtggttgttgctggtctagagcgtcggttttgtcaacagtgtagccggtgagatttccttccattaaaactgagttctcctttcattctacgatattcatatttgtatttgccaagttacttttttttggcatctttaatgagggagggagctttgaaaatgtgaccagctgaaagcaataccagccactcaagttgtagagcgaagtggacttgtgctagtctatatgatgctcaattattttgcttggctcagactctcatgatatttatgttatttaatcttttctaattaaggtacacaggaacgctagcatgaaatgaatagtgaagaaaaattggcaattccttttgtttctggcactagctgtaatggtgtaggactgcctaagtggagtgttgaactgttgatgcaacatcttgagaaggagaaattgtacacaagcttataactaacatttacactttgatctgttgttgacataatgaagctccatttccctcttttctttaatccttctctgtttgtagttttcatggtttagcggagtttgatcagaacaaacgaagctgtcgtaggcgtctgatgcatcataatgcacggaggaggaaacctcaggcagacacaatttcattcaattcatcgacaatgttttatgatacaaggcagcggacaaatcttttctttagtcaaccactttatggccaagtgaggagcaatgcagggtcttcatgggataacttgggaggcttaaaattcatggagacgaaacatccgccagtgcatccaacaaaaacagcatcccctgatgaactgcatttctcagccctccagataactagtgctgcggctcacaccggacatcatcatgatctcgatgggttcatggcgttcaagggaaccagcacaaaggtccttaaccaaggcgtggaggcttgggcggccgcttccagctcgaacaacggaggcccagaaggtgggcgtgctctctctcttctgtcagacggctcgtggggctcgagttcagccgtcatccagcagcccacatctcacgcggacgccggtgcattgctgccgcccctcgccaccgttgccgtctccaacgccgccgccgccgccgggcatcctctggacccgtccccgggaaggttctggccgcaagacgatcatcccccgctcgtcgacggacccgccacgcagattccggagctggcgcacctccggatatggtgaaaggaaacgcatgtgatgcggtgactggtgacatgccagttcgagggcctggctgggaacacatctggttggttagcctgccgctctggcttgaatttgccggcgacgacagtctttgtttgtatcttttgatcagaacggacacagacatgtttgcacaatataatgtgacgagtccctctttggggttgaggagtgaggagatggagaacgataggaggcaaaa

SEQ ID NO: 53607 - DNA, 2356 bp, Zea Mays
cggccatcttggggggtgctcactgtgtccagttcttccatctctcttttcccccttgaggaggagtggagtggttgaggcggtggttgttggggtcgcagtcgcagggttgggctagggcatgtgctgatgtgcatgctggcgcctggacgctgtggcgtgcactgtatgctgaggcagccatccactgggcctcaccctctcttcctgcgtcaggtggggttcatggacacagagcgctgccagctttcacataaacaagttggggaagcagttgaggttttctaattcttcttggaaggattgagatctccagttctgataatgggttcttttgggatgaactggaatcagaaggaccccatggtgtgggattgggaacatctagtaccgtctgtctcaaatgcagttacaaggcacggatctgctaattcatctggtggtactcttacttctaactcagagctagggcatggttcatccaagagctctatttcagcgtccattgattcaccctctggagtagggaacagcttagagttcaacttcgccgctgttgagaggcatgttaagaacacgggcacgaacggcagagtcgatgactcggggaattctccatcgtcaatgatagctttcaaccaaggagagccattaatcagcctgaaacttgggaagagggcttacttcgaaaacgcctgcggaggacaggatgccaaggtttctgcagcttcagacgttacttctgcagccagcgtggtcaagaagactaaggtgtctcagcagaatgcaaagaactggtactgtcaggttgaagggtgcaaagttgacctgtcttctgctaaagattacaatcgcaagcacaaggtctgtgtagtccattctaaagctaccaaggtggttgttgctggtctagagcgtcggttttgtcaacagtgtagccggtgagatttccttccattaaaactgagttctcctttcattctacgatattcatatttgtatttgccaagttacttttttttggcatctttaatgagggagggagctttgaaaatgtgaccagctgaaagcaataccagccactcaagttgtagagcgaagtggacttgtgctagtctatatgatgctcaattattttgcttggctcagactctcatgatatttatgttatttaatcttttctaattaaggtacacaggaacgctagcatgaaatgaatagtgaagaaaaattggcaattccttttgtttctggcactagctgtaatggtgtaggactgcctaagtggagtgttgaactgttgatgcaacatcttgagaaggagaaattgtacacaagcttataactaacatttacactttgatctgttgttgacataatgaagctccatttccctcttttctttaatccttctctgtttgtagttttcatggtttagcggagtttgatcagaacaaacgaagctgtcgtaggcgtctgatgcatcataatgcacggaggaggaaacctcaggcagacacaatttcattcaattcatcgacaatgttttatgatacaaggcagcggacaaatcttttctttagtcaaccactttatggccaagtgaggagcaatgcagggtcttcatgggataacttgggaggcttaaaattcatggagacgaaacatccgccagtgcatccaacaaaaacagcatcccctgatgaactgcatttctcagccctccagataactagtgctgcggctcacaccggacatcatcatgatctcgatgggttcatggcgttcaagggaaccagcacaaaggtccttaaccaaggtacttcgcctgcttgggcggccgcttccagctcgaacaacggaggcccagaaggtgggcgtgctctctctcttctgtcagacggctcgtggggctcgagttcagccgtcatccagcagcccacatctcacgcggacgccggtgcattgctgccgcccctcgccaccgttgccgtctccaacgccgccgccgccgccgggcatcctctggacccgtccccgggaaggttctggccgcaagacgatcatcccccgctcgtcgacggacccgccacgcagattccggagctggcgcacctccggatatggtgaaaggaaacgcatgtgatgcggtgactggtgacatgccagttcgagggcctggctgggaacacatctggttggttagcctgccgctctggcttgaatttgccggcgacgacagtctttgtttgtatcttttgatcagaacggacacagacatgtttgcacaatataatgtgacgagtccctctttggggttgaggagtgaggagatggagaacgataggaggcaaaa

SEQ ID NO: 53608 - DNA, 1418 bp, Zea Mays
ccaaaacaaacaaacccatatatatcgggtggggattcaaacataaacctattccatttccattccaaaggcgaattactatataatacaatggctaagatgtcaagtccaattcacgccaagatatcaacagatcgctggagatactacggctgttcaagttacaaacagtaacaaatagctcctgaactaaaacgggaagtgcaaatgttcagaaaatcactggcgagcccgcacagctacgaacatgagccctcgctatgaacacaggccctcgttttcaagatcagcctgaaccttcgttcgcttgatccttcccggcgatttgcattctgcgtctacacccgggttcctgttcttgggtggccgcggagaaatggtgtctacctcggattcagttctctcgtctgacgtcgattcaggtgacgactttgttgcttgtgctttggttggagcttttagtggcacattgccggccttctgctgctcttctagtattttctgcaagtatcttgcatgttcctctatccgtagctgcaactgcctttgcacctggtggtggaattgaaatcatcagtgctgaaaacatctgatcaatgagtgcctgttactacatgttttcttactcacatgacaatgggtgtagatattcatagtatacgattaattcttttaggtactcatcgatgtatataagttgccagttcaaggataacgatggctgatgaacagaaaacaagtggccatatagaaccgaaaccaaacgccagactaattcctactatatgtctcaagcatatgagccaacggtagtacttgcgagatgtgataacatagcacctactacggacccacctctaattgttcatgaagctgtttctgaacctctatttgcatccttagagcttctgccacttgtaaattcctaagaaacatgtgaaggaaagggatgtaaaactttaagatcatgatgcttgtgtgcatgttcccctgcgtaggtaatgaggactcacttgtttttgcttgaatcaatgctgccctttcctaattgtgcttttttatcctccgaggaagccttcttatctagtcagcatttaggatgtttgttcttttcagaaaaaaagtgctattataaagaagtatacagtgagtaggtaatttaagcttaccgtctttaggctcaggaatatattttgcaagccgatacttctatacgaagagtatatgcgagaaaatgtaagttaatgaaaacatagaagggagaattaatttttcagcggacacaattgtatacctgcagatggctcttcacatgataaattgttagaccttctaccttcattagtttcagcacacctttgggagttgcttctgtaaatatatgaacaaactatttattaagataacctgaaaacatg

SEQ ID NO: 53609 - DNA, 872 bp, Zea Mays
ggatcacgatctagcctacactacagcctacaatggtcgttgccttccatccgaccttaccggcctacccttcctcttccaatttgctactgatctcccctgttatcgtcggatttctcgtgacggtgagtccgtgacacgccggcgccatggcgagcaggtgcctagcggctgcatcggaggccgccgtcgtcttcctcatccggcccatcctcgccatcgttttcgtcttcaccctcatcctcctcggctggtacgtggcgtggacgacggtgctggtgcacgtgccgctggtgcaggagatcgccggcctgcgcccgaagaagccctctaaacccaagccagccaaccgcggccgcgtcgccaagttctaccggaaccaggccgaggccgcacaaaggaactgcaaatcagaaggggcaccttaagagaaaatctgctgcacactagagagaatgtatatctgcatttgatgggagcttcctgcatgacgacttctctaggagagaatgtgtatcagcatttgacgggagcttcctgcatgacgacacatcaggcttatgatactagcgtatcaacttttagttgcatgaccttgtaaaatgaggaccttttaattgtagattgtacatatacttgtacatgacttttagttgcaacgacaacgatcatctattcaatcagccaataattccgtaactgattccctctgggaagaacgaagatctggactcacctggcaagagggaagccgatcattcttcaaattcaactatatggggtgcaaaatgctagcgtggttgaacactatgattgaggtaaggaaatactgagaaagccaatgcatttaagaaagaaaaaaaaatctatag

SEQ ID NO: 53610 - DNA, 858 bp, Zea Mays
cttgtgttagcgctggtgattcggcagccagcgaggctgatccgggaccgggtggctggccggtggccacaccagaggtctattatacctggattccgcgaggccacggaccacggtgcgcgcgctcttgtcttgttcctgtgcctgccactgccagtgccaccatctcgccgtcggcgtcggctcgtcgcctgagagccgaggccacgcaggcacccgggccgggggatgtcggcgccggcggcacaggccgtggtggcgctggctctcgcggccatcctctcgaccccggcgccccaggcggacaccttctccaacgtcccgcccacgctctccgggggcgacgggaagcaagagcggatcaagcaccccaggtcggccaaggcgttgcagtgcacgaccaagtgcgtcggcacctgcatccgcggcggcggcggcgcgcccggcgaggggcccctcaacgtcaggaggcccctcgtggtgttcaaggacggcttccgcagccggcagtactggtgggtactactactacctgcactacagccccctcttcttttcactatagcagatgctaccactgctcgtgggtcaccaaagatgggcaggacggaccctgagacgggccagaggaacaacatgcccaagcccaaagttgttggagcaactgccatggctgcggtgcaggctagatatgggatccggttcttctgccaggcctccagaagcagaacttcagaggcgacaagggtaataaggtacagtaaaccagtcagtaacatataggatccagagacatttgctagcaacaaaatccgagaaaagctgttaagagtgatgcgtagtggtcttgataaccgt

SEQ ID NO: 53611 - DNA, 814 bp, Zea Mays
cttgtgttagcgctggtgattcggcagccagcgaggctgatccgggaccgggtggctggccggtggccacaccagaggtctattatacctggattccgcgaggccacggaccacggtgcgcgcgctcttgtcttgttcctgtgcctgccactgccagtgccaccatctcgccgtcggcgtcggctcgtcgcctgagagccgaggccacgcaggcacccgggccgggggatgtcggcgccggcggcacaggccgtggtggcgctggctctcgcggccatcctctcgaccccggcgccccaggcggacaccttctccaacgtcccgcccacgctctccgggggcgacgggaagcaagagcggatcaagcaccccaggtcggccaaggcgttgcagtgcacgaccaagtgcgtcggcacctgcatccgcggcggcggcggcgcgcccggcgaggggcccctcaacgtcaggaggcccctcgtggtgttcaaggacggcttccgcagccggcagtactgcctgatagagtgctcggacatttgcaatcgcatcaaggatgggcaggacggaccctgagacgggccagaggaacaacatgcccaagcccaaagttgttggagcaactgccatggctgcggtgcaggctagatatgggatccggttcttctgccaggcctccagaagcagaacttcagaggcgacaagggtaataaggtacagtaaaccagtcagtaacatataggatccagagacatttgctagcaacaaaatccgagaaaagctgttaagagtgatgcgtagtggtcttgataaccgt

SEQ ID NO: 53612 - DNA, 806 bp, Zea Mays
cttgtgttagcgctggtgattcggcagccagcgaggctgatccgggaccgggtggctggccggtggccacaccagaggtctattatacctggattccgcgaggccacggaccacggtgcgcgcgctcttgtcttgttcctgtgcctgccactgccagtgccaccatctcgccgtcggcgtcggctcgtcgcctgagagccgaggccacgcaggcacccgggccgggggatgtcggcgccggcggcacaggccgtggtggcgctggctctcgcggccatcctctcgaccccggcgccccaggcggacaccttctccaacgtcccgcccacgctctccgggggcgacgggaagcaagagcggatcaagcaccccaggtcggccaaggcgttgcagtgcacgaccaagtgcgtcggcacctgcatccgcggcggcggcggcgcgcccggcgaggggcccctcaacgtcaggaggcccctcgtggtgttcaaggacggcttccgcagccggcagtactgagtgctcggacatttgcaatcgcatcaaggatgggcaggacggaccctgagacgggccagaggaacaacatgcccaagcccaaagttgttggagcaactgccatggctgcggtgcaggctagatatgggatccggttcttctgccaggcctccagaagcagaacttcagaggcgacaagggtaataaggtacagtaaaccagtcagtaacatataggatccagagacatttgctagcaacaaaatccgagaaaagctgttaagagtgatgcgtagtggtcttgataaccgt

SEQ ID NO: 53613 - DNA, 2866 bp, Zea Mays
agtactgagtaagagtgccgttttcatcttttcggccagtaaacccacaagatcctcccctagacccttttcttgtgcatacactaaccattaggtttgaaccaaaaaggcagagacctggtgaggcatctcaaaattctagtgatcctcgaaactttgagctaaaactggaatacatcaaggctttacctactggtcaagaaacagacttcatattggtgtcatgttcaggttctgggattgaatctaacagaagagaacaagttctcaaagccaagaaggctggagaagatgcactgcggaggtcaggccttggatatacaatcgtgcgcccgggtcctctgcaggaagaacctggtggccagcgcgcgctgatcttcgatcaagggaacagaatctcccagggtatcagctgtgctgatgtggctgatatctgtgtcaaggcactgcatgattccactgcgagaaacaaaagtttcgatgtatgctacgagtacgtcagtgaccaagggaacgagctttatgaacttagaatgcaaagcctgaggctgcaagagtggtccggactctggagtactctctctttctctgttgggaaagttggtttcggcctgttctgctgctcaagcagcatacggcagctcacgcctatggtggacaaccaaagattcagtgctctgattcttcttggtttgtctttctccggcagatctctaacgagtagatgttctctcttcttttcttttcttctttttttgaaagcttcactctaacctgaaatcggctttacttaaatttcgagccaacttaatcttcttctttgccaattcttttttaaagaaaagtttgagagatgcctctagttttttttttgggggtgtgtgtttgcgactacagagtctgaaatcacaaatcagagctgtatagggagcaggtggcgactgagtgactgacaaacgtggggaagatggagacaaagaaacgcaagcctgtggtctactaaagacgggggcatcgccatcgagggcaaacggaggccacaggattagcagcttctccgtgctgctgcgtctcctcctcatcgtcctctccagtgtccagctcggccatggcgttcaccgtctccttctcccccgccaacgttcagatgctccaggctaggagtggccacggccacgccacctttggaagctgttccgccgtgccaagagccgggccaaggctgcgttccacggccgtccgggtcagcagcgagcaggaggcggcggcggccgtcagggcgccgtccgggaggaccatcgaggagtgcgaggccgacgccgtcgctgggaagttccctgctcccccgccgctggttaggccgaaggcccctgaaggaacgccggagatcaggccccttgacatggcaaagcgcccccgtcgcaaccgcaaatcacctgctcttagggctgcattccaggagacgagcatctcgcctgctaactttgtgcttccattgtttatccatgaaggagaagaagatgctcctatcggagctatgccagggtgctataggcttgggtggaggcacgggctgcttgacgaggtttacaaggcccgcgatgttggtgttaatagttttgttctctttcctaaagttcccgatgcattgaagtctccaacaggagatgaagcgtacaacgataatggtctggttccacgtacaatccgcttgctcaaggacaagttccctgatattgttatctacacagacgtcgcgttagacccttattcatctgatggtcatgatggtattgtgagggaagatggtgtaattatgaatgatgaaacagtttatcagttgtgcaaacaggctgtttcacaggctcgtgccggtgctgatgttgtcagccctagtgacatgatggatggccggattggagcacttcgctctgctctggacgccgagggcttccatgatgtctccattatgtcctacaccgcaaagtatgccagttcattttatggccctttccgagaagctttagattcaaatccaagatttggagataagaagacgtaccagatgaacccagctaactacagagaagccctcatagaaaccgcagcggacgaggcagaaggagccgacattctgctagtgaaaccgggattgccgtacttggacattatccgactgcttcgggatcattcagccctaccgattgctgcttaccaggtctcgggcgagtactcgatgatcaaagccggcggggccctgggcatggtggacgagcagaaggtgatgatggagtcgctcatgtgcctgcggcgagccggcgccgatgtcatcctgacctacttcgcccgtcacgccgccgcggtgctgtgcggcatggggcccaagtaggaggcgaggcccgcccgccattcctgccctgcactgtcattgtggagttgagcgatgagttggcttatcgtatgttttgggggcctggcactggcagaggattgtccgaggccttggatctcttccaataatctgcgccgggagataataagttttggagttatcgcatttcccggtactaatcttctgcgtgttgctagtactgaaaaaggtttggattttgaagcgattttagacagctggattagtacctcaacgaacgaaggatttcaggggaagcgtgcgtatcattcttgaaggcgtcgcactcccacctcccactcccacgtgatttcacggtggaccctggaacaacctcgattggacagtacactactagctgctcgtggtcatggctcaggactatctatccatctatgcaaatgaactaggtcaaggtacaaaattaattatgcttaattaaaagcctgcgacgag

SEQ ID NO: 53614 - DNA, 4726 bp, Zea Mays
agatggccggctttatcagctgcggcagcgagattcaccgggggaagtatttgcagcgaccgcgccggtccccgccacaaaatcagctacccaccaccgtccgtcagcggcggcggcgagagcatggcggccatcgtggcggcgcgggcgtcggcccccggcagagcggccgtcagcaccatcgccgcgttccacagccacgcgtccccttcccgcgcgctcccgctcgcctcctcctccatcggcggcgccaggcggtaccaccacgcccccgcgtgctgcttcgccaccaagcccaccgcgccggccgctgccgagctcgtcgaccaggacctcgccacggccacgcaggaggccgccaagccacgccggaaacgccggtctcggaaggcgaagaagtccgccaccgccgccaaggaggaggatgggacggacgacaagccggtggcggcggcagaggacgaggcgaaaaggaagaaggaggcggccggcgccgaggacagcgcccgggcattggtggccggcctcgacgacgtgatcgtcaaccccgtgggtctgggtcggcggtcgcggcaggtgttcgacgaggtgtggcgcaagttctcgcggctgggccagatttcgagcgcctcgtccaccgcgctggcggaggaggagcaggccgtgcttatccgtggaggacctatgtgcgagttcactgtgccaggggcgcaggacaccaccgtcctcgtcgtcggtgccaccagccgcatcggccgcatcgtcgtgcgcaagctcatgctccgcggatacaatgtcaaggctttagtaagaagaaacgaccctgaagtgatagatatgctcccaaggtcggtggatgttgttgttggtgatgttggtgatcctgcaactgtcaaagcagctgtatcaggctgcagcaagataatctattgtgcaactgcacgctcaactattacaggagacctaaatagggttgataaccaaggagtaaggaatgctagcaaggctttccaggattactacaacgaattggcccagctcagggctggtaaaagcagcaagagcaaactcctgatagcaaaattcaagtctgcaaagtccttgaagggttgggaggtgcggcagggttcttacttcccaaatacttttgtttctagatttgatgaaggtatcgatgcatcactggatttttcagaagatcagcaggctgttttctcaggatttgtattcacaagaggtggatatgttgagatatcaaaaaggctttctcttcctctaggttctaccctagacaggtacgatggtttactcttttcagtgggaggaaatggaagatcatacgttgttattcttgaaactggtccattggcggacacgacccagagcaagaagtattttgctcggatgactacaaaagtaggtttttgtagggtaagagtgccgttttcatcttttcggccagtaaacccacaagatcctcccctagacccttttcttgtgcatacactaaccattaggtttgaaccaaaaaggcagagacctggtgaggcatctcaaaattctagtgatcctcgaaactttgagctaaaactggaatacatcaaggctttacctactggtcaagaaacagacttcatattggtgtcatgttcaggttctgggattgaatctaacagaagagaacaagttctcaaagccaagaaggctggagaagatgcactgcggaggtcaggccttggatatacaatcgtgcgcccgggtcctctgcaggaagaacctggtggccagcgcgcgctgatcttcgatcaagggaacagaatctcccagggtatcagctgtgctgatgtggctgatatctgtgtcaaggcactgcatgattccactgcgagaaacaaaagtttcgatgtatgctacgagtacgtcagtgaccaagggaacgagctttatgaacttgtggctcatctgccagacaaggctaacaactatctcgcaccagcactgtctgttctagagaagaacacctgattgatgcgcaccatcagactcggacatgtaatatacgagtcatacgacgtgtatattttctcctcctgtaaagccatacgtttttcctatacaagccttgtgtcattcacatggtatgccgtttggcccttctgtaaagatcattgcacagaccgactccaggaaacaaaattttatttttgcaatattgcattgtatgataagttctcctgtccccactccttttcatctaaaactgtaaaagtttgcataatttcaccaagaagaacagtacagtggaaaagaagagaccaatctttgaagcaaaggaagcagtgcacgtgcacctgatgaaatgatggctggtttgctcacaatcttgaaagagaatgcaaagcctgaggctgcaagagtggtccggactctggagtactctctctttctctgttgggaaagttggtttcggcctgttctgctgctcaagcagcatacggcagctcacgcctatggtggacaaccaaagattcagtgctctgattcttcttggtttgtctttctccggcagatctctaacgagtagatgttctctcttcttttcttttcttctttttttgaaagcttcactctaacctgaaatcggctttacttaaatttcgagccaacttaatcttcttctttgccaattcttttttaaagaaaagtttgagagatgcctctagttttttttttgggggtgtgtgtttgcgactacagagtctgaaatcacaaatcagagctgtatagggagcaggtggcgactgagtgactgacaaacgtggggaagatggagacaaagaaacgcaagcctgtggtctactaaagacgggggcatcgccatcgagggcaaacggaggccacaggattagcagcttctccgtgctgctgcgtctcctcctcatcgtcctctccagtgtccagctcggccatggcgttcaccgtctccttctcccccgccaacgttcagatgctccaggctaggagtggccacggccacgccacctttggaagctgttccgccgtgccaagagccgggccaaggctgcgttccacggccgtccgggtcagcagcgagcaggaggcggcggcggccgtcagggcgccgtccgggaggaccatcgaggagtgcgaggccgacgccgtcgctgggaagttccctgctcccccgccgctggttaggccgaaggcccctgaaggaacgccggagatcaggccccttgacatggcaaagcgcccccgtcgcaaccgcaaatcacctgctcttagggctgcattccaggagacgagcatctcgcctgctaactttgtgcttccattgtttatccatgaaggagaagaagatgctcctatcggagctatgccagggtgctataggcttgggtggaggcacgggctgcttgacgaggtttacaaggcccgcgatgttggtgttaatagttttgttctctttcctaaagttcccgatgcattgaagtctccaacaggagatgaagcgtacaacgataatggtctggttccacgtacaatccgcttgctcaaggacaagttccctgatattgttatctacacagacgtcgcgttagacccttattcatctgatggtcatgatggtattgtgagggaagatggtgtaattatgaatgatgaaacagtttatcagttgtgcaaacaggctgtttcacaggctcgtgccggtgctgatgttgtcagccctagtgacatgatggatggccggattggagcacttcgctctgctctggacgccgagggcttccatgatgtctccattatgtcctacaccgcaaagtatgccagttcattttatggccctttccgagaagctttagattcaaatccaagatttggagataagaagacgtaccagatgaacccagctaactacagagaagccctcatagaaaccgcagcggacgaggcagaaggagccgacattctgctagtgaaaccgggattgccgtacttggacattatccgactgcttcgggatcattcagccctaccgattgctgcttaccaggtctcgggcgagtactcgatgatcaaagccggcggggccctgggcatggtggacgagcagaaggtgatgatggagtcgctcatgtgcctgcggcgagccggcgccgatgtcatcctgacctacttcgcccgtcacgccgccgcggtgctgtgcggcatggggcccaagtaggaggcgaggcccgcccgccattcctgccctgcactgtcattgtggagttgagcgatgagttggcttatcgtatgttttgggggcctggcactggcagaggattgtccgaggccttggatctcttccaataatctgcgccgggagataataagttttggagttatcgcatttcccggtactaatcttctgcgtgttgctagtactgaaaaaggtttggattttgaagcgattttagacagctggattagtacctcaacgaacgaaggatttcaggggaagcgtgcgtatcattcttgaaggcgtcgcactcccacctcccactcccacgtgatttcacggtggaccctggaacaacctcgattggacagtacactactagctgctcgtggtcatggctcaggactatctatccatctatgcaaatgaactaggtcaaggtacaaaattaattatgcttaattaaaagcctgcgacgag

SEQ ID NO: 53615 - DNA, 4062 bp, Zea Mays
agatggccggctttatcagctgcggcagcgagattcaccgggggaagtatttgcagcgaccgcgccggtccccgccacaaaatcagctacccaccaccgtccgtcagcggcggcggcgagagcatggcggccatcgtggcggcgcgggcgtcggcccccggcagagcggccgtcagcaccatcgccgcgttccacagccacgcgtccccttcccgcgcgctcccgctcgcctcctcctccatcggcggcgccaggcggtaccaccacgcccccgcgtgctgcttcgccaccaagcccaccgcgccggccgctgccgagctcgtcgaccaggacctcgccacggccacgcaggaggccgccaagccacgccggaaacgccggtctcggaaggcgaagaagtccgccaccgccgccaaggaggaggatgggacggacgacaagccggtggcggcggcagaggacgaggcgaaaaggaagaaggaggcggccggcgccgaggacagcgcccgggcattggtggccggcctcgacgacgtgatcgtcaaccccgtgggtctgggtcggcggtcgcggcaggtgttcgacgaggtgtggcgcaagttctcgcggctgggccagatttcgagcgcctcgtccaccgcgctggcggaggaggagcaggccgtgcttatccgtggaggacctatgtgcgagttcactgtgccaggggcgcaggacaccaccgtcctcgtcgtcggtgccaccagccgcatcggccgcatcgtcgtgcgcaagctcatgctccgcggatacaatgtcaaggctttagtaagaagaaacgaccctgaagtgatagatatgctcccaaggtcggtggatgttgttgttggtgatgttggtgatcctgcaactgtcaaagcagctgtatcaggctgcagcaagataatctattgtgcaactgcacgctcaactattacaggagacctaaatagggttgataaccaaggagattactacaacgaattggcccagctcagggctggtaaaagcagcaagagcaaactcctgatagcaaaattcaagtctgcaaagtccttgaagggttgggaggtgcggcagggttcttacttcccaaatacttttgtttctagatttgatgaaggtatcgatgcatcactggatttttcagaagatcagcaggctgttttctcaggatttgtattcacaagaggtggatatgttgagatatcaaaaaggctttctcttcctctaggttctaccctagacaggtacgatggtttactcttttcagtgggaggaaatggaagatcatacgttgttattcttgaaactggtccattggcggacacgacccagagcaagaagtattttgctcggatgactacaaaagtaggtttttgtagggtaagagtgccgttttcatcttttcggccagtaaacccacaagatcctcccctagacccttttcttgtgcatacactaaccattaggtttgaaccaaaaaggcagagacctggtgaggcatctcaaaattctagtgatcctcgaaactttgagctaaaactggaatacatcaaggctttacctactggtcaagaaacagacttcatattggtgtcatgttcaggttctgggattgaatctaacagaagagaacaagttctcaaagccaagaaggctggagaagatgcactgcggaggtcaggccttggatatacaatcgtgcgcccgggtcctctgcaggaagaacctggtggccagcgcgcgctgatcttcgatcaagggaacagaatctcccagggtatcagctgtgctgatgtggctgatatctgtgtcaaggcactgcatgattccactgcgagaaacaaaagtttcgatgtatgctacgagtacgtcagtgaccaagggaacgagctttatgaacttgtggctcatctgccagacaaggctaacaactatctcgcaccagcactgtctgttctagagaagaacacctgattgatgcgcaccatcagactcggacatagctgtatagggagcaggtggcgactgagtgactgacaaacgtggggaagatggagacaaagaaacgcaagcctgtggtctactaaagacgggggcatcgccatcgagggcaaacggaggccacaggattagcagcttctccgtgctgctgcgtctcctcctcatcgtcctctccagtgtccagctcggccatggcgttcaccgtctccttctcccccgccaacgttcagatgctccaggctaggagtggccacggccacgccacctttggaagctgttccgccgtgccaagagccgggccaaggctgcgttccacggccgtccgggtcagcagcgagcaggaggcggcggcggccgtcagggcgccgtccgggaggaccatcgaggagtgcgaggccgacgccgtcgctgggaagttccctgctcccccgccgctggttaggccgaaggcccctgaaggaacgccggagatcaggccccttgacatggcaaagcgcccccgtcgcaaccgcaaatcacctgctcttagggctgcattccaggagacgagcatctcgcctgctaactttgtgcttccattgtttatccatgaaggagaagaagatgctcctatcggagctatgccagggtgctataggcttgggtggaggcacgggctgcttgacgaggtttacaaggcccgcgatgttggtgttaatagttttgttctctttcctaaagttcccgatgcattgaagtctccaacaggagatgaagcgtacaacgataatggtctggttccacgtacaatccgcttgctcaaggacaagttccctgatattgttatctacacagacgtcgcgttagacccttattcatctgatggtcatgatggtattgtgagggaagatggtgtaattatgaatgatgaaacagtttatcagttgtgcaaacaggctgtttcacaggctcgtgccggtgctgatgttgtcagccctagtgacatgatggatggccggattggagcacttcgctctgctctggacgccgagggcttccatgatgtctccattatgtcctacaccgcaaagtatgccagttcattttatggccctttccgagaagctttagattcaaatccaagatttggagataagaagacgtatggaacttgcaccaagatactacttccatctagtaaacaatttaattgctcggtattaaatgttgtatttctcttgaatctgaaggtaccagatgaacccagctaactacagagaagccctcatagaaaccgcagcggacgaggcagaaggagccgacattctgctagtgaaaccgggattgccgtacttggacattatccgactgcttcgggatcattcagccctaccgattgctgcttaccaggtctcgggcgagtactcgatgatcaaagccggcggggccctgggcatggtggacgagcagaaggtgatgatggagtcgctcatgtgcctgcggcgagccggcgccgatgtcatcctgacctacttcgcccgtcacgccgccgcggtgctgtgcggcatggggcccaagtaggaggcgaggcccgcccgccattcctgccctgcactgtcattgtggagttgagcgatgagttggcttatcgtatgttttgggggcctggcactggcagaggattgtccgaggccttggatctcttccaataatctgcgccgggagataataagttttggagttatcgcatttcccggtactaatcttctgcgtgttgctagtactgaaaaaggtttggattttgaagcgattttagacagctggattagtacctcaacgaacgaaggatttcaggggaagcgtgcgtatcattcttgaaggcgtcgcactcccacctcccactcccacgtgatttcacggtggaccctggaacaacctcgattggacagtacactactagctgctcgtggtcatggctcaggactatctatccatctatgcaaatgaactaggtcaaggtacaaaattaattatgcttaattaaaagcctgcgacgag

SEQ ID NO: 53616 - DNA, 4623 bp, Zea Mays
agatggccggctttatcagctgcggcagcgagattcaccgggggaagtatttgcagcgaccgcgccggtccccgccacaaaatcagctacccaccaccgtccgtcagcggcggcggcgagagcatggcggccatcgtggcggcgcgggcgtcggcccccggcagagcggccgtcagcaccatcgccgcgttccacagccacgcgtccccttcccgcgcgctcccgctcgcctcctcctccatcggcggcgccaggcggtaccaccacgcccccgcgtgctgcttcgccaccaagcccaccgcgccggccgctgccgagctcgtcgaccaggacctcgccacggccacgcaggaggccgccaagccacgccggaaacgccggtctcggaaggcgaagaagtccgccaccgccgccaaggaggaggatgggacggacgacaagccggtggcggcggcagaggacgaggcgaaaaggaagaaggaggcggccggcgccgaggacagcgcccgggcattggtggccggcctcgacgacgtgatcgtcaaccccgtgggtctgggtcggcggtcgcggcaggtgttcgacgaggtgtggcgcaagttctcgcggctgggccagatttcgagcgcctcgtccaccgcgctggcggaggaggagcaggccgtgcttatccgtggaggacctatgtgcgagttcactgtgccaggggcgcaggacaccaccgtcctcgtcgtcggtgccaccagccgcatcggccgcatcgtcgtgcgcaagctcatgctccgcggatacaatgtcaaggctttagtaagaagaaacgaccctgaagtgatagatatgctcccaaggtcggtggatgttgttgttggtgatgttggtgatcctgcaactgtcaaagcagctgtatcaggctgcagcaagataatctattgtgcaactgcacgctcaactattacaggagacctaaatagggttgataaccaaggagtaaggaatgctagcaaggctttccaggattactacaacgaattggcccagctcagggctggtaaaagcagcaagagcaaactcctgatagcaaaattcaagtctgcaaagtccttgaagggttgggaggatttgtattcacaagaggtggatatgttgagatatcaaaaaggctttctcttcctctaggttctaccctagacaggtacgatggtttactcttttcagtgggaggaaatggaagatcatacgttgttattcttgaaactggtccattggcggacacgacccagagcaagaagtattttgctcggatgactacaaaagtaggtttttgtagggtaagagtgccgttttcatcttttcggccagtaaacccacaagatcctcccctagacccttttcttgtgcatacactaaccattaggtttgaaccaaaaaggcagagacctggtgaggcatctcaaaattctagtgatcctcgaaactttgagctaaaactggaatacatcaaggctttacctactggtcaagaaacagacttcatattggtgtcatgttcaggttctgggattgaatctaacagaagagaacaagttctcaaagccaagaaggctggagaagatgcactgcggaggtcaggccttggatatacaatcgtgcgcccgggtcctctgcaggaagaacctggtggccagcgcgcgctgatcttcgatcaagggaacagaatctcccagggtatcagctgtgctgatgtggctgatatctgtgtcaaggcactgcatgattccactgcgagaaacaaaagtttcgatgtatgctacgagtacgtcagtgaccaagggaacgagctttatgaacttgtggctcatctgccagacaaggctaacaactatctcgcaccagcactgtctgttctagagaagaacacctgattgatgcgcaccatcagactcggacatgtaatatacgagtcatacgacgtgtatattttctcctcctgtaaagccatacgtttttcctatacaagccttgtgtcattcacatggtatgccgtttggcccttctgtaaagatcattgcacagaccgactccaggaaacaaaattttatttttgcaatattgcattgtatgataagttctcctgtccccactccttttcatctaaaactgtaaaagtttgcataatttcaccaagaagaacagtacagtggaaaagaagagaccaatctttgaagcaaaggaagcagtgcacgtgcacctgatgaaatgatggctggtttgctcacaatcttgaaagagaatgcaaagcctgaggctgcaagagtggtccggactctggagtactctctctttctctgttgggaaagttggtttcggcctgttctgctgctcaagcagcatacggcagctcacgcctatggtggacaaccaaagattcagtgctctgattcttcttggtttgtctttctccggcagatctctaacgagtagatgttctctcttcttttcttttcttctttttttgaaagcttcactctaacctgaaatcggctttacttaaatttcgagccaacttaatcttcttctttgccaattcttttttaaagaaaagtttgagagatgcctctagttttttttttgggggtgtgtgtttgcgactacagagtctgaaatcacaaatcagagctgtatagggagcaggtggcgactgagtgactgacaaacgtggggaagatggagacaaagaaacgcaagcctgtggtctactaaagacgggggcatcgccatcgagggcaaacggaggccacaggattagcagcttctccgtgctgctgcgtctcctcctcatcgtcctctccagtgtccagctcggccatggcgttcaccgtctccttctcccccgccaacgttcagatgctccaggctaggagtggccacggccacgccacctttggaagctgttccgccgtgccaagagccgggccaaggctgcgttccacggccgtccgggtcagcagcgagcaggaggcggcggcggccgtcagggcgccgtccgggaggaccatcgaggagtgcgaggccgacgccgtcgctgggaagttccctgctcccccgccgctggttaggccgaaggcccctgaaggaacgccggagatcaggccccttgacatggcaaagcgcccccgtcgcaaccgcaaatcacctgctcttagggctgcattccaggagacgagcatctcgcctgctaactttgtgcttccattgtttatccatgaaggagaagaagatgctcctatcggagctatgccagggtgctataggcttgggtggaggcacgggctgcttgacgaggtttacaaggcccgcgatgttggtgttaatagttttgttctctttcctaaagttcccgatgcattgaagtctccaacaggagatgaagcgtacaacgataatggtctggttccacgtacaatccgcttgctcaaggacaagttccctgatattgttatctacacagacgtcgcgttagacccttattcatctgatggtcatgatggtattgtgagggaagatggtgtaattatgaatgatgaaacagtttatcagttgtgcaaacaggctgtttcacaggctcgtgccggtgctgatgttgtcagccctagtgacatgatggatggccggattggagcacttcgctctgctctggacgccgagggcttccatgatgtctccattatgtcctacaccgcaaagtatgccagttcattttatggccctttccgagaagctttagattcaaatccaagatttggagataagaagacgtaccagatgaacccagctaactacagagaagccctcatagaaaccgcagcggacgaggcagaaggagccgacattctgctagtgaaaccgggattgccgtacttggacattatccgactgcttcgggatcattcagccctaccgattgctgcttaccaggtctcgggcgagtactcgatgatcaaagccggcggggccctgggcatggtggacgagcagaaggtgatgatggagtcgctcatgtgcctgcggcgagccggcgccgatgtcatcctgacctacttcgcccgtcacgccgccgcggtgctgtgcggcatggggcccaagtaggaggcgaggcccgcccgccattcctgccctgcactgtcattgtggagttgagcgatgagttggcttatcgtatgttttgggggcctggcactggcagaggattgtccgaggccttggatctcttccaataatctgcgccgggagataataagttttggagttatcgcatttcccggtactaatcttctgcgtgttgctagtactgaaaaaggtttggattttgaagcgattttagacagctggattagtacctcaacgaacgaaggatttcaggggaagcgtgcgtatcattcttgaaggcgtcgcactcccacctcccactcccacgtgatttcacggtggaccctggaacaacctcgattggacagtacactactagctgctcgtggtcatggctcaggactatctatccatctatgcaaatgaactaggtcaaggtacaaaattaattatgcttaattaaaagcctgcgacgag

SEQ ID NO: 53617 - DNA, 4305 bp, Zea Mays
ccccaccgagctggctggcccgtgcgccagcccgcgcagcaaccgcagccacagatggagcccccgcacggcagccactcagatggccggctttatcagctgcggcagcgagattcaccgggggaagtatttgcagcgaccgcgccggtccccgccacaaaatcagctacccaccaccgtccgtcagcggcggcggcgagagcatggcggccatcgtggcggcgcgggcgtcggcccccggcagagcggccgtcagcaccatcgccgcgttccacagccacgcgtccccttcccgcgcgctcccgctcgcctcctcctccatcggcggcgccaggcggtaccaccacgcccccgcgtgctgcttcgccaccaagcccaccgcgccggccgctgccgagctcgtcgaccaggacctcgccacggccacgcaggaggccgccaagccacgccggaaacgccggtctcggaaggcgaagaagtccgccaccgccgccaaggaggaggatgggacggacgacaagccggtggcggcggcagaggacgaggcgaaaaggaagaaggaggcggccggcgccgaggacagcgcccgggcattggtggccggcctcgacgacgtgatcgtcaaccccgtgggtctgggtcggcggtcgcggcaggtgttcgacgaggtgtggcgcaagttctcgcggctgggccagatttcgagcgcctcgtccaccgcgctggcggaggaggagcaggccgtgcttatccgtggaggacctatgtgcgagttcactgtgccaggggcgcaggacaccaccgtcctcgtcgtcggtgccaccagccgcatcggccgcatcgtcgtgcgcaagctcatgctccgcggatacaatgtcaaggctttagtaagaagaaacgaccctgaagtgatagatatgctcccaaggtcggtggatgttgttgttggtgatgttggtgatcctgcaactgtcaaagcagctgtatcaggctgcagcaagataatctattgtgcaactgcacgctcaactattacaggagacctaaatagggttgataaccaaggagtaaggaatgctagcaaggctttccaggattactacaacgaattggcccagctcagggctggtaaaagcagcaagagcaaactcctgatagcaaaattcaagtctgcaaagtccttgaagggttgggaggtgcggcagggttcttacttcccaaatacttttgtttctagatttgatgaaggtatcgatgcatcactggatttttcagaagatcagcaggctgttttctcaggtagcaccttcagttttgtagcttttatgacatgattcccgtttttaaataaaataaagctaaaaaaactatatacttcatgtacctctgttttgcttttatttgaatgtcatagatttcttatggaacttccttattttcaggatttgtattcacaagaggtggatatgttgagatatcaaaaaggctttctcttcctctaggttctaccctagacaggtacgatggtttactcttttcagtgggaggaaatggaagatcatacgttgttattcttgaaactggtccattggcggacacgacccagagcaagaagtattttgctcggatgactacaaaagtaggtttttgtagggtaagagtgccgttttcatcttttcggccagtaaacccacaagatcctcccctagacccttttcttgtgcatacactaaccattaggtttgaaccaaaaaggcagagacctggtgaggcatctcaaaattctagtgatcctcgaaactttgagctaaaactggaatacatcaaggctttacctactggtcaagaaacagacttcatattggtgtcatgttcaggttctgggattgaatctaacagaagagaacaagttctcaaagccaagaaggctggagaagatgcactgcggaggtcaggccttggatatacaatcgtgcgcccgggtcctctgcaggaagaacctggtggccagcgcgcgctgatcttcgatcaagggaacagaatctcccagggtatcagctgtgctgatgtggctgatatctgtgtcaaggcactgcatgattccactgcgagaaacaaaagtttcgatgtatgctacgagtacgtcagtgaccaagggaacgagctttatgaacttagaatgcaaagcctgaggctgcaagagtggtccggactctggagtactctctctttctctgttgggaaagttggtttcggcctgttctgctgctcaagcagcatacggcagctcacgcctatggtggacaaccaaagattcagtgctctgattcttcttgagtctgaaatcacaaatcagagctgtatagggagcaggtggcgactgagtgactgacaaacgtggggaagatggagacaaagaaacgcaagcctgtggtctactaaagacgggggcatcgccatcgagggcaaacggaggccacaggattagcagcttctccgtgctgctgcgtctcctcctcatcgtcctctccagtgtccagctcggccatggcgttcaccgtctccttctcccccgccaacgttcagatgctccaggctaggagtggccacggccacgccacctttggaagctgttccgccgtgccaagagccgggccaaggctgcgttccacggccgtccgggtcagcagcgagcaggaggcggcggcggccgtcagggcgccgtccgggaggaccatcgaggagtgcgaggccgacgccgtcgctgggaagttccctgctcccccgccgctggttaggccgaaggcccctgaaggaacgccggagatcaggccccttgacatggcaaagcgcccccgtcgcaaccgcaaatcacctgctcttagggctgcattccaggagacgagcatctcgcctgctaactttgtgcttccattgtttatccatgaaggagaagaagatgctcctatcggagctatgccagggtgctataggcttgggtggaggcacgggctgcttgacgaggtttacaaggcccgcgatgttggtgttaatagttttgttctctttcctaaagttcccgatgcattgaagtctccaacaggagatgaagcgtacaacgataatggtctggttccacgtacaatccgcttgctcaaggacaagttccctgatattgttatctacacagacgtcgcgttagacccttattcatctgatggtcatgatggtattgtgagggaagatggtgtaattatgaatgatgaaacagtttatcagttgtgcaaacaggctgtttcacaggctcgtgccggtgctgatgttgtcagccctagtgacatgatggatggccggattggagcacttcgctctgctctggacgccgagggcttccatgatgtctccattatgtcctacaccgcaaagtatgccagttcattttatggccctttccgagaagctttagattcaaatccaagatttggagataagaagacgtaccagatgaacccagctaactacagagaagccctcatagaaaccgcagcggacgaggcagaaggagccgacattctgctagtgaaaccgggattgccgtacttggacattatccgactgcttcgggatcattcagccctaccgattgctgcttaccaggtctcgggcgagtactcgatgatcaaagccggcggggccctgggcatggtggacgagcagaaggtgatgatggagtcgctcatgtgcctgcggcgagccggcgccgatgtcatcctgacctacttcgcccgtcacgccgccgcggtgctgtgcggcatggggcccaagtaggaggcgaggcccgcccgccattcctgccctgcactgtcattgtggagttgagcgatgagttggcttatcgtatgttttgggggcctggcactggcagaggattgtccgaggccttggatctcttccaataatctgcgccgggagataataagttttggagttatcgcatttcccggtactaatcttctgcgtgttgctagtactgaaaaaggtttggattttgaagcgattttagacagctggattagtacctcaacgaacgaaggatttcaggggaagcgtgcgtatcattcttgaaggcgtcgcactcccacctcccactcccacgtgatttcacggtggaccctggaacaacctcgattggacagtacactactagctgctcgtggtcatggctcaggactatctatccatctatgcaaatgaactaggtcaaggtacaaaattaattatgcttaattaaaagcctgcgacgag

SEQ ID NO: 53618 - DNA, 2316 bp, Zea Mays
agatggccggctttatcagctgcggcagcgagattcaccgggggaagtatttgcagcgaccgcgccggtccccgccacaaaatcagctacccaccaccgtccgtcagcggcggcggcgagagcatggcggccatcgtggcggcgcgggcgtcggcccccggcagagcggccgtcagcaccatcgccgcgttccacagccacgcgtccccttcccgcgcgctcccgctcgcctcctcctccatcggcggcgccaggcggtaccaccacgcccccgcgtgctgcttcgccaccaagcccaccgcgccggccgctgccgagctcgtcgaccaggacctcgccacggccacgcaggaggccgccaagccacgccggaaacgccggtctcggaaggcgaagaagtccgccaccgccgccaaggaggaggatgggacggacgacaagccggtggcggcggcagaggacgaggcgaaaaggaagaaggaggcggccggcgccgaggacagcgcccgggcattggtggccggcctcgacgacgtgatcgtcaaccccgtgggtctgggtcggcggtcgcggcaggtgttcgacgaggtgtggcgcaagttctcgcggctgggccagatttcgagcgcctcgtccaccgcgctggcggaggaggagcaggccgtgcttatccgtggaggacctatgtgcgagttcactgtgccaggggcgcaggacaccaccgtcctcgtcgtcggtgccaccagccgcatcggccgcatcgtcgtgcgcaagctcatgctccgcggatacaatgtcaaggctttagtaagaagaaacgaccctgaagtgatagatatgctcccaaggtcggtggatgttgttgttggtgatgttggtgatcctgcaactgtcaaagcagctgtatcaggctgcagcaagataatctattgtgcaactgcacgctcaactattacaggagacctaaatagggttgataaccaaggagattactacaacgaattggcccagctcagggctggtaaaagcagcaagagcaaactcctgatagcaaaattcaagtctgcaaagtccttgaagggttgggaggtgcggcagggttcttacttcccaaatacttttgtttctagatttgatgaaggtatcgatgcatcactggatttttcagaagatcagcaggctgttttctcaggatttgtattcacaagaggtggatatgttgagatatcaaaaaggctttctcttcctctaggttctaccctagacaggtacgatggtttactcttttcagtgggaggaaatggaagatcatacgttgttattcttgaaactggtccattggcggacacgacccagagcaagaagtattttgctcggatgactacaaaagtaggtttttgtagggtaagagtgccgttttcatcttttcggccagtaaacccacaagatcctcccctagacccttttcttgtgcatacactaaccattaggtttgaaccaaaaaggcagagacctggtgaggcatctcaaaattctagtgatcctcgaaactttgagctaaaactggaatacatcaaggctttacctactggtcaagaaacagacttcatattggtgtcatgttcaggttctgggattgaatctaacagaagagaacaagttctcaaagccaagaaggctggagaagatgcactgcggaggtcaggccttggatatacaatcgtgcgcccgggtcctctgcaggaagaacctggtggccagcgcgcgctgatcttcgatcaagggaacagaatctcccagggtatcagctgtgctgatgtggctgatatctgtgtcaaggcactgcatgattccactgcgagaaacaaaagtttcgatgtatgctacgagtacgtcagtgaccaagggaacgagctttatgaacttgtggctcatctgccagacaaggctaacaactatctcgcaccagcactgtctgttctagagaagaacacctgattgatgcgcaccatcagactcggacatgtaatatacgagtcatacgacgtgtatattttctcctcctgtaaagccatacgtttttcctatacaagccttgtgtcattcacatggtatgccgtttggcccttctgtaaagatcattgcacagaccgactccaggaaacaaaattttatttttgcaatattgcattgtatgataagttctcctgtccccactccttttcatctaaaactgtaaaagtttgcataatttcaccaagaagaacagtacagtggaaaagaagagaccaatctttgaagcaaaggaagcagtgc

SEQ ID NO: 53619 - DNA, 3195 bp, Zea Mays
agacaacacagtttgtaaagtgtaaatttggaagccactattgatataaagcttcctagaagaagtttgcttgttcaatttacatgcaatgcatgtggtgaaaggaccaagcgcttgataaatagagtagcctatgaaagagggacaatttttcttcagtgtgcagggtgccaggtgtaccacaagtttgttgataatcttggtctagttgttgagtatgatctacgagaggaaaatgtggtacaaggagaaaatgtgattgatactaattctgaagattgatctgttgtgagaagcagtgttggtatgcaaaacatcctgttgtagcctgttgtctgaatgtctgtaggttttgacaatattgattatttatataaaatgacattttagttgctgcatatactcatctgaatacatgggggcctagatgtattttatagtgtgatatatggttttatgaaggaaacaaaggatcacgatactagagtaccctgcatttccaaaaaagacctgtcattaatatgggaccaatacatttttagcagattattctggctcttgtgatatggtactaatatttgatatgcacactactttgcaccattattggcctgcatcattgagattttgatcaactggggcaattttgtagtcatcaccttcgctatccttggcatcacccttctttcccttgaggaaccgaataaggcccggtgtcgtcattcctcataagcacttctgagatctctgttggagtcagcatcacctccttaggtcaatgcttgtttaccagtacacgagaaaatggaagctggatgcttctttaccaatacaccagcatttacagaaccactaggagcaacagcagcatactatgtcaaaaaccaacatgagacgccggcatggtttggacttgaatggtctctcctactgttacgcgatgaaagtatgctatcaggatgaagaatgcatgactggaacaaggaaggaacgcagcttcatggagtggttagggtgggttccgtcaaatgacactgttctcacagaatcacaagcaggggccgttggatgtctgcacttcgcagcagcaacaggatgacgatgacgaggatgcccgtgaatgcaggtggcagtgcaaatgtgcggtttcctgaaagcgaaaaaaaagggtggtgtttcgagtggcctccagtacaaagaccgcacagagcgagtggagattttggagaaagaagatttgtcggagtgggatacggaagcactgcccgattccagatctggcaggacgcaagggcactctggtctggtctggcaggataaatatacgatgatggtggtgcactggtgctgcgtcttttgcatatttattatgcaaatagcaacactaacataaaaaaaagatagaaaaaagaagattaaacccaaagtttggtctctggtagcctagtctgcgctgagctggtagtggtaaagtgataaaacaagcagtgaaatactaactttgtgcaggacaaaaaaaaagattcaatagcactggcctgaatggaaagatgaaaaagatagaaaagaaaagaagattcatcagtggtggtgctggctgcagtatcaaatattccctgacccaacatgctgggcgccccggattccagaacaggcacagtgggctctcctccgctacagcagcagcgacaacgcacctccttattttccttttttttttttttttttttgccccaacccacctcgttcggtcgcttttctttgctagtggaagtggattggttgattgatcgcacagaagaagaattcacacccacacacacagaccgagctgccgtccgctgctctctccacccctcctctcctcgcggaacaggcaggcaggcaggctgggattccccgtccgcggggggaggtggcattcgccgctagggcaggacggggaaggctggcgtccggcatggcgaccgaggaggtactccataaggtccagagtcttatattgcgctgccttcagatgtacatggaccagaaagaagtggtcgatgccctctcccaccactcgaagatagagccctgcattactgaacttgtttggcgacaacttgagcatcaaaatcctctgtttttcaaggcgtactatatgagactaatgcttaagaatcaaataatggtcttcaacaagcttcttcaggatcagtttgaggttatcaataaagaattttcttcagggatcccttctatgtcgcttcctaatggctctaactccaacctattgaagcaaaatccatgctttttgccagagactgctcctggatctgcaatgccagatggtataatgcacaatggaagttcgcgtggtataataaatggcacaccatctggcgatcaattgctcaatgctagtaaagacttgcatggccttcataatggaatagatgcttcgactagtctgcagtcagaccagaacgcagctgctgtgctgtatggtgtagacaacgagacaagtgcaacgataaagaccgagtcttgctattcgagcaatgctgattttgctttctgtgggaatactttcctggaatcgtgccagtcaataggcgatgcatctggtggtggatccttcagtagctcagagctgaacgggcaaccactaaacgattcaattctggatatggaatcatcgtcatttagcttcttgaaccaaatgccccaaagcttcatctttccggacttgggagacgatttcaaccaaagtgcagagataacacaatttctcaccccggaaacaaatttctccgattcgacagggggagaccatacaggttgagcggggtcatgcacagcgcaccaaccatttgtacatacgctcatgggcagtcaaacctgcactgatgaagagcttgaggaccttttgatctagctgtttcttttttctactcttctcgtcttatattgtggtagtttatgggttggtcttctggtatgccctgcgatggcgtcgttatcgtgccttgtacattgccgtgcttgtgtaagaaacattaggagcggcgttgttcgcgtcagcattgatttggctaattcctccgcttggcttggcttgtacaacgaattttatcaaaatattaactggattctgaaatcgagattttcgaccatcggtttgtgctattgtgtatgctgcttccaactatc

SEQ ID NO: 53620 - DNA, 3289 bp, Zea Mays
ggcggaaccaaagccggcccacgctgctcgcctgctccggcgaccgccctccgcctccgccctgagtgacatcccctgcgaccagccgctcgccggcggtgttcgcgcttcgccggcacgccggcgtgcgccctcgtgtgccgtggctgctgcgtgccttgtccaccgaggtgactggtgagatctcgctcttcctttatcctcgcctcctcggtccaagtaggagtcggcggctatggcgacgacggccgcggggtacggctgttgcttggcggggctaccgccctttccgttgttgcctgggatcctctcgacccgcctgcgccgggagccttctcctcctcgcgtggcccttgtggcctcctccccgaagctcagggcgccggcaccgcggttgagagtttcgtgcggtccaaggaggctcgcttcctcctctggcaaggccaattcggacgcggtgccgtcgccaacggaagccactattgatataaagcttcctagaagaagtttgcttgttcaatttacatgcaatgcatgtggtgaaaggaccaagcgcttgataaatagagtagcctatgaaagagggacaatttttcttcagtgtgcagggtgccaggtgtaccacaagtttgttgataatcttggtctagttgttgagtatgatctacgagaggaaaatgtggtacaaggagaaaatgtgattgatactaattctgaagattgatctgttgtgagaagcagtgttgtcatcaccttcgctatccttggcatcacccttctttcccttgaggaaccgaataaggcccggtgtcgtcattcctcataagcacttctgagatctctgttggagtcagcatcacctccttaggtcaatgcttgtttaccagtacacgagaaaatggaagctggatgcttctttaccaatacaccagcatttacagaaccactaggagcaacagcagcatactatgtcaaaaaccaacatgagacgccggcatggtttggacttgaatggtctctcctactgttacgcgatgaaagtatgctatcaggatgaagaatgcatgactggaacaaggaaggaacgcagcttcatggagtggttagggtgggttccgtcaaatgacactgttctcacagaatcacaagcaggggccgttggatgtctgcacttcgcagcagcaacaggatgacgatgacgaggatgcccgtgaatgcaggtggcagtgcaaatgtgcggtttcctgaaagcgaaaaaaaagggtggtgtttcgagtggcctccagtacaaagaccgcacagagcgagtggagattttggagaaagaagatttgtcggagtgggatacggaagcactgcccgattccagatctggcaggacgcaagggcactctggtctggtctggcaggataaatatacgatgatggtggtgcactggtgctgcgtcttttgcatatttattatgcaaatagcaacactaacataaaaaaaagatagaaaaaagaagattaaacccaaagtttggtctctggtagcctagtctgcgctgagctggtagtggtaaagtgataaaacaagcagtgaaatactaactttgtgcaggacaaaaaaaaagattcaatagcactggcctgaatggaaagatgaaaaagatagaaaagaaaagaagattcatcagtggtggtgctggctgcagtatcaaatattccctgacccaacatgctgggcgccccggattccagaacaggcacagtgggctctcctccgctacagcagcagcgacaacgcacctccttattttccttttttttttttttttttttgccccaacccacctcgttcggtcgcttttctttgctagtggaagtggattggttgattgatcgcacagaagaagaattcacacccacacacacagaccgagctgccgtccgctgctctctccacccctcctctcctcgcggaacaggcaggcaggcaggctgggattccccgtccgcggggggaggtggcattcgccgctagggcaggacggggaaggctggcgtccggcatggcgaccgaggaggtactccataaggtccagagtcttatattgcgctgccttcagatgtacatggaccagaaagaagtggtcgatgccctctcccaccactcgaagatagagccctgcattactgaacttgtttggcgacaacttgagcatcaaaatcctctgtttttcaaggcgtactatatgagactaatgcttaagaatcaaataatggtcttcaacaagcttcttcaggatcagtttgaggttatcaataaagaattttcttcagggatcccttctatgtcgcttcctaatggctctaactccaacctattgaagcaaaatccatgctttttgccagagactgctcctggatctgcaatgccagatggtataatgcacaatggaagttcgcgtggtataataaatggcacaccatctggcgatcaattgctcaatgctagtaaagacttgcatggccttcataatggaatagatgcttcgactagtctgcagtcagaccagaacgcagctgctgtgctgtatggtgtagacaacgagacaagtgcaacgataaagaccgagtcttgctattcgagcaatgctgattttgctttctgtgggaatactttcctggaatcgtgccagtcaataggcgatgcatctggtggtggatccttcagtagctcagagctgaacgggcaaccactaaacgattcaattctggatatggaatcatcgtcatttagcttcttgaaccaaatgccccaaagcttcatctttccggacttgggagacgatttcaaccaaagtgcagagataacacaatttctcaccccggaaacaaatttctccgattcgacagggggagaccatacaggttgagcggggtcatgcacagcgcaccaaccatttgtacatacgctcatgggcagtcaaacctgcactgatgaagagcttgaggaccttttgatctagctgtttcttttttctactcttctcgtcttatattgtggtagtttatgggttggtcttctggtatgccctgcgatggcgtcgttatcgtgccttgtacattgccgtgcttgtgtaagaaacattaggagcggcgttgttcgcgtcagcattgatttggctaattcctccgcttggcttggcttgtacaacgaattttatcaaaatattaactggattctgaaatcgagattttcgaccatcggtttgtgctattgtgtatgctgcttccaactatc

SEQ ID NO: 53621 - DNA, 3640 bp, Zea Mays
ggcggaaccaaagccggcccacgctgctcgcctgctccggcgaccgccctccgcctccgccctgagtgacatcccctgcgaccagccgctcgccggcggtgttcgcgcttcgccggcacgccggcgtgcgccctcgtgtgccgtggctgctgcgtgccttgtccaccgaggtgactggtgagatctcgctcttcctttatcctcgcctcctcggtccaagtaggagtcggcggctatggcgacgacggccgcggggtacggctgttgcttggcggggctaccgccctttccgttgttgcctgggatcctctcgacccgcctgcgccgggagccttctcctcctcgcgtggcccttgtggcctcctccccgaagctcagggcgccggcaccgcggttgagagtttcgtgcggtccaaggaggctcgcttcctcctctggcaaggccaattcggacgcggtgccgtcgccaacggaagccactattgatataaagcttcctagaagaagtttgcttgttcaatttacatgcaatgcatgtggtgaaaggaccaagcgcttgataaatagagtagcctatgaaagagggacaatttttcttcagtgtgcagggtgccaggtgtaccacaagtttgttgataatcttggtctagttgttgagtatgatctacgagaggaaaatgtggtacaaggagaaaatgtgattgatactaattctgaagattgatctgttgtgagaagcagtgttggtatgcaaaacatcctgttgtagcctgttgtctgaatgtctgtaggttttgacaatattgattatttatataaaatgacattttagttgctgcatatactcatctgaatacatgggggcctagatgtattttatagtgtgatatatggttttatgaaggaaacaaaggatcacgatactagagtaccctgcatttccaaaaaagacctgtcattaatatgggaccaatacatttttagcagattattctggctcttgtgatatggtactaatatttgatatgcacactactttgcaccattattggcctgcatcattgagattttgatcaactggggcaattttgtagtcatcaccttcgctatccttggcatcacccttctttcccttgaggaaccgaataaggcccggtgtcgtcattcctcataagcacttctgagatctctgttggagtcagcatcacctccttaggtcaatgcttgtttaccagtacacgagaaaatggaagctggatgcttctttaccaatacaccagcatttacagaaccactaggagcaacagcagcatactatgtcaaaaaccaacatgagacgccggcatggtttggacttgaatggtctctcctactgttacgcgatgaaagtatgctatcaggatgaagaatgcatgactggaacaaggaaggaacgcagcttcatggagtggttagggtgggttccgtcaaatgacactgttctcacagaatcacaagcaggggccgttggatgtctgcacttcgcagcagcaacaggatgacgatgacgaggatgcccgtgaatgcaggtggcagtgcaaatgtgcggtttcctgaaagcgaaaaaaaagggtggtgtttcgagtggcctccagtacaaagaccgcacagagcgagtggagattttggagaaagaagatttgtcggagtgggatacggaagcactgcccgattccagatctggcaggacgcaagggcactctggtctggtctggcaggataaatatacgatgatggtggtgcactggtgctgcgtcttttgcatatttattatgcaaatagcaacactaacataaaaaaaagatagaaaaaagaagattaaacccaaagtttggtctctggtagcctagtctgcgctgagctggtagtggtaaagtgataaaacaagcagtgaaatactaactttgtgcaggacaaaaaaaaagattcaatagcactggcctgaatggaaagatgaaaaagatagaaaagaaaagaagattcatcagtggtggtgctggctgcagtatcaaatattccctgacccaacatgctgggcgccccggattccagaacaggcacagtgggctctcctccgctacagcagcagcgacaacgcacctccttattttccttttttttttttttttttttgccccaacccacctcgttcggtcgcttttctttgctagtggaagtggattggttgattgatcgcacagaagaagaattcacacccacacacacagaccgagctgccgtccgctgctctctccacccctcctctcctcgcggaacaggcaggcaggcaggctgggattccccgtccgcggggggaggtggcattcgccgctagggcaggacggggaaggctggcgtccggcatggcgaccgaggaggtactccataaggtccagagtcttatattgcgctgccttcagatgtacatggaccagaaagaagtggtcgatgccctctcccaccactcgaagatagagccctgcattactgaacttgtttggcgacaacttgagcatcaaaatcctctgtttttcaaggcgtactatatgagactaatgcttaagaatcaaataatggtcttcaacaagcttcttcaggatcagtttgaggttatcaataaagaattttcttcagggatcccttctatgtcgcttcctaatggctctaactccaacctattgaagcaaaatccatgctttttgccagagactgctcctggatctgcaatgccagatggtataatgcacaatggaagttcgcgtggtataataaatggcacaccatctggcgatcaattgctcaatgctagtaaagacttgcatggccttcataatggaatagatgcttcgactagtctgcagtcagaccagaacgcagctgctgtgctgtatggtgtagacaacgagacaagtgcaacgataaagaccgagtcttgctattcgagcaatgctgattttgctttctgtgggaatactttcctggaatcgtgccagtcaataggcgatgcatctggtggtggatccttcagtagctcagagctgaacgggcaaccactaaacgattcaattctggatatggaatcatcgtcatttagcttcttgaaccaaatgccccaaagcttcatctttccggacttgggagacgatttcaaccaaagtgcagagataacacaatttctcaccccggaaacaaatttctccgattcgacagggggagaccatacagcaggttgagcggggtcatgcacagcgcaccaaccatttgtacatacgctcatgggcagtcaaacctgcactgatgaagagcttgaggaccttttgatctagctgtttcttttttctactcttctcgtcttatattgtggtagtttatgggttggtcttctggtatgccctgcgatggcgtcgttatcgtgccttgtacattgccgtgcttgtgtaagaaacattaggagcggcgttgttcgcgtcagcattgatttggctaattcctccgcttggcttggcttgtacaacgaattttatcaaaatattaactggattctgaaatcgagattttcgaccatcggtttgtgctattgtgtatgctgcttccaactatc

SEQ ID NO: 53622 - DNA, 3721 bp, Zea Mays
ggcggaaccaaagccggcccacgctgctcgcctgctccggcgaccgccctccgcctccgccctgagtgacatcccctgcgaccagccgctcgccggcggtgttcgcgcttcgccggcacgccggcgtgcgccctcgtgtgccgtggctgctgcgtgccttgtccaccgaggtgactggtgagatctcgctcttcctttatcctcgcctcctcggtccaagtaggagtcggcggctatggcgacgacggccgcggggtacggctgttgcttggcggggctaccgccctttccgttgttgcctgggatcctctcgacccgcctgcgccgggagccttctcctcctcgcgtggcccttgtggcctcctccccgaagctcagggcgccggcaccgcggttgagagtttcgtgcggtccaaggaggctcgcttcctcctctggcaaggccaattcggacgcggtgccgtcgccaacggaagccactattgatataaagcttcctagaagaagtttgcttgttcaatttacatgcaatgcatgtggtgaaaggaccaagcgcttgataaatagagtagcctatgaaagagggacaatttttcttcagtgtgcagggtgccaggtgtaccacaagtttgttgataatcttggtctagttgttgagtatgatctacgagaggaaaatgtggtacaaggagaaaatgtgattgatactaattctgaagattgatctgttgtgagaagcagtgttggtatgcaaaacatcctgttgtagcctgttgtctgaatgtctgtaggttttgacaatattgattatttatataaaatgacattttagttgctgcatatactcatctgaatacatgggggcctagatgtattttatagtgtgatatatggttttatgaaggaaacaaaggatcacgatactagagtaccctgcatttccaaaaaagacctgtcattaatatgggaccaatacatttttagcagattattctggctcttgtgatatggtactaatatttgatatgcacactactttgcaccattattggcctgcatcattgagattttgatcaactggggcaattttgtagtcatcaccttcgctatccttggcatcacccttctttcccttgaggaaccgaataaggcccggtgtcgtcattcctcataagcacttctgagatctctgttggagtcagcatcacctccttaggtcaatgcttgtttaccagtacacgagaaaatggaagctggatgcttctttaccaatacaccagcatttacagaaccactaggagcaacagcagcatactatgtcaaaaaccaagagcacggtcatgtccaacgtggttctgggtggtttgtgcaacctgaagctgactgggggacctcctttgctccttgtgctagacatgagacgccggcatggtttggacttgaatggtctctcctactgttacgcgatgaaagtatgctatcaggatgaagaatgcatgactggaacaaggaaggaacgcagcttcatggagtggttagggtgggttccgtcaaatgacactgttctcacagaatcacaagcaggggccgttggatgtctgcacttcgcagcagcaacaggatgacgatgacgaggatgcccgtgaatgcaggtggcagtgcaaatgtgcggtttcctgaaagcgaaaaaaaagggtggtgtttcgagtggcctccagtacaaagaccgcacagagcgagtggagattttggagaaagaagatttgtcggagtgggatacggaagcactgcccgattccagatctggcaggacgcaagggcactctggtctggtctggcaggataaatatacgatgatggtggtgcactggtgctgcgtcttttgcatatttattatgcaaatagcaacactaacataaaaaaaagatagaaaaaagaagattaaacccaaagtttggtctctggtagcctagtctgcgctgagctggtagtggtaaagtgataaaacaagcagtgaaatactaactttgtgcaggacaaaaaaaaagattcaatagcactggcctgaatggaaagatgaaaaagatagaaaagaaaagaagattcatcagtggtggtgctggctgcagtatcaaatattccctgacccaacatgctgggcgccccggattccagaacaggcacagtgggctctcctccgctacagcagcagcgacaacgcacctccttattttccttttttttttttttttttttgccccaacccacctcgttcggtcgcttttctttgctagtggaagtggattggttgattgatcgcacagaagaagaattcacacccacacacacagaccgagctgccgtccgctgctctctccacccctcctctcctcgcggaacaggcaggcaggcaggctgggattccccgtccgcggggggaggtggcattcgccgctagggcaggacggggaaggctggcgtccggcatggcgaccgaggaggtactccataaggtccagagtcttatattgcgctgccttcagatgtacatggaccagaaagaagtggtcgatgccctctcccaccactcgaagatagagccctgcattactgaacttgtttggcgacaacttgagcatcaaaatcctctgtttttcaaggcgtactatatgagactaatgcttaagaatcaaataatggtcttcaacaagcttcttcaggatcagtttgaggttatcaataaagaattttcttcagggatcccttctatgtcgcttcctaatggctctaactccaacctattgaagcaaaatccatgctttttgccagagactgctcctggatctgcaatgccagatggtataatgcacaatggaagttcgcgtggtataataaatggcacaccatctggcgatcaattgctcaatgctagtaaagacttgcatggccttcataatggaatagatgcttcgactagtctgcagtcagaccagaacgcagctgctgtgctgtatggtgtagacaacgagacaagtgcaacgataaagaccgagtcttgctattcgagcaatgctgattttgctttctgtgggaatactttcctggaatcgtgccagtcaataggcgatgcatctggtggtggatccttcagtagctcagagctgaacgggcaaccactaaacgattcaattctggatatggaatcatcgtcatttagcttcttgaaccaaatgccccaaagcttcatctttccggacttgggagacgatttcaaccaaagtgcagagataacacaatttctcaccccggaaacaaatttctccgattcgacagggggagaccatacaggttgagcggggtcatgcacagcgcaccaaccatttgtacatacgctcatgggcagtcaaacctgcactgatgaagagcttgaggaccttttgatctagctgtttcttttttctactcttctcgtcttatattgtggtagtttatgggttggtcttctggtatgccctgcgatggcgtcgttatcgtgccttgtacattgccgtgcttgtgtaagaaacattaggagcggcgttgttcgcgtcagcattgatttggctaattcctccgcttggcttggcttgtacaacgaattttatcaaaatattaactggattctgaaatcgagattttcgaccatcggtttgtgctattgtgtatgctgcttccaactatc

SEQ ID NO: 53623 - DNA, 3305 bp, Zea Mays
ggcggaaccaaagccggcccacgctgctcgcctgctccggcgaccgccctccgcctccgccctgagtgacatcccctgcgaccagccgctcgccggcggtgttcgcgcttcgccggcacgccggcgtgcgccctcgtgtgccgtggctgctgcgtgccttgtccaccgaggtgactggtgagatctcgctcttcctttatcctcgcctcctcggtccaagtaggagtcggcggctatggcgacgacggccgcggggtacggctgttgcttggcggggctaccgccctttccgttgttgcctgggatcctctcgacccgcctgcgccgggagccttctcctcctcgcgtggcccttgtggcctcctccccgaagctcagggcgccggcaccgcggttgagagtttcgtgcggtccaaggaggctcgcttcctcctctggcaaggccaattcggacgcggtgccgtcgccaacggaagccactattgatataaagcttcctagaagaagtttgcttgttcaatttacatgcaatgcatgtggtgaaaggaccaagcgcttgataaatagagtagcctatgaaagagggacaatttttcttcagtgtgcagggtgccaggtgtaccacaagtttgttgataatcttggtctagttgttgagtatgatctacgagaggaaaatgtggtacaaggagaaaatgtgattgatactaattctgaagattgatctgttgtgagaagcagtgttgtcatcaccttcgctatccttggcatcacccttctttcccttgaggaaccgaataaggcccggtgtcgtcattcctcataagcacttctgagatctctgttggagtcagcatcacctccttaggtcaatgcttgtttaccagtacacgagaaaatggaagctggatgcttctttaccaatacaccagcatttacagaaccactaggagcaacagcagcatactatgtcaaaaaccaagagcacggtcatgtccaacgtggttctgggtggtttgtgcaacctgaagctgactgggggacctcctttgctccttgtgctagacatgagacgccggcatggtttggacttgaatggtctctcctactgttacgcgatgaaagtatgctatcaggatgaagaatgcatgactggaacaaggaaggaacgcagcttcatggagtggttagggtgggttccgtcaaatgacactgttctcacagaatcacaagcaggggccgttggatgtctgcacttcgcagcagcaacaggatgacgatgacgaggatgcccgtgaatgcaggtggcagtgcaaatgtgcggtttcctgaaagcgaaaaaaaagggtggtgtttcgagtggcctccagtacaaagaccgcacagagcgagtggagattttggagaaagaagatttgtcggagtgggatacggaagcactgcccgattccagatctggcaggacgcaagggcactctggtctggtctggcaggataaatatacgatgatggtggtgcactggtgctgcgtcttttgcatatttattatgcaaatagcaacactaacataaaaaaaagatagaaaaaagaagattaaacccaaagtttggtctctggacaaaaaaaaagattcaatagcactggcctgaatggaaagatgaaaaagatagaaaagaaaagaagattcatcagtggtggtgctggctgcagtatcaaatattccctgacccaacatgctgggcgccccggattccagaacaggcacagtgggctctcctccgctacagcagcagcgacaacgcacctccttattttccttttttttttttttttttttgccccaacccacctcgttcggtcgcttttctttgctagtggaagtggattggttgattgatcgcacagaagaagaattcacacccacacacacagaccgagctgccgtccgctgctctctccacccctcctctcctcgcggaacaggcaggcaggcaggctgggattccccgtccgcggggggaggtggcattcgccgctagggcaggacggggaaggctggcgtccggcatggcgaccgaggaggtactccataaggtccagagtcttatattgcgctgccttcagatgtacatggaccagaaagaagtggtcgatgccctctcccaccactcgaagatagagccctgcattactgaacttgtttggcgacaacttgagcatcaaaatcctctgtttttcaaggcgtactatatgagactaatgcttaagaatcaaataatggtcttcaacaagcttcttcaggatcagtttgaggttatcaataaagaattttcttcagggatcccttctatgtcgcttcctaatggctctaactccaacctattgaagcaaaatccatgctttttgccagagactgctcctggatctgcaatgccagatggtataatgcacaatggaagttcgcgtggtataataaatggcacaccatctggcgatcaattgctcaatgctagtaaagacttgcatggccttcataatggaatagatgcttcgactagtctgcagtcagaccagaacgcagctgctgtgctgtatggtgtagacaacgagacaagtgcaacgataaagaccgagtcttgctattcgagcaatgctgattttgctttctgtgggaatactttcctggaatcgtgccagtcaataggcgatgcatctggtggtggatccttcagtagctcagagctgaacgggcaaccactaaacgattcaattctggatatggaatcatcgtcatttagcttcttgaaccaaatgccccaaagcttcatctttccggacttgggagacgatttcaaccaaagtgcagagataacacaatttctcaccccggaaacaaatttctccgattcgacagggggagaccatacagcaggttgagcggggtcatgcacagcgcaccaaccatttgtacatacgctcatgggcagtcaaacctgcactgatgaagagcttgaggaccttttgatctagctgtttcttttttctactcttctcgtcttatattgtggtagtttatgggttggtcttctggtatgccctgcgatggcgtcgttatcgtgccttgtacattgccgtgcttgtgtaagaaacattaggagcggcgttgttcgcgtcagcattgatttggctaattcctccgcttggcttggcttgtacaacgaattttatcaaaatattaactggattctgaaatcgagattttcgaccatcggtttgtgctattgtgtatgctgcttccaactatc

SEQ ID NO: 53624 - DNA, 3724 bp, Zea Mays
ggcggaaccaaagccggcccacgctgctcgcctgctccggcgaccgccctccgcctccgccctgagtgacatcccctgcgaccagccgctcgccggcggtgttcgcgcttcgccggcacgccggcgtgcgccctcgtgtgccgtggctgctgcgtgccttgtccaccgaggtgactggtgagatctcgctcttcctttatcctcgcctcctcggtccaagtaggagtcggcggctatggcgacgacggccgcggggtacggctgttgcttggcggggctaccgccctttccgttgttgcctgggatcctctcgacccgcctgcgccgggagccttctcctcctcgcgtggcccttgtggcctcctccccgaagctcagggcgccggcaccgcggttgagagtttcgtgcggtccaaggaggctcgcttcctcctctggcaaggccaattcggacgcggtgccgtcgccaacggaagccactattgatataaagcttcctagaagaagtttgcttgttcaatttacatgcaatgcatgtggtgaaaggaccaagcgcttgataaatagagtagcctatgaaagagggacaatttttcttcagtgtgcagggtgccaggtgtaccacaagtttgttgataatcttggtctagttgttgagtatgatctacgagaggaaaatgtggtacaaggagaaaatgtgattgatactaattctgaagattgatctgttgtgagaagcagtgttggtatgcaaaacatcctgttgtagcctgttgtctgaatgtctgtaggttttgacaatattgattatttatataaaatgacattttagttgctgcatatactcatctgaatacatgggggcctagatgtattttatagtgtgatatatggttttatgaaggaaacaaaggatcacgatactagagtaccctgcatttccaaaaaagacctgtcattaatatgggaccaatacatttttagcagattattctggctcttgtgatatggtactaatatttgatatgcacactactttgcaccattattggcctgcatcattgagattttgatcaactggggcaattttgtagtcatcaccttcgctatccttggcatcacccttctttcccttgaggaaccgaataaggcccggtgtcgtcattcctcataagcacttctgagatctctgttggagtcagcatcacctccttaggtcaatgcttgtttaccagtacacgagaaaatggaagctggatgcttctttaccaatacaccagcatttacagaaccactaggagcaacagcagcatactatgtcaaaaaccaagagcacggtcatgtccaacgtggttctgggtggtttgtgcaacctgaagctgactgggggacctcctttgctccttgtgctagacatgagacgccggcatggtttggacttgaatggtctctcctactgttacgcgatgaaagtatgctatcaggatgaagaatgcatgactggaacaaggaaggaacgcagcttcatggagtggttagggtgggttccgtcaaatgacactgttctcacagaatcacaagcaggggccgttggatgtctgcacttcgcagcagcaacaggatgacgatgacgaggatgcccgtgaatgcaggtggcagtgcaaatgtgcggtttcctgaaagcgaaaaaaaagggtggtgtttcgagtggcctccagtacaaagaccgcacagagcgagtggagattttggagaaagaagatttgtcggagtgggatacggaagcactgcccgattccagatctggcaggacgcaagggcactctggtctggtctggcaggataaatatacgatgatggtggtgcactggtgctgcgtcttttgcatatttattatgcaaatagcaacactaacataaaaaaaagatagaaaaaagaagattaaacccaaagtttggtctctggtagcctagtctgcgctgagctggtagtggtaaagtgataaaacaagcagtgaaatactaactttgtgcaggacaaaaaaaaagattcaatagcactggcctgaatggaaagatgaaaaagatagaaaagaaaagaagattcatcagtggtggtgctggctgcagtatcaaatattccctgacccaacatgctgggcgccccggattccagaacaggcacagtgggctctcctccgctacagcagcagcgacaacgcacctccttattttccttttttttttttttttttttgccccaacccacctcgttcggtcgcttttctttgctagtggaagtggattggttgattgatcgcacagaagaagaattcacacccacacacacagaccgagctgccgtccgctgctctctccacccctcctctcctcgcggaacaggcaggcaggcaggctgggattccccgtccgcggggggaggtggcattcgccgctagggcaggacggggaaggctggcgtccggcatggcgaccgaggaggtactccataaggtccagagtcttatattgcgctgccttcagatgtacatggaccagaaagaagtggtcgatgccctctcccaccactcgaagatagagccctgcattactgaacttgtttggcgacaacttgagcatcaaaatcctctgtttttcaaggcgtactatatgagactaatgcttaagaatcaaataatggtcttcaacaagcttcttcaggatcagtttgaggttatcaataaagaattttcttcagggatcccttctatgtcgcttcctaatggctctaactccaacctattgaagcaaaatccatgctttttgccagagactgctcctggatctgcaatgccagatggtataatgcacaatggaagttcgcgtggtataataaatggcacaccatctggcgatcaattgctcaatgctagtaaagacttgcatggccttcataatggaatagatgcttcgactagtctgcagtcagaccagaacgcagctgctgtgctgtatggtgtagacaacgagacaagtgcaacgataaagaccgagtcttgctattcgagcaatgctgattttgctttctgtgggaatactttcctggaatcgtgccagtcaataggcgatgcatctggtggtggatccttcagtagctcagagctgaacgggcaaccactaaacgattcaattctggatatggaatcatcgtcatttagcttcttgaaccaaatgccccaaagcttcatctttccggacttgggagacgatttcaaccaaagtgcagagataacacaatttctcaccccggaaacaaatttctccgattcgacagggggagaccatacagcaggttgagcggggtcatgcacagcgcaccaaccatttgtacatacgctcatgggcagtcaaacctgcactgatgaagagcttgaggaccttttgatctagctgtttcttttttctactcttctcgtcttatattgtggtagtttatgggttggtcttctggtatgccctgcgatggcgtcgttatcgtgccttgtacattgccgtgcttgtgtaagaaacattaggagcggcgttgttcgcgtcagcattgatttggctaattcctccgcttggcttggcttgtacaacgaattttatcaaaatattaactggattctgaaatcgagattttcgaccatcggtttgtgctattgtgtatgctgcttccaactatc

SEQ ID NO: 53625 - DNA, 3925 bp, Zea Mays
ggcggaaccaaagccggcccacgctgctcgcctgctccggcgaccgccctccgcctccgccctgagtgacatcccctgcgaccagccgctcgccggcggtgttcgcgcttcgccggcacgccggcgtgcgccctcgtgtgccgtggctgctgcgtgccttgtccaccgaggtgactggtgagatctcgctcttcctttatcctcgcctcctcggtccaagtaggagtcggcggctatggcgacgacggccgcggggtacggctgttgcttggcggggctaccgccctttccgttgttgcctgggatcctctcgacccgcctgcgccgggagccttctcctcctcgcgtggcccttgtggcctcctccccgaagctcagggcgccggcaccgcggttgagagtttcgtgcggtccaaggaggctcgcttcctcctctggcaaggccaattcggacgcggtgccgtcgccaacggaagccactattgatataaagcttcctagaagaagtttgcttgttcaatttacatgcaatgcatgtggtgaaaggaccaagcgcttgataaatagagtagcctatgaaagagggacaatttttcttcagtgtgcagggtgccaggtgtaccacaagtttgttgataatcttggtctagttgttgagtatgatctacgagaggaaaatgtggtacaaggagaaaatgtgattgatactaattctgaagattgatctgttgtgagaagcagtgttggtatgcaaaacatcctgttgtagcctgttgtctgaatgtctgtaggttttgacaatattgattatttatataaaatgacattttagttgctgcatatactcatctgaatacatgggggcctagatgtattttatagtgtgatatatggttttatgaaggaaacaaaggatcacgatactagagtaccctgcatttccaaaaaagacctgtcattaatatgggaccaatacatttttagcagattattctggctcttgtgatatggtactaatatttgatatgcacactactttgcaccattattggcctgcatcattgagattttgatcaactggggcaattttgtagtcatcaccttcgctatccttggcatcacccttctttcccttgaggaaccgaataaggcccggtgtcgtcattcctcataagcacttctgagatctctgttggagtcagcatcacctccttaggtcaatgcttgtttaccagtacacgagaaaatggaagctggatgcttctttaccaatacaccagcatttacagaaccactaggagcaacagcagcatactatgtcaaaaaccaacatgagacgccggcatggtttggacttgaatggtctctcctactgttacgcgatgaaagtatgctatcaggatgaagaatgcatgactggaacaaggaaggaacgcagcttcatggagtggttagggtgggttccgtcaaatgacactgttctcacagaatcacaagcaggggccgttggatgtctgcacttcgcagcagcaacaggatgacgatgacgaggatgcccgtgaatgcaggtggcagtgcaaatgtgcggtttcctgaaagcgaaaaaaaagggtggtgtttcgagtggcctccagtacaaagaccgcacagagcgagtggagattttggagaaagaagatttgtcggagtgggatacggaagcactgcccgattccagatctggcaggacgcaagggcactctggtctggtctggcaggataaatatacgatgatggtggtgcactggtgctgcgtcttttgcatatttattatgcaaatagcaacactaacataaaaaaaagatagaaaaaagaagattaaacccaaagtttggtctctggtagcctagtctgcgctgagctggtagtggtaaagtgataaaacaagcagtgaaatactaactttgtgcaggacaaaaaaaaagattcaatagcactggcctgaatggaaagatgaaaaagatagaaaagaaaagaagattcatcagtggtggtgctggctgcagtatcaaatattccctgacccaacatgctgggcgccccggattccagaacaggcacagtgggctctcctccgctacagcagcagcgacaacgcacctccttattttccttttttttttttttttttttgccccaacccacctcgttcggtcgcttttctttgctagtggaagtggattggttgattgatcgcacagaagaagaattcacacccacacacacagaccgagctgccgtccgctgctctctccacccctcctctcctcgcggaacaggcaggcaggcaggctgggattccccgtccgcggggggaggtggcattcgccgctagggcaggacggggaaggctggcgtccggcatggcgaccgaggaggtactccataaggtcagtcccgaattcacgtctctctctctcgagggcatacgactaggttgatcgcattttttcccattcattcctagtcttagtctgtgtgggctcgtcacttcgctaccagctcgtttccatccacgcggatttgattgctcctgttcgttcctttgcgatcttgctctgctctgctctgctcccgggctctgctgattgctggtacttcttgtggaagaaccccgctttggaaagaaccatgctgtatgtccctgtccaccaaactgaccaccagcttccgtatcggtccagagtcttatattgcgctgccttcagatgtacatggaccagaaagaagtggtcgatgccctctcccaccactcgaagatagagccctgcattactgaacttgtttggcgacaacttgagcatcaaaatcctctgtttttcaaggcgtactatatgagactaatgcttaagaatcaaataatggtcttcaacaagcttcttcaggatcagtttgaggttatcaataaagaattttcttcagggatcccttctatgtcgcttcctaatggctctaactccaacctattgaagcaaaatccatgctttttgccagagactgctcctggatctgcaatgccagatggtataatgcacaatggaagttcgcgtggtataataaatggcacaccatctggcgatcaattgctcaatgctagtaaagacttgcatggccttcataatggaatagatgcttcgactagtctgcagtcagaccagaacgcagctgctgtgctgtatggtgtagacaacgagacaagtgcaacgataaagaccgagtcttgctattcgagcaatgctgattttgctttctgtgggaatactttcctggaatcgtgccagtcaataggcgatgcatctggtggtggatccttcagtagctcagagctgaacgggcaaccactaaacgattcaattctggatatggaatcatcgtcatttagcttcttgaaccaaatgccccaaagcttcatctttccggacttgggagacgatttcaaccaaagtgcagagataacacaatttctcaccccggaaacaaatttctccgattcgacagggggagaccatacaggttgagcggggtcatgcacagcgcaccaaccatttgtacatacgctcatgggcagtcaaacctgcactgatgaagagcttgaggaccttttgatctagctgtttcttttttctactcttctcgtcttatattgtggtagtttatgggttggtcttctggtatgccctgcgatggcgtcgttatcgtgccttgtacattgccgtgcttgtgtaagaaacattaggagcggcgttgttcgcgtcagcattgatttggctaattcctccgcttggcttggcttgtacaacgaattttatcaaaatattaactggattctgaaatcgagattttcgaccatcggtttgtgctattgtgtatgctgcttccaactatc

SEQ ID NO: 53626 - DNA, 3435 bp, Zea Mays
ggcggaaccaaagccggcccacgctgctcgcctgctccggcgaccgccctccgcctccgccctgagtgacatcccctgcgaccagccgctcgccggcggtgttcgcgcttcgccggcacgccggcgtgcgccctcgtgtgccgtggctgctgcgtgccttgtccaccgaggtgactggaagccactattgatataaagcttcctagaagaagtttgcttgttcaatttacatgcaatgcatgtggtgaaaggaccaagcgcttgataaatagagtagcctatgaaagagggacaatttttcttcagtgtgcagggtgccaggtgtaccacaagtttgttgataatcttggtctagttgttgagtatgatctacgagaggaaaatgtggtacaaggagaaaatgtgattgatactaattctgaagattgatctgttgtgagaagcagtgttgtcatcaccttcgctatccttggcatcacccttctttcccttgaggaaccgaataaggcccggtgtcgtcattcctcataagcacttctgagatctctgttggagtcagcatcacctccttaggtcaatgcttgtttaccagtacacgagaaaatggaagctggatgcttctttaccaatacaccagcatttacagaaccactaggagcaacagcagcatactatgtcaaaaaccaacatgagacgccggcatggtttggacttgaatggtctctcctactgttacgcgatgaaagtatgctatcaggatgaagaatgcatgactggaacaaggaaggaacgcagcttcatggagtggttagggtgggttccgtcaaatgacactgttctcacagaatcacaagcaggggccgttggatgtctgcacttcgcagcagcaacaggatgacgatgacgaggatgcccgtgaatgcaggtggcagtgcaaatgtgcggtttcctgaaagcgaaaaaaaagggtggtgtttcgagtggcctccagtacaaagaccgcacagagcgagtggagattttggagaaagaagatttgtcggagtgggatacggaagcactgcccgattccagatctggcaggacgcaagggcactctggtctggtctggcaggataaatatacgatgatggtggtgcactggtgctgcgtcttttgcatatttattatgcaaatagcaacactaacataaaaaaaagatagaaaaaagaagattaaacccaaagtttggtctctggtagcctagtctgcgctgagctggtagtggtaaagtgataaaacaagcagtgaaatactaactttgtgcaggacaaaaaaaaagattcaatagcactggcctgaatggaaagatgaaaaagatagaaaagaaaagaagattcatcagtggtggtgctggctgcagtatcaaatattccctgacccaacatgctgggcgccccggattccagaacaggcacagtgggctctcctccgctacagcagcagcgacaacgcacctccttattttccttttttttttttttttttttgccccaacccacctcgttcggtcgcttttctttgctagtggaagtggattggttgattgatcgcacagaagaagaattcacacccacacacacagaccgagctgccgtccgctgctctctccacccctcctctcctcgcggaacaggcaggcaggcaggctgggattccccgtccgcggggggaggtggcattcgccgctagggcaggacggggaaggctggcgtccggcatggcgaccgaggaggtactccataaggtcagtcccgaattcacgtctctctctctcgagggcatacgactaggttgatcgcattttttcccattcattcctagtcttagtctgtgtgggctcgtcacttcgctaccagctcgtttccatccacgcggatttgattgctcctgttcgttcctttgcgatcttgctctgctctgctctgctcccgggctctgctgattgctggtaggtaccgactcgtgcatcctccggctgccttctgcgcccatgttcaaattggtagttctagggtttcggaggaaaacaccagctgtacctgttctcatccacatatctgcgaatggacggtggcatctggttggtgtacatttccaggtacttcttgtggaagaaccccgctttggaaagaaccatgctgtatgtccctgtccaccaaactgaccaccagcttccgtatcggtccagagtcttatattgcgctgccttcagatgtacatggaccagaaagaagtggtcgatgccctctcccaccactcgaagatagagccctgcattactgaacttgtttggcgacaacttgagcatcaaaatcctctgtttttcaaggcgtactatatgagactaatgcttaagaatcaaataatggtcttcaacaagcttcttcaggatcagtttgaggttatcaataaagaattttcttcagggatcccttctatgtcgcttcctaatggctctaactccaacctattgaagcaaaatccatgctttttgccagagactgctcctggatctgcaatgccagatggtataatgcacaatggaagttcgcgtggtataataaatggcacaccatctggcgatcaattgctcaatgctagtaaagacttgcatggccttcataatggaatagatgcttcgactagtctgcagtcagaccagaacgcagctgctgtgctgtatggtgtagacaacgagacaagtgcaacgataaagaccgagtcttgctattcgagcaatgctgattttgctttctgtgggaatactttcctggaatcgtgccagtcaataggcgatgcatctggtggtggatccttcagtagctcagagctgaacgggcaaccactaaacgattcaattctggatatggaatcatcgtcatttagcttcttgaaccaaatgccccaaagcttcatctttccggacttgggagacgatttcaaccaaagtgcagagataacacaatttctcaccccggaaacaaatttctccgattcgacagggggagaccatacagcaggttgagcggggtcatgcacagcgcaccaaccatttgtacatacgctcatgggcagtcaaacctgcactgatgaagagcttgaggaccttttgatctagctgtttcttttttctactcttctcgtcttatattgtggtagtttatgggttggtcttctggtatgccctgcgatggcgtcgttatcgtgccttgtacattgccgtgcttgtgtaagaaacattaggagcggcgttgttcgcgtcagcattgatttggctaattcctccgcttggcttggcttgtacaacgaattttatcaaaatattaactggattctgaaatcgagattttcgaccatcggtttgtgctattgtgtatgctgcttccaactatc

SEQ ID NO: 53627 - DNA, 3295 bp, Zea Mays
cgcaattcggcttccggattcaaatttatgaatgcccaaggaagccactattgatataaagcttcctagaagaagtttgcttgttcaatttacatgcaatgcatgtggtgaaaggaccaagcgcttgataaatagagtagcctatgaaagagggacaatttttcttcagtgtgcagggtgccaggtgtaccacaagtttgttgataatcttggtctagttgttgagtatgatctacgagaggaaaatgtggtacaaggagaaaatgtgattgatactaattctgaagattgatctgttgtgagaagcagtgttgtcatcaccttcgctatccttggcatcacccttctttcccttgaggaaccgaataaggcccggtgtcgtcattcctcataagcacttctgagatctctgttggagtcagcatcacctccttaggtcaatgcttgtttaccagtacacgagaaaatggaagctggatgcttctttaccaatacaccagcatttacagaaccactaggagcaacagcagcatactatgtcaaaaaccaacatgagacgccggcatggtttggacttgaatggtctctcctactgttacgcgatgaaagtatgctatcaggatgaagaatgcatgactggaacaaggaaggaacgcagcttcatggagtggttagggtgggttccgtcaaatgacactgttctcacagaatcacaagcaggggccgttggatgtctgcacttcgcagcagcaacaggatgacgatgacgaggatgcccgtgaatgcaggtggcagtgcaaatgtgcggtttcctgaaagcgaaaaaaaagggtggtgtttcgagtggcctccagtacaaagaccgcacagagcgagtggagattttggagaaagaagatttgtcggagtgggatacggaagcactgcccgattccagatctggcaggacgcaagggcactctggtctggtctggcaggataaatatacgatgatggtggtgcactggtgctgcgtcttttgcatatttattatgcaaatagcaacactaacataaaaaaaagatagaaaaaagaagattaaacccaaagtttggtctctggtagcctagtctgcgctgagctggtagtggtaaagtgataaaacaagcagtgaaatactaactttgtgcaggacaaaaaaaaagattcaatagcactggcctgaatggaaagatgaaaaagatagaaaagaaaagaagattcatcagtggtggtgctggctgcagtatcaaatattccctgacccaacatgctgggcgccccggattccagaacaggcacagtgggctctcctccgctacagcagcagcgacaacgcacctccttattttccttttttttttttttttttttgccccaacccacctcgttcggtcgcttttctttgctagtggaagtggattggttgattgatcgcacagaagaagaattcacacccacacacacagaccgagctgccgtccgctgctctctccacccctcctctcctcgcggaacaggcaggcaggcaggctgggattccccgtccgcggggggaggtggcattcgccgctagggcaggacggggaaggctggcgtccggcatggcgaccgaggaggtactccataaggtcagtcccgaattcacgtctctctctctcgagggcatacgactaggttgatcgcattttttcccattcattcctagtcttagtctgtgtgggctcgtcacttcgctaccagctcgtttccatccacgcggatttgattgctcctgttcgttcctttgcgatcttgctctgctctgctctgctcccgggctctgctgattgctggtaggtaccgactcgtgcatcctccggctgccttctgcgcccatgttcaaattggtagttctagggtttcggaggaaaacaccagctgtacctgttctcatccacatatctgcgaatggacggtggcatctggttggtgtacatttccaggtacttcttgtggaagaaccccgctttggaaagaaccatgctgtatgtccctgtccaccaaactgaccaccagcttccgtatcggtccagagtcttatattgcgctgccttcagatgtacatggaccagaaagaagtggtcgatgccctctcccaccactcgaagatagagccctgcattactgaacttgtttggcgacaacttgagcatcaaaatcctctgtttttcaaggcgtactatatgagactaatgcttaagaatcaaataatggtcttcaacaagcttcttcaggatcagtttgaggttatcaataaagaattttcttcagggatcccttctatgtcgcttcctaatggctctaactccaacctattgaagcaaaatccatgctttttgccagagactgctcctggatctgcaatgccagatggtataatgcacaatggaagttcgcgtggtataataaatggcacaccatctggcgatcaattgctcaatgctagtaaagacttgcatggccttcataatggaatagatgcttcgactagtctgcagtcagaccagaacgcagctgctgtgctgtatggtgtagacaacgagacaagtgcaacgataaagaccgagtcttgctattcgagcaatgctgattttgctttctgtgggaatactttcctggaatcgtgccagtcaataggcgatgcatctggtggtggatccttcagtagctcagagctgaacgggcaaccactaaacgattcaattctggatatggaatcatcgtcatttagcttcttgaaccaaatgccccaaagcttcatctttccggacttgggagacgatttcaaccaaagtgcagagataacacaatttctcaccccggaaacaaatttctccgattcgacagggggagaccatacaggttgagcggggtcatgcacagcgcaccaaccatttgtacatacgctcatgggcagtcaaacctgcactgatgaagagcttgaggaccttttgatctagctgtttcttttttctactcttctcgtcttatattgtggtagtttatgggttggtcttctggtatgccctgcgatggcgtcgttatcgtgccttgtacattgccgtgcttgtgtaagaaacattaggagcggcgttgttcgcgtcagcattgatttggctaattcctccgcttggcttggcttgtacaacgaattttatcaaaatattaactggattctgaaatcgagattttcgaccatcggtttgtgctattgtgtatgctgcttccaactatc

SEQ ID NO: 53628 - DNA, 2881 bp, Zea Mays
attgaaagcacaagtgcttcatctcgcaattcggcttccggattcaaatttatgaatgcccaaggaagccactattgatataaagcttcctagaagaagtttgcttgttcaatttacatgcaatgcatgtggtgaaaggaccaagcgcttgataaatagagtagcctatgaaagagggacaatttttcttcagtgtgcagggtgccaggtgtaccacaagtttgttgataatcttggtctagttgttgagtatgatctacgagaggaaaatgtggtacaaggagaaaatgtgattgatactaattctgaagattgatctgttgtgagaagcagtgttgtcatcaccttcgctatccttggcatcacccttctttcccttgaggaaccgaataaggcccggtgtcgtcattcctcataagcacttctgagatctctgttggagtcagcatcacctccttaggtcaatgcttgtttaccagtacacgagaaaatggaagctggatgcttctttaccaatacaccagcatttacagaaccactaggagcaacagcagcatactatgtcaaaaaccaacatgagacgccggcatggtttggacttgaatggtctctcctactgttacgcgatgaaagtatgctatcaggatgaagaatgcatgactggaacaaggaaggaacgcagcttcatggagtggttagggtgggttccgtcaaatgacactgttctcacagaatcacaagcaggggccgttggatgtctgcacttcgcagcagcaacaggatgacgatgacgaggatgcccgtgaatgcaggtggcagtgcaaatgtgcggtttcctgaaagcgaaaaaaaagggtggtgtttcgagtggcctccagtacaaagaccgcacagagcgagtggagattttggagaaagaagatttgtcggagtgggatacggaagcactgcccgattccagatctggcaggacgcaagggcactctggtctggtctggcaggataaatatacgatgatggtggtgcactggtgctgcgtcttttgcatatttattatgcaaatagcaacactaacataaaaaaaagatagaaaaaagaagattaaacccaaagtttggtctctggtagcctagtctgcgctgagctggtagtggtaaagtgataaaacaagcagtgaaatactaactttgtgcaggacaaaaaaaaagattcaatagcactggcctgaatggaaagatgaaaaagatagaaaagaaaagaagattcatcagtggtggtgctggctgcagtatcaaatattccctgacccaacatgctgggcgccccggattccagaacaggcacagtgggctctcctccgctacagcagcagcgacaacgcacctccttattttccttttttttttttttttttttgccccaacccacctcgttcggtcgcttttctttgctagtggaagtggattggttgattgatcgcacagaagaagaattcacacccacacacacagaccgagctgccgtccgctgctctctccacccctcctctcctcgcggaacaggcaggcaggcaggctgggattccccgtccgcggggggaggtggcattcgccgctagggcaggacggggaaggctggcgtccggcatggcgaccgaggaggtactccataaggtccagagtcttatattgcgctgccttcagatgtacatggaccagaaagaagtggtcgatgccctctcccaccactcgaagatagagccctgcattactgaacttgtttggcgacaacttgagcatcaaaatcctctgtttttcaaggcgtactatatgagactaatgcttaagaatcaaataatggtcttcaacaagcttcttcaggatcagtttgaggttatcaataaagaattttcttcagggatcccttctatgtcgcttcctaatggctctaactccaacctattgaagcaaaatccatgctttttgccagagactgctcctggatctgcaatgccagatggtataatgcacaatggaagttcgcgtggtataataaatggcacaccatctggcgatcaattgctcaatgctagtaaagacttgcatggccttcataatggaatagatgcttcgactagtctgcagtcagaccagaacgcagctgctgtgctgtatggtgtagacaacgagacaagtgcaacgataaagaccgagtcttgctattcgagcaatgctgattttgctttctgtgggaatactttcctggaatcgtgccagtcaataggcgatgcatctggtggtggatccttcagtagctcagagctgaacgggcaaccactaaacgattcaattctggatatggaatcatcgtcatttagcttcttgaaccaaatgccccaaagcttcatctttccggacttgggagacgatttcaaccaaagtgcagagataacacaatttctcaccccggaaacaaatttctccgattcgacagggggagaccatacaggttgagcggggtcatgcacagcgcaccaaccatttgtacatacgctcatgggcagtcaaacctgcactgatgaagagcttgaggaccttttgatctagctgtttcttttttctactcttctcgtcttatattgtggtagtttatgggttggtcttctggtatgccctgcgatggcgtcgttatcgtgccttgtacattgccgtgcttgtgtaagaaacattaggagcggcgttgttcgcgtcagcattgatttggctaattcctccgcttggcttggcttgtacaacgaattttatcaaaatattaactggattctgaaatcgagattttcgaccatcggtttgtgctattgtgtatgctgcttccaactatc

SEQ ID NO: 53629 - DNA, 3325 bp, Zea Mays
attgaaagcacaagtgcttcatctcgcaattcggcttccggattcaaatttatgaatgcccaaggaagccactattgatataaagcttcctagaagaagtttgcttgttcaatttacatgcaatgcatgtggtgaaaggaccaagcgcttgataaatagagtagcctatgaaagagggacaatttttcttcagtgtgcagggtgccaggtgtaccacaagtttgttgataatcttggtctagttgttgagtatgatctacgagaggaaaatgtggtacaaggagaaaatgtgattgatactaattctgaagattgatctgttgtgagaagcagtgttggtatgcaaaacatcctgttgtagcctgttgtctgaatgtctgtaggttttgacaatattgattatttatataaaatgacattttagttgctgcatatactcatctgaatacatgggggcctagatgtattttatagtgtgatatatggttttatgaaggaaacaaaggatcacgatactagagtaccctgcatttccaaaaaagacctgtcattaatatgggaccaatacatttttagcagattattctggctcttgtgatatggtactaatatttgatatgcacactactttgcaccattattggcctgcatcattgagattttgatcaactggggcaattttgtagtcatcaccttcgctatccttggcatcacccttctttcccttgaggaaccgaataaggcccggtgtcgtcattcctcataagcacttctgagatctctgttggagtcagcatcacctccttaggtcaatgcttgtttaccagtacacgagaaaatggaagctggatgcttctttaccaatacaccagcatttacagaaccactaggagcaacagcagcatactatgtcaaaaaccaatgccattgcagagagcacggtcatgtccaacgtggttctgggtggtttgtgcaacctgaagctgactgggggacctcctttgctccttgtgctagacatgagacgccggcatggtttggacttgaatggtctctcctactgttacgcgatgaaagtatgctatcaggatgaagaatgcatgactggaacaaggaaggaacgcagcttcatggagtggttagggtgggttccgtcaaatgacactgttctcacagaatcacaagcaggggccgttggatgtctgcacttcgcagcagcaacaggatgacgatgacgaggatgcccgtgaatgcaggtggcagtgcaaatgtgcggtttcctgaaagcgaaaaaaaagggtggtgtttcgagtggcctccagtacaaagaccgcacagagcgagtggagattttggagaaagaagatttgtcggagtgggatacggaagcactgcccgattccagatctggcaggacgcaagggcactctggtctggtctggcaggataaatatacgatgatggtggtgcactggtgctgcgtcttttgcatatttattatgcaaatagcaacactaacataaaaaaaagatagaaaaaagaagattaaacccaaagtttggtctctggtagcctagtctgcgctgagctggtagtggtaaagtgataaaacaagcagtgaaatactaactttgtgcaggacaaaaaaaaagattcaatagcactggcctgaatggaaagatgaaaaagatagaaaagaaaagaagattcatcagtggtggtgctggctgcagtatcaaatattccctgacccaacatgctgggcgccccggattccagaacaggcacagtgggctctcctccgctacagcagcagcgacaacgcacctccttattttccttttttttttttttttttttgccccaacccacctcgttcggtcgcttttctttgctagtggaagtggattggttgattgatcgcacagaagaagaattcacacccacacacacagaccgagctgccgtccgctgctctctccacccctcctctcctcgcggaacaggcaggcaggcaggctgggattccccgtccgcggggggaggtggcattcgccgctagggcaggacggggaaggctggcgtccggcatggcgaccgaggaggtactccataaggtccagagtcttatattgcgctgccttcagatgtacatggaccagaaagaagtggtcgatgccctctcccaccactcgaagatagagccctgcattactgaacttgtttggcgacaacttgagcatcaaaatcctctgtttttcaaggcgtactatatgagactaatgcttaagaatcaaataatggtcttcaacaagcttcttcaggatcagtttgaggttatcaataaagaattttcttcagggatcccttctatgtcgcttcctaatggctctaactccaacctattgaagcaaaatccatgctttttgccagagactgctcctggatctgcaatgccagatggtataatgcacaatggaagttcgcgtggtataataaatggcacaccatctggcgatcaattgctcaatgctagtaaagacttgcatggccttcataatggaatagatgcttcgactagtctgcagtcagaccagaacgcagctgctgtgctgtatggtgtagacaacgagacaagtgcaacgataaagaccgagtcttgctattcgagcaatgctgattttgctttctgtgggaatactttcctggaatcgtgccagtcaataggcgatgcatctggtggtggatccttcagtagctcagagctgaacgggcaaccactaaacgattcaattctggatatggaatcatcgtcatttagcttcttgaaccaaatgccccaaagcttcatctttccggacttgggagacgatttcaaccaaagtgcagagataacacaatttctcaccccggaaacaaatttctccgattcgacagggggagaccatacaggttgagcggggtcatgcacagcgcaccaaccatttgtacatacgctcatgggcagtcaaacctgcactgatgaagagcttgaggaccttttgatctagctgtttcttttttctactcttctcgtcttatattgtggtagtttatgggttggtcttctggtatgccctgcgatggcgtcgttatcgtgccttgtacattgccgtgcttgtgtaagaaacattaggagcggcgttgttcgcgtcagcattgatttggctaattcctccgcttggcttggcttgtacaacgaattttatcaaaatattaactggattctgaaatcgagattttcgaccatcggtttgtgctattgtgtatgctgcttccaactatc

SEQ ID NO: 53630 - DNA, 5666 bp, Zea Mays
ccggtgtccggttgtcggtttgtgcgcctaaggactgctctatttttctttttttgagttccagtccaagcagtgagcgtctgcaggtggataaacccttagtctatgattacgcggcgccgcagtttagcttagcggtttttgcggtactttctaccatgtgcgtttccacttcgtacgccgctcgttaatttttcgtggattactgagttcatttagcattgatattttttcatcgtttcttcttcttttggcacccgaggcttgccggctgctatgaccgactgatgaatgcaggttgttgctagtatgatatggtatatacatatacaatcagagaacgggcctggagattgcattgcaccataaggggggccagctccaaaatattactgtagcaggaaccaggaattgctgaaatgtacgaaatagaattgaatcttctcagagctagtttaagtatataatgtcatcgcgagacttttaccaaaatggaactgggaatcacagattggttgtggtcttctgggcgtaaatctccctagaactagtaaagacatcgccctcaaggactggcatttactttttccctctcctggtttcatagagaaatgaaacagggcggttttggagggagcaaaaaaaaagtagatttcaatgccattttggactgcccatagatatggtatgacatatattcgtttcccaggggtctactgtattattattatactaatggcaccgaaatggccgcggcttcatttaatgcgatgttgttgtcttttgtcccccattttctgcatgtcattttgtcaacagattcccacggacattgctaaaaccatgtgctgtggcaattactgccatcatagtttggtacttagtggttcctgtaattgcattagcatgtcaaatttgatgctacaaatcgcaaacaaagaggaataaatagaacggtagaggtttgcatgttaatattttaccagtttcccactagttttttttcttgaaaacgaatactccatagctcagagagtatggcaccctgaaagcaacatggttgcaagcttttgcatagaaaaatagttttgactttggatgctgatgtattgcttgagttaccatatctcttggctttactaacttctttgtgcagttgtgcatcagtccaaatacaggtcaacttaccattgaaacaagcgattccacacattttaaagccctgtctttttcttcatttatatattatataaagagtgcttacctctgacccactacgaaggtctcacaccagaaccagattatacatccttaacaaatactcaaagtttgtcgtcaaaataccttgatgacagaatgatggaaaggctttcagcgctggttcttgatggtgacccagcgtccttgtcgaccatctctgagacgcttgcaaagttcaacttcagaggtgcatgcggatcttgaaccattccattttggaacccctcttcctttctgcatttttttctaaaaaaatgaagtgtgttctagagggaaaaaggaagtcaacaggcacagtattcatttcaagcaatctgaaatctttaaaactgagaacctgtatatcaaattaactcatccctattattttccctggaaaagaatttctatatatgttagttgtggtatcatatttgcagtctgtatgaattctgaagctgatggggtgaaaacatgttgacctagatctattttgacaatacttaaagtattccttctcttgacaaagaagtagaggaattcagatcctctgccctaaaaatcaatctacacctactatatgatattcaaggggcttctgtagcatattttgtttcaaggatgtttggtgtcttttcctatttgtgagtgcttacttggattctgatctgcggttatcataatattacacttgttgtatatcataagtttgggtatatgatatgacactttagattccaatatctgaatattccattttgtcgcgtatagtaagtttgggtgcactatgtgacgacgtgacgttttagattctgatttctggatattccattttgtcgtatataataagtttgggagtacagtaggatgcattggattccaatttctgaggattccattttgtcgtatatcataagtttgggcatacagtatgacacaatgtttttaagtcgaacgacttgctggtcgttctggctgaccgacaaggacgattaatcgtgattggttcaaaccgacttggacgattaatcgcgactaatcgcgataaatcggacgacttgaaaacattggtatgacgctttggattccaatttctgagtattccattttgtcgtatatcatacgtttgggtttatgcctttatggtatggtgctttagattccaatctctgaatattccattttgtcgtgtatcatatgcttgattatacagtatgacactttaaattcagtttctgaacgtatcattttgtaacgtatcatatgttttggtgtatggtatgacgctttagattccaatatctgaatattccattttgtcgtgtagcttaagattgggtgtacggtagaggattatgtggactcaaaagtggaggtgtggatacatttgttaattggatttttactagctttactaatttcgacaggctcatatcaaagaacattaaaaaaccacgctggaatagatccatcatttggaacactgagaggagatcctgtttgttgaaagttgtttattggttccttctgcttcgctggaatttctcaccatgaaagttttccttaggagtctaattaaaaattatgtgttgggcctatttgtcaagtgcacggtccattaagtgtagaacagtgataaatacactgtggtatgaaatttccaagtattttaatcttattacctttattgttgcgtagttgtttccttccaaacagcagaagcggccctggatttcattaaatgtggggctgctaaagcagcggaccttgatttggtgttggtggaggttaatcttaacaatatggcaccaggcacttcagcaaaccctgatctgttccatcacatactgaatgaacttcaagtccctcttaccgcaatgtgttctcgtgacgatgaagaggcactttccaaatgtatgaacctgggtgcatgcttccatctgctgaagccactgaacagaagaagcttcagcattctgtggcaccaagcactggaacacaagtctaaaaaggcagcacctcaaagaccaagtcttaatgatagtaccaaaaatagaatggtttcaccatctactgaaaaacccaaggaagtccttattctagagagaaacaatttatctgttcctcaaagcaatggatatgaagagccaaagaagcagaatcgggtcacatggaccattgaactccatgaaaagttcttggaggctgtcgaagctcttggggggaacaagtctgctagacctgagaagatcctgcacctgatgaatgtaaagggtttgactgtgaagcatataggcagccatctccagaaacatcgattgcgcaaccagaatacaaaacaaggacagcgccaagagaatgccagcagaaaacctatatcaaggcaaggtgaagccacttctgaatccatcacacccagagttgagacagacggggaagtgtacccctcaaggctgtggacaaaggtgaagaaaaggtcagtagacacatcggctctgaagactggcatgcacacatgcacatctggaaacgacaatgagggcacagagtctgtgtgggataggtatgaaaataacctgcaagtgttcgctgagaacaagaaacgttggatgttcacgagcgaacatcagtggcctcggagaaacaatattgataccacagacgaaggggatccaaatgaagcccccgaaactgctgctggtgcatccatagaaatctttggttcaagcagcttaataagtgatcaagtgggagagaaaaatcgtgttgaatctgacagagacaataacaccgtgtggagcactgatttactagaaggttatggtgcatccatagaaagctctggttcaagcagcctgttagcaaatgatcaagtgggagagaacaatcattctgaagctgccagagccaatgacagcatggggaacattactttgcttgaagcttacggtggtgcatacataggaacctctggttcaggcagcctgttaacaggcgatctagtcaggcagaacggttgtgctgaagctaccagacacaatgacaatttgtggggcgttaatctacctcaaggttatggcgcattcacagaaatctctggttcgagcaacatgttaacgagttatcaagtgggagagaacaatggcactgaatttgccagagacaatggccacatggagaacattagtttgctcgaagtttatggtgcatccatagaaaacgctggttcaagcagcatgttaacaagtgatcaagtcggacaaagcaatcttaccgaagctgacagaatctatgacaccatggggagcattaattaccttgaaggtaccgtggacccggagtacattgcaccaatggattattctgttgcttgggcgcacctagagggcaatggtccggacctgagaagcccttctgatggccgggaggaagcatattcattttggatgagtcagctggcaggaccacaagactatcaaagccttggcccggagggtttccttcaagtaggtgacgacgcatataacgatgctctgagatcggttggtctggttaacgtggatgaacaagcgactcaaggatggcaagagcagcaaagcctcagcatggaagatctcctgcaggtagatgacgttgcatgggatgacactctgatatctatggggcttatcaacttgttagatgaaccaatggctgaagaggccgccattggaggatcacaaggtcagcaaagcctcgccccggaggtcctccaagcaggtgacaatgcgtacggtgatgatcttgggtcgattgagatggtcaacttgttaaacgaaccaatgactcaagaagccgctattgccgatgctctggtggacgatcctatgaccctgattgcccaagacgatgtgccgtgggcttggagtcctgcagtgccgggtgactatggcattgattggatccaggatcctaacgcagaactgtatgggtaaaagatcgatgaccgagccgtggttgcgtacaagaatcggaccgggtggaagagaggtgtgagacagccttgagtccagtcaaaaataattgacttgcttactttattctaaaactgtttttggatggatttattctcttttatcgacaatcactccccattttacttctaatgaaagcaatgtaagggctagtttggtaaccctattttctcaagggattttcattttcctaagagaaattagttcatttttccataggaaaatagaaatctcttaaaaaaatggggttctcaaactagaaaaatcatggtattttgtttataaggggagtttggtttctagggactaatgtttaatccttccatattatttcattgtacttgtcggagagaaaattctccggccgggtggcggagtgcacccgtcctaaatcttaagatgaggaaggagttt

SEQ ID NO: 53631 - DNA, 4155 bp, Zea Mays
ccggtgtccggttgtcggtttgtgcgcctaaggactgctctatttttctttttttgagttccagtccaagcagtgagcgtctgcaggtggataaacccttagtctatgattacgcggcgccgcagtttagcttagcggtttttgcggtactttctaccatgtgcgtttccacttcgtacgccgctcgttaatttttcgtggattactgagttcatttagcattgatattttttcatcgtttcttcttcttttggcacccgaggcttgccggctgctatgaccgactgatgaatgcaggttgttgctagtatgatatggtatatacatatacaatcagagaacgggcctggagattgcattgcaccataaggggggccagctccaaaatattactgtagcaggaaccaggaattgctgaaatgtacgaaatagaattgaatcttctcagagctagtttaagtatataatgtcatcgcgagacttttaccaaaatggaactgggaatcacagattggttgtggtcttctgggcgtaaatctccctagaactagtaaagacatcgccctcaaggactggcatttactttttccctctcctggtttcatagagaaatgaaacagggcggttttggagggagcaaaaaaaaagtagatttcaatgccattttggactgcccatagatatggtatgacatatattcgtttcccaggggtctactgtattattattatactaatggcaccgaaatggccgcggcttcatttaatgcgatgttgttgtcttttgtcccccattttctgcatgtcattttgtcaacagattcccacggacattgctaaaaccatgtgctgtggcaattactgccatcatagtttggtacttagtggttcctgtaattgcattagcatgtcaaatttgatgctacaaatcgcaaacaaagaggaataaatagaacggtagaggtttgcatgttaatattttaccagtttcccactagttttttttcttgaaaacgaatactccatagctcagagagtatggcaccctgaaagcaacatggttgcaagcttttgcatagaaaaatagttttgactttggatgctgatgtattgcttgagttaccatatctcttggctttactaacttctttgtgcagttgtgcatcagtccaaatacaggtcaacttaccattgaaacaagcgattccacacattttaaagccctgtctttttcttcatttatatattatataaagagtgcttacctctgacccactacgaaggtctcacaccagaaccagattatacatccttaacaaatactcaaagtttgtcgtcaaaataccttgatgacagaatgatggaaaggctttcagcgctggttcttgatggtgacccagcgtccttgtcgaccatctctgagacgcttgcaaagttcaacttcagagttgtttccttccaaacagcagaagcggccctggatttcattaaatgtggggctgctaaagcagcggaccttgatttggtgttggtggaggttaatcttaacaatatggcaccaggcacttcagcaaaccctgatctgttccatcacatactgaatgaacttcaagtccctcttaccgcaatgtgttctcgtgacgatgaagaggcactttccaaatgtatgaacctgggtgcatgcttccatctgctgaagccactgaacagaagaagcttcagcattctgtggcaccaagcactggaacacaagtctaaaaaggcagcacctcaaagaccaagtcttaatgatagtaccaaaaatagaatggtttcaccatctactgaaaaacccaaggaagtccttattctagagagaaacaatttatctgttcctcaaagcaatggatatgaagagccaaagaagcagaatcgggtcacatggaccattgaactccatgaaaagttcttggaggctgtcgaagctcttggggggaacaagtctgctagacctgagaagatcctgcacctgatgaatgtaaagggtttgactgtgaagcatataggcagccatctccagaaacatcgattgcgcaaccagaatacaaaacaaggacagcgccaagagaatgccagcagaaaacctatatcaaggcaaggtgaagccacttctgaatccatcacacccagagttgagacagacggggaagtgtacccctcaaggctgtggacaaaggtgaagaaaaggtcagtagacacatcggctctgaagactggcatgcacacatgcacatctggaaacgacaatgagggcacagagtctgtgtgggataggtatgaaaataacctgcaagtgttcgctgagaacaagaaacgttggatgttcacgagcgaacatcagtggcctcggagaaacaatattgataccacagacgaaggggatccaaatgaagcccccgaaactgctgctggtgcatccatagaaatctttggttcaagcagcttaataagtgatcaagtgggagagaaaaatcgtgttgaatctgacagagacaataacaccgtgtggagcactgatttactagaaggttatggtgcatccatagaaagctctggttcaagcagcctgttagcaaatgatcaagtgggagagaacaatcattctgaagctgccagagccaatgacagcatggggaacattactttgcttgaaggaacctctggttcaggcagcctgttaacaggcgatctagtcaggcagaacggttgtgctgaagctaccagacacaatgacaatttgtggggcgttaatctacctcaaggttatggcgcattcacagaaatctctggttcgagcaacatgttaacgagttatcaagtgggagagaacaatggcactgaatttgccagagacaatggccacatggagaacattagtttgctcgaagtttatggtgcatccatagaaaacgctggttcaagcagcatgttaacaagtgatcaagtcggacaaagcaatcttaccgaagctgacagaatctatgacaccatggggagcattaattaccttgaaggtaccgtggacccggagtacattgcaccaatggattattctgttgcttgggcgcacctagagggcaatggtccggacctgagaagcccttctgatggccgggaggaagcatattcattttggatgagtcagctggcaggaccacaagactatcaaagccttggcccggagggtttccttcaagtaggtgacgacgcatataacgatgctctgagatcggttggtctggttaacgtggatgaacaagcgactcaaggatggcaagagcagcaaagcctcagcatggaagatctcctgcaggtagatgacgttgcatgggatgacactctgatatctatggggcttatcaacttgttagatgaaccaatggctgaagaggccgccattggaggatcacaaggtcagcaaagcctcgccccggaggtcctccaagcaggtgacaatgcgtacggtgatgatcttgggtcgattgagatggtcaacttgttaaacgaaccaatgactcaagaagccgctattgccgatgctctggtggacgatcctatgaccctgattgcccaagacgatgtgccgtgggcttggagtcctgcagtgccgggtgactatggcattgattggatccaggatcctaacgcagaactgtatgggtaaaagatcgatgaccgagccgtggttgcgtacaagaatcggaccgggtggaagagaggtgtgagacagccttgagtccagtcaaaaataattgacttgcttactttattctaaaactgtttttggatggatttattctcttttatcgacaatcactccccattttacttctaatgaaagcaatgtaagggctagtttggtaaccctattttctcaagggattttcattttcctaagagaaattagttcatttttccataggaaaatagaaatctcttaaaaaaatggggttctcaaactagaaaaatcatggtattttgtttataaggggagtttggtttctagggactaatgtttaatccttccatattatttcattgtacttgtcggagagaaaattctccggccgggtggcggagtgcacccgtcctaaatcttaagatgaggaaggagttt

SEQ ID NO: 53632 - DNA, 2889 bp, Zea Mays
ccggtgtccggttgtcggtttgtgcgcctaaggactgctctatttttctttttttgagttccagtccaagcagtgagcgtctgcaggtggataaacccttagtctatgattacgcggcgccgcagtttagcttagcggtttttgcggtactttctaccatttgtttccttccaaacagcagaagcggccctggatttcattaaatgtggggctgctaaagcagcggaccttgatttggtgttggtggaggttaatcttaacaatatggcaccaggcacttcagcaaaccctgatctgttccatcacatactgaatgaacttcaagtccctcttaccgcaatgtgttctcgtgacgatgaagaggcactttccaaatgtatgaacctgggtgcatgcttccatctgctgaagccactgaacagaagaagcttcagcattctgtggcaccaagcactggaacacaagtctaaaaaggcagcacctcaaagaccaagtcttaatgatagtaccaaaaatagaatggtttcaccatctactgaaaaacccaaggaagtccttattctagagagaaacaatttatctgttcctcaaagcaatggatatgaagagccaaagaagcagaatcgggtcacatggaccattgaactccatgaaaagttcttggaggctgtcgaagctcttggggggaacaagtctgctagacctgagaagatcctgcacctgatgaatgtaaagggtttgactgtgaagcatataggcagccatctccagaaacatcgattgcgcaaccagaatacaaaacaaggacagcgccaagagaatgccagcagaaaacctatatcaaggcaaggtgaagccacttctgaatccatcacacccagagttgagacagacggggaagtgtacccctcaaggctgtggacaaaggtgaagaaaaggtcagtagacacatcggctctgaagactggcatgcacacatgcacatctggaaacgacaatgagggcacagagtctgtgtgggataggtatgaaaataacctgcaagtgttcgctgagaacaagaaacgttggatgttcacgagcgaacatcagtggcctcggagaaacaatattgataccacagacgaaggggatccaaatgaagcccccgaaactgctgctggtgcatccatagaaatctttggttcaagcagcttaataagtgatcaagtgggagagaaaaatcgtgttgaatctgacagagacaataacaccgtgtggagcactgatttactagaaggttatggtgcatccatagaaagctctggttcaagcagcctgttagcaaatgatcaagtgggagagaacaatcattctgaagctgccagagccaatgacagcatggggaacattactttgcttgaagcttacggtggtgcatacataggaacctctggttcaggcagcctgttaacaggcgatctagtcaggcagaacggttgtgctgaagctaccagacacaatgacaatttgtggggcgttaatctacctcaaggttatggcgcattcacagaaatctctggttcgagcaacatgttaacgagttatcaagtgggagagaacaatggcactgaatttgccagagacaatggccacatggagaacattagtttgctcgaagtttatggtgcatccatagaaaacgctggttcaagcagcatgttaacaagtgatcaagtcggacaaagcaatcttaccgaagctgacagaatctatgacaccatggggagcattaattaccttgaaggtaccgtggacccggagtacattgcaccaatggattattctgttgcttgggcgcacctagagggcaatggtccggacctgagaagcccttctgatggccgggaggaagcatattcattttggatgagtcagctggcaggaccacaagactatcaaagccttggcccggagggtttccttcaagtaggtgacgacgcatataacgatgctctgagatcggttggtctggttaacgtggatgaacaagcgactcaaggatggcaagagcagcaaagcctcagcatggaagatctcctgcaggtagatgacgttgcatgggatgacactctgatatctatggggcttatcaacttgttagatgaaccaatggctgaagaggccgccattggaggatcacaaggtcagcaaagcctcgccccggaggtcctccaagcaggtgacaatgcgtacggtgatgatcttgggtcgattgagatggtcaacttgttaaacgaaccaatgactcaagaagccgctattgccgatgctctggtggacgatcctatgaccctgattgcccaagacgatgtgccgtgggcttggagtcctgcagtgccgggtgactatggcattgattggatccaggatcctaacgcagaactgtatgggtaaaagatcgatgaccgagccgtggttgcgtacaagaatcggaccgggtggaagagaggtgtgagacagccttgagtccagtcaaaaataattgacttgcttactttattctaaaactgtttttggatggatttattctcttttatcgacaatcactccccattttacttctaatgaaagcaatgtaagggctagtttggtaaccctattttctcaagggattttcattttcctaagagaaattagttcatttttccataggaaaatagaaatctcttaaaaaaatggggttctcaaactagaaaaatcatggtattttgtttataaggggagtttggtttctagggactaatgtttaatccttccatattatttcattgtacttgtcggagagaaaattctccggccgggtggcggagtgcacccgtcctaaatcttaagatgaggaaggagttt

SEQ ID NO: 53633 - DNA, 4058 bp, Zea Mays
ggttgcgtcaccggtgccgccggtgtccggttgtcggtttgtgcgcctaaggactgctctatttttctttttttgagttccagtccaagcagtgagcgtctgcaggtggataaacccttagtctatgattacgcggcgccgcagtttagcttagcggtttttgcggtactttctaccatgttgttgctagtatgatatggtatatacatatacaatcagagaacgggcctggagattgcattgcaccataaggggggccagctccaaaatattactgtagcaggaaccaggaattgctgaaatgtacgaaatagaattgaatcttctcagagctagtttaagtatataatgtcatcgcgagacttttaccaaaatggaactgggaatcacagattggttgtggtcttctgggcgtaaatctccctagaactagtaaagacatcgccctcaaggactggcatttactttttccctctcctggtttcatagagaaatgaaacagggcggttttggagggagcaaaaaaaaagtagatttcaatgccattttggactgcccatagatatggtatgacatatattcgtttcccaggggtctactgtattattattatactaatggcaccgaaatggccgcggcttcatttaatgcgatgttgttgtcttttgtcccccattttctgcatgtcattttgtcaacagattcccacggacattgctaaaaccatgtgctgtggcaattactgccatcatagtttggtacttagtggttcctgtaattgcattagcatgtcaaatttgatgctacaaatcgcaaacaaagaggaataaatagaacggtagaggtttgcatgttaatattttaccagtttcccactagttttttttcttgaaaacgaatactccatagctcagagagtatggcaccctgaaagcaacatggttgcaagcttttgcatagaaaaatagttttgactttggatgctgatgtattgcttgagttaccatatctcttggctttactaacttctttgtgcagttgtgcatcagtccaaatacaggtcaacttaccattgaaacaagcgattccacacattttaaagccctgtctttttcttcatttatatattatataaagagtgcttacctctgacccactacgaaggtctcacaccagaaccagattatacatccttaacaaatactcaaagtttgtcgtcaaaataccttgatgacagaatgatggaaaggctttcagcgctggttcttgatggtgacccagcgtccttgtcgaccatctctgagacgcttgcaaagttcaacttcagagttgtttccttccaaacagcagaagcggccctggatttcattaaatgtggggctgctaaagcagcggaccttgatttggtgttggtggaggttaatcttaacaatatggcaccaggcacttcagcaaaccctgatctgttccatcacatactgaatgaacttcaagtccctcttaccgcaatgtgttctcgtgacgatgaagaggcactttccaaatgtatgaacctgggtgcatgcttccatctgctgaagccactgaacagaagaagcttcagcattctgtggcaccaagcactggaacacaagtctaaaaaggcagcacctcaaagaccaagtcttaatgatagtaccaaaaatagaatggtttcaccatctactgaaaaacccaaggaagtccttattctagagagaaacaatttatctgttcctcaaagcaatggatatgaagagccaaagaagcagaatcgggtcacatggaccattgaactccatgaaaagttcttggaggctgtcgaagctcttggggggaacaagtctgctagacctgagaagatcctgcacctgatgaatgtaaagggtttgactgtgaagcatataggcagccatctccagaaacatcgattgcgcaaccagaatacaaaacaaggacagcgccaagagaatgccagcagaaaacctatatcaaggcaaggtgaagccacttctgaatccatcacacccagagttgagacagacggggaagtgtacccctcaaggctgtggacaaaggtgaagaaaaggtcagtagacacatcggctctgaagactggcatgcacacatgcacatctggaaacgacaatgagggcacagagtctgtgtgggataggtatgaaaataacctgcaagtgttcgctgagaacaagaaacgttggatgttcacgagcgaacatcagtggcctcggagaaacaatattgataccacagacgaaggggatccaaatgaagcccccgaaactgctgctggtgcatccatagaaatctttggttcaagcagcttaataagtgatcaagtgggagagaaaaatcgtgttgaatctgacagagacaataacaccgtgtggagcactgatttactagaaggttatggtgcatccatagaaagctctggttcaagcagcctgttagcaaatgatcaagtgggagagaacaatcattctgaagctgccagagccaatgacagcatggggaacattactttgcttgaagcttacggtggtgcatacataggaacctctggttcaggcagcctgttaacaggcgatctagtcaggcagaacggttgtgctgaagctaccagacacaatgacaatttgtggggcgttaatctacctcaaggttatggcgcattcacagaaatctctggttcgagcaacatgttaacgagttatcaagtgggagagaacaatggcactgaatttgccagagacaatggccacatggagaacattagtttgctcgaagtttatggtgcatccatagaaaacgctggttcaagcagcatgttaacaagtgatcaagtcggacaaagcaatcttaccgaagctgacagaatctatgacaccatggggagcattaattaccttgaaggtaccgtggacccggagtacattgcaccaatggattattctgttgcttgggcgcacctagagggcaatggtccggacctgagaagcccttctgatggccgggaggaagcatattcattttggatgagtcagctggcaggaccacaagactatcaaagccttggcccggagggtttccttcaagtaggtgacgacgcatataacgatgctctgagatcggttggtctggttaacgtggatgaacaagcgactcaaggatggcaagagcagcaaagcctcagcatggaagatctcctgcaggtagatgacgttgcatgggatgacactctgatatctatggggcttatcaacttgttagatgaaccaatggctgaagaggccgccattggaggatcacaaggtcagcaaagcctcgccccggaggtcctccaagcaggtgacaatgcgtacggtgatgatcttgggtcgattgagatggtcaacttgttaaacgaaccaatgactcaagaagccgctattgccgatgctctggtggacgatcctatgaccctgattgcccaagacgatgtgccgtgggcttggagtcctgcagtgccgggtgactatggcattgattggatccaggatcctaacgcagaactgtatgggtaaaagatcgatgaccgagccgtggttgcgtacaagaatcggaccgggtggaagagaggtgtgagacagccttgagtccagtcaaaaataattgacttgcttactttattctaaaactgtttttggatggatttattctcttttatcgacaatcactccccattttacttctaatgaaagcaatgtaagggctagtttggtaaccctattttctcaagggattttcattttcctaagagaaattagttcatttttccataggaaaatagaaatctcttaaaaaaatggggttctcaaactagaaaaatcatggtattttgtttataaggggagtttggtttctagggactaatgtttaatccttccatattatttcattgtacttgtcggagagaaaattctccggccgggtggcggagtgcacccgtcctaaatcttaagatgaggaaggagttt

SEQ ID NO: 53634 - DNA, 1872 bp, Zea Mays
cattcccacgggtcctccactacgtgaaccggtccgcgccacccgagagtacggtactccaccatccagccacgtgccaggtgggtacacgccactcccgccatctctccactcccagtgggcgattgtcttttcacatatggagtagtcgggttcaggcttacccatgacgaggtatgtggccagttaaaagatcctagatcaacaggcctacaatcggtacagtccttgatcgacacagacgggcgacctgtcgagctcaacgtctggtctcattttaaacaaattctcaaagtttgatacctggcagaggtaccctgcttgaatgatgaattcatccccgcgggaggatgcctccatcatcccaagcccgttttcttttttaaaaatcatgagtcatagatcaaaaatatttttcttaatctataagcatgactaagcattactagtttttataaaacaggtaacaaggtatgataatcaatcttgcaaggatggtaatgcatcaagtgtttaatcattcaactcctatcacctaatgcagcatataagtgataaaattttataatacaagaaaggtggaaaatgcaccgggggctggccttattgcaggagaagatctaaaatccttctactctggtaagaagttagatgaaactccaccactggatcagcaggcactgaagtgaactccttctgcagacaccacttcttctaggtgttctacaagtcaattacatgtagatgaatgtttgttatggtacggaaatgcatttcataaagaaggtaacaaacaacccatcctgagtacactttaatacaaggtgcataaaactagccaaaacactagaggattaccaagggcactagaagacatcattaactaacaattcaccaggggactaacccatcttaaacttcatccaaaagctcaaactttttttaagcaacttcatttcctaattacccgaggttaaaatctttttcttttcgggcaacaatctatttgctgagcaaatttcttccaaacagtttcaaacttggaccaagtgctcagctggtcaagacaaggttccccaaaaatttggtatctactgtaaaactcctaaatttatttctactacaaagtacatgaatttacacacctcataaaactggtcttacaattttatcatttttgtacaatttttggcctaatttacaagctctcagctaaataaataagaaaaaaccatttctttatgtgctggaactagcccactgtggcccagcatcgggcagagtcggtctgcggctgggagccctcgtccgcgcctgctcttttgcgcaaagaccctagccgctcaaaaaaatccaacacgcatccttgccactattggctcctctcactgaccacttcacccaaacccctcaacttctctccttttacaaagtctcgaccccgacatggtcgcgcgagctccggcaaaccagcgtttgattaatctgggcggtgcaacgtaatcgacgacaacagcatccccgcgacctccgaaccatggcggacccgggcatgggcgtgaactcactttgcagagcacggaacattcaccacacgggtgaaaaactccacgagaaagcctggccacggtgaggtggggaatttagtgggcgtggtcaccaactagggagctggcacacagcacaagagcaaatcagatttgggggtttgaaagggaggttacctaggcctgaacactgccacatcactcacacgatgaccacaaatttggagctcaagagtaggggaaaaaattcacaaaaccaaaccctaaggtggctgaacgagggagcaaacagccatgagcacaccacgcaggcagtggagagtgg

SEQ ID NO: 53635 - DNA, 2099 bp, Zea Mays
cttcaaaggctaagctcaacaaagctatgggccttaaaaaagtaactttatgcatggcactgtttacctatttatagcgaagagatacaaattcgtgtgaaattacaaaactaccattcccacgggtcctccactacgtgaaccggtccgcgccacccgagagtacggtactccaccatccagccacgtgccaggtgggtacacgccactcccgccatctctccactcccagtgggcgattgtcttttcacatatggagtagtcgggttcaggcttacccatgacgaggtatgtggccagttaaaagatcctagatcaacaggcctacaatcggtacagtccttgatcgacacagacgggcgacctgtcgagctcaacgtctggtctcattttaaacaaattctcaaagtttgatacctggcagaggtaccctgcttgaatgatgaattcatccccgcgggaggatgcctccatcatcccaagcccgttttcttttttaaaaatcatgagtcatagatcaaaaatatttttcttaatctataagcatgactaagcattactagtttttataaaacaggtaacaaggtatgataatcaatcttgcaaggatggtaatgcatcaagtgtttaatcattcaactcctatcacctaatgcagcatataagtgataaaattttataatacaagaaaggtggaaaatgcaccgggggctggccttattgcaggagaagatctaaaatccttctactctggtaagaagttagatgaaactccaccactggatcagcaggcactgaagtgaactccttctgcagacaccacttcttctaggtgttctacaagtcaattacatgtagatgaatgtttgttatggtacggaaatgcatttcataaagaaggtaacaaacaacccatcctgagtacactttaatacaaggtgcataaaactagccaaaacactagaggattaccaagggcactagaagacatcattaactaacaattcaccaggggactaacccatcttaaacttcatccaaaagctcaaactttttttaagcaacttcatttcctaattacccgaggttaaaatctttttcttttcgggcaacaatctatttgctgagcaaatttcttccaaacagtttcaaacttggaccaagtgctcagctggtcaagacaaggttccccaaaaatttggtatctactgtaaaactcctaaatttatttctactacaaagtacatgaatttacacacctcataaaactggtcttacaattttatcatttttgtacaatttttggcctaatttacaagctctcagctaaataaataagaaaaaaccatttctttatgtgctggaactagcccactgtggcccagcatcgggcagagtcggtctgcggctgggagccctcgtccgcgcctgctcttttgcgcaaagaccctagccgctcaaaaaaatccaacacgcatccttgccactattggctcctctcactgaccacttcacccaaacccctcaacttctctccttttacaaagtctcgaccccgacatggtcgcgcgagctccggcaaaccagcgtttgattaatctgggcggtgcaacgtaatcgacgacaacagcatccccgcgacctccgaaccatggcggacccgggcatgggcgtgaactcactgcgaggacaccacaacccggtcaccgacggcggaaaacgcagcagacgagctcgatctcgcggccaccgtgtggtagaactccaatcaaaggcgtggagagtatcactgatctttgcagagcacggaacattcaccacacgggtgaaaaactccacgagaaagcctggccacggtgaggtggggaatttagtgggcgtggtcaccaactagggagctggcacacagcacaagagcaaatcagatttgggggtttgaaagggaggttacctaggcctgaacactgccacatcactcacacgatgaccacaaatttggagctcaagagtaggggaaaaaattcacaaaaccaaaccctaaggtggctgaacgagggagcaaacagccatgagcacaccacgcaggcagtggagagtgg

SEQ ID NO: 53636 - DNA, 2714 bp, Zea Mays
atgtgggctcgggacatgcggggtctacgtgtcagcgtcccggtcacagaatcacatcttcctggccgccatccgccggacggagcaccggacccgccgtacgcctccgtgctctcgctcgccgaggcctctccgcgggccgcagcgcggttccgcctcggtggccgccggagctgctgcctggccacaagaagccgtcgctctcccagctttgaaccggttccgatccgcaccacggagaagcccccgcctcgggagtctcgcgtcgccccgatgaaggtggagctcgccgcgcagacctcccagacgagcacgcccctgccgccgtcccctgaagccgcttctgcgtcgcccccggcggaggatgcgccgctcctccccgacgcgggcgtgcggcgccgggcggcgtgcgggcggttcgcgcagcgcagcggctccttccgccgcgaagtcggccgggccgccgccgagaccttcctcctcacgaggctcaccctgatcctcctccgctacctcgggataggctacagatggattcggcagttcctagccctctgctgttataccctcttgctgatgccaggttttattcaagttgtatattattatttcttctctagccaagttcatagaagtgttgtatatggagatcagccaagaaacagattggacctgtatatgcccactagtacaacagggttaaagccggtcgttgcgtttgtgactggtggagcgtggatcataggttacaaagggtggggagcccttttaggcagacgcttagcagaaaggggcatcatagttgcatgcattgattacagaaactttcctcaagggactattggtgacatggtagaagatgcttctcaaggaatagcttttgtctgcaagaatataacaagttatggaggtgatcctagcaggatatatcttgttggacaatcagctggtgcacatattgctgcttgtgctctcttaaatcaggccattagagaatccggtgaaggagatacttcctcttggagtgtatcacagctaaaagcttactttggtatttctggcgggtacaacctccttaacttggttgatcattttcatagacgtggcctttaccggtctatctttctcagtatcatggaaggtgaagtatcactccagaaattctctccacaaatgatgattatggagtcatctgctaggtctgcagtttctttattgcctcgcatcatccttttccacggaacaagtgattattcaatacctccagctgaaagccaagcatttgctgatgctttacaacagcaaggcgcaagggcagatctatttctgtacgaagggaagacgcatactgatttgttccttcaggatcctcttcggggcggcagagataaaatgctggaagagatcgcccgtgtgatacacagtgaggatccagacgctgctgcccagcacctcgtcgttgtgcctgttgcaaggcgccttgtacccgagttcatgctgaagcttgctgggagagtaagccctttctgaaggtgcttctaagtttgattgcgaccacgactgactagtatttgtgaattttctttttttatcttaagacaaacatggatgtacatgtacttgtgatcggagaaagtactcataattttctagacaggcaaaatgtgtactgacaacgatatcctcctcctcgtacactgctgacacttcgtacggcacaagccgttgtagaactcaaacataccctagactccattggaagaaaacacctcatggtcgacaggctgaccacacttcatcgtccattctgcttcctccatggacgaactagtgctacatcttagttgaactagctgtgggtgtacacaagatccaaacagtgtgtcgtcggcattacagtgcaccagacagaaatcttgtgtcgagattgctgtcgccatggacagtcctgccttaggagtgcatcctggagaccttttcagacaatccatcgacggtgccttccatctcctcaggtattccatcatcctagcagagaaaccaaacatgagtgacagatgcactacctaatctctaaataaggtgaacaaaggaaaaggtacaacttgcatgcaacagatcaatcttagatgtcctttggcacatcctttttcttgatgttgacagtgtgcatgccatcaaaaaaaaacaagaagacaacgacgacgacattggtagtgcacaagttgtgccaccctgcctacttgccacgagttgaattcaggcagttcagcattacctctggctctgggtgtttatttctgacaacgacgcacttggaagcgcttatgcttgcactcttcaggtagctccgagagcttaagcttgtgggtttcacatcatccatgtcagcatcctctgaccttggagggctcacggtagtgcgggcaacagaatctgcgcttctctcctggtcattaatttgttgttcagtattgccatccttggatacaaccactctttccctgccatacacagagacacgcaggatttagcacgaccgagagagagatcaaggcaacgggttctgcgctcctgaatcatgtaccttggtaaggaagcatgctttctttgcagtggggaacctctttctcctttgctgtaatgctcctcaagatgagcgaactgcagtttgaagcggtcgactccgctgcagcaaaggtagtagtgttagc

SEQ ID NO: 53637 - DNA, 2795 bp, Zea Mays
cggacgtcacatgggccggccgcgaataaaaaaaagaacgggacaagtcgacgttataataaaaaaaatactaataagaggttgacatgtgggctcgggacatgcggggtctacgtgtcagcgtcccggtcacagaatcacatcttcctggccgccatccgccggacggagcaccggacccgccgtacgcctccgtgctctcgctcgccgaggcctctccgcgggccgcagcgcggttccgcctcggtggccgccggagctgctgcctggccacaagaagccgtcgctctcccagctttgaaccggttccgatccgcaccacggagaagcccccgcctcgggagtctcgcgtcgccccgatgaaggtggagctcgccgcgcagacctcccagacgagcacgcccctgccgccgtcccctgaagccgcttctgcgtcgcccccggcggaggatgcgccgctcctccccgacgcgggcgtgcggcgccgggcggcgtgcgggcggttcgcgcagcgcagcggctccttccgccgcgaagtcggccgggccgccgccgagaccttcctcctcacgaggctcaccctgatcctcctccgctacctcgggctacagatggattcggcagttcctagccctctgctgttataccctcttgctgatgccaggttttattcaagttgtatattattatttcttctctagccaagttcatagaagtgttgtatatggagatcagccaagaaacagattggacctgtatatgcccactagtacaacagggttaaagccggtcgttgcgtttgtgactggtggagcgtggatcataggttacaaagggtggggagcccttttaggcagacgcttagcagaaaggggcatcatagttgcatgcattgattacagaaactttcctcaagggactattggtgacatggtagaagatgcttctcaaggaatagcttttgtctgcaagaatataacaagttatggaggtgatcctagcaggatatatcttgttggacaatcagctggtgcacatattgctgcttgtgctctcttaaatcaggccattagagaatccggtgaaggagatacttcctcttggagtgtatcacagctaaaagcttactttggtatttctggcgggtacaacctccttaacttggttgatcattttcatagacgtggcctttaccggtctatctttctcagtatcatggaaggtgaagtatcactccagaaattctctccacaaatgatgattatggagtcatctgctaggtctgcagtttctttattgcctcgcatcatccttttccacggaacaagtgattattcaatacctccagctgaaagccaagcatttgctgatgctttacaacagcaaggcgcaagggcagatctatttctgtacgaagggaagacgcatactgatttgttccttcaggatcctcttcggggcggcagagataaaatgctggaagagatcgcccgtgtgatacacagtgaggatccagacgctgctgcccagcacctcgtcgttgtgcctgttgcaaggcgccttgtacccgagttcatgctgaagcttgctgggagagtaagccctttctgaaggtgcttctaagtttgattgcgaccacgactgactagtatttgtgaattttctttttttatcttaagacaaacatggatgtacatgtacttgtgatcggagaaagtactcataattttctagacaggcaaaatgtgtactgacaacgatatcctcctcctcgtacactgctgacacttcgtacggcacaagccgttgtagaactcaaacataccctagactccattggaagaaaacacctcatggtcgacaggctgaccacacttcatcgtccattctgcttcctccatggacgaactagtgctacatcttagttgaactagctgtgggtgtacacaagatccaaacagtgtgtcgtcggcattacagtgcaccagacagaaatcttgtgtcgagattgctgtcgccatggacagtcctgccttaggagtgcatcctggagaccttttcagacaatccatcgacggtgccttccatctcctcaggtattccatcatcctagcagagaaaccaaacatgagtgacagatgcactacctaatctctaaataaggtgaacaaaggaaaaggtacaacttgcatgcaacagatcaatcttagatgtcctttggcacatcctttttcttgatgttgacagtgtgcatgccatcaaaaaaaaacaagaagacaacgacgacgacattggtagtgcacaagttgtgccaccctgcctacttgccacgagttgaattcaggcagttcagcattacctctggctctgggtgtttatttctgacaacgacgcacttggaagcgcttatgcttgcactcttcaggtagctccgagagcttaagcttgtgggtttcacatcatccatgtcagcatcctctgaccttggagggctcacggtagtgcgggcaacagaatctgcgcttctctcctggtcattaatttgttgttcagtattgccatccttggatacaaccactctttccctgccatacacagagacacgcaggatttagcacgaccgagagagagatcaaggcaacgggttctgcgctcctgaatcatgtaccttggtaaggaagcatgctttctttgcagtggggaacctctttctcctttgctgtaatgctcctcaagatgagcgaactgcagtttgaagcggtcgactccgctgcagcaaaggtagtagtgttagc

SEQ ID NO: 53638 - DNA, 222 bp, Zea Mays
atgttccatgtcattgtacataaactaccgacttgtgaaacaggaatcattaaccaatgcaaaagtctggttagcttctctgcagactccactagtgaatatggtgtgcattcactatcagtagctggtactcaaaataccatgatgccagcaaaatgcctcacagataacacaggcatttgctctttgaggtacaagaccctccggtctttactcttttga

SEQ ID NO: 53639 - DNA, 1094 bp, Zea Mays
gagccaacatggatacaaatacccgaagaatttcttctaatgcctcaaggtataataactttcaacaatgttgttcacgcctattgcagaattggatcctaaaagtacaaatgctgcaataagagtgcgtatcattagaaagtgggaattccgaggcgcaacaaatgatgggcctttgcgccatgtcaacctcatcttagctgatgaacagggaacagccatccacgctgagattcaagccgccctagtagctgacaaaggctcactaatccaaattgacaaagtctatgagctcaaacgctttcgtgttgctccatccagaaactattacaaacctgttgacaacagtatgatgatacaattcactctttacactcaagcaaagttagtccaagatccaccacccacctttccaagatacgcctacaaactcacatctttcgaaaatataggcaacaatgttgacaacaaaacgtacttgattgatgttctaggaatcttgacagaaattggatctttacaccatgttggttacaacaactcaaatatcatcagagacatatttctcaaggacataaacaatacctctacaaaagtgacgctttggggacaccaagcatctagcttctctgtcgacaacaactgcgacgagaatgataacaaacctgttgtcgtactatttgttggatgccttgctaaacgattcaaaggagaagcatatctaagtgccacggcagcatgtacatggtatttcaacccagacattcctgaagcccaggtgtattacagcaagttggtaaacactaagcttcaaatgatacgccctgaagcgactgagcaagaattccaggcttctcaaacactcaacatcgaagacaagaccattgaagaactacttcagctagatccggatatgttccctcaacaaggtttcaaatgcactgtcactatatcacgcctcgtacaagatggtagatggtggttcccatcctgtatcaagtgcaacaagtcttcatcctagacatctactgggtaccaatgtacatcgtgcaatgggacagaaactgagttcagatataaactcagcttcattg

SEQ ID NO: 53640 - DNA, 1317 bp, Zea Mays
ctcagtttagcaaatggatgctcgacattggagaaggaaagatacatgctacatcacgagaaggcgaagatgagccaacatggatacaaatacccgaagaatttcttctaatgcctcaaggtactcacaagtcaaaaattgtgctcattcctcgtgtatcattgacattgaaaaatacgaagtggccatttgtccttcaaagacgccaatacccgataaaagtgtgttatgcaatgacaatcaacaagagccaaggacaaacgctttcaaaggtataataactttcaacaatgttgttcacgcctattgcagaattggatcctaaaagtacaaatgctgcaataagagtgcgtatcattagaaagtgggaattccgaggcgcaacaaatgatgggcctttgcgccatgtcaacctcatcttagctgatgaacagggaacagccatccacgctgagattcaagccgccctagtagctgacaaaggctcactaatccaaattgacaaagtctatgagctcaaacgctttcgtgttgctccatccagaaactattacaaacctgttgacaacagtatgatgatacaattcactctttacactcaagcaaagttagtccaagatccaccacccacctttccaagatacgcctacaaactcacatctttcgaaaatataggcaacaatgttgacaacaaaacgtacttgattgatgttctaggaatcttgacagaaattggatctttacaccatgttggttacaacaactcaaatatcatcagagacatatttctcaaggacataaacaatacctctacaaaagtgacgctttggggacaccaagcatctagcttctctgtcgacaacaactgcgacgagaatgataacaaacctgttgtcgtactatttgttggatgccttgctaaacgattcaaaggagaagcatatctaagtgccacggcagcatgtacatggtatttcaacccagacattcctgaagcccaggtgtattacagcaagttggtaaacactaagcttcaaatgatacgccctgaagcgactgagcaagaattccaggcttctcaaacactcaacatcgaagacaagaccattgaagaactacttcagctagatccggatatgttccctcaacaaggtttcaaatgcactgtcactatatcacgcctcgtacaagatggtagatggtggttcccatcctgtatcaagtgcaacaagtcttcatcctagacatctactgggtaccaatgtacatcgtgcaatgggacagaaactgagttcagatataaactcagcttcattg

SEQ ID NO: 53641 - DNA, 1187 bp, Zea Mays
gtcatattcgtcctctgctgaagacaaaattcgtgaggaaaaataggtgcgaatttatgggaactactttgacatggaccccgtaaatccaaacagccacagaaagcggaattataacaatgcatgctacgccccatcaactttatctcatgcagaagcaaggcgtatacgtaagcgagtgctagatcagcgaaaactagcattagcaggatccagcatgccctctcagcatactcccacattgcaatgcggacacttcgatccagattttgtaaaaacgatcaaagctttgataccatgatcgatcgtattatggaagaccatcataccaatgtattcattgctccgcacttttttggcacggcgagagaataaggtcatctgtgggaacacgatccgtcatctacaatagttgttgtaaaggtggtaaagtccgcatacctgcttatagacccaggcctgaaccattattatcattagcaaggtttgatggcgatgtggtttcaaagaccttcatgcaaaatataaggcagtacaattgcttgtttgcatttacatctatgggcgctcatattgatagatcattgaatgatggtcgcggcccaccagtcttcaaggtatgtggtcagatccatcatcgaataggctcactactaccaatgaccgaccagccccccaaattccttcaactttatgtatatgatacatcacatgaggtaaacaatcgaatacggtctttatcaagtgacgatgctcctgattctcctatacagccacagattgttaatgaactattacaaatgttggacacccataatccttttgctaaaaaattcagaattgctaagaaaaggcttactgaacacgcaaatgaggaatttatcatcagaataattggagccaaagaaggagatcccgtgcaatatgacatgccaacaactgatgatttagccatgcttgttatcggtgatttctccctcgaaacctttaaacgggacattatcatagaaaccagaaattctgaattgaaacgtatttcatcgttacatccggcttatatggcccttcaatatccactcctatttccttatggagagcgaggtttccaagttggtgtcatgtatagcgggatacaaaataaacagccaaattcaagaatccatatgacaatgcaagactactattgc

SEQ ID NO: 53642 - DNA, 3173 bp, Zea Mays
cttgtatttgttgtatagttatagtgcactccacacaagaatggacacttctgtgcaaaccagccttatagaaactttatgttcctcatgctgttaatttcttctcggattcaaagtccatttacccattgacagcagcaccaagatggaggtaatgaaagctgtgagttttatgtacgtgcgcccaccgggatacaatgcagagagtgcaaaagctgctgaaattgaagatgagaagaagaggtcggatccaggtgacatgggtactgcatctgcaagtacctcttcaatacctgacaagggacctgaaaaggctaaatcaggcgcagataagaaaaataggccaaaagatgtttttggtcggccattggcaacagaacaagaatttgaagttctcaagaatgctccaaggttagacacaggtgctcctgcaagggtcaaaccatttggagttgaagttcgtaatgttagatgtttaaggtgtggaaactatggtcaccaaagtggtgaccgggaatgtcccttgaaggatgcaatcatgcctaacgaggagagtcggttgaaaagagacgatccacttacaactataatggcgcagacggattcaagtgagcctctgaagtgggaacttaagcagaaaccaggcatgagccctcctcgtggtggatttgacccagatgatcctaatcagcagattgtggcagaagacatctttgatgaatatggaggttttctgggcaactgtgatatcccagctctcatttccaatttttctgctaccaaatccaagaaacgttccaagaagaaaagcaagcacaagcaggctaagtctgctattcatgaggactctggtagacatgaaagcagttaccatctatcatcggactttgacaatgagaagagaaacataacatcaagaagcaagagaaagaaagcaaactgttctgattcatcatattctgattccgagatagatgctagaaaaggcaagagcaagtcaaagcataagcatacgaagaaataccagttaaagtcttctgattcagaatttgatgtccgtgaagatacaaggcggcgtctgaagagagaccacatgaaggagaaaagagatgagtcaccattgccgttctctaaggatcaaggagacacagaaggcaagaggcattcaaggtgttcaagggagaagcacaactacagttattcatcgagttcttctgagagaggcaggcggcgttcgagggagaaacgtcactacagttattcaccaagttcttctgagagaggcaggcattctctacggcacaaggagaaacaatattacagtgactcaagttctgatcggagccatcgacactcgagaagatcgagggagaagagacatgatagagactcaagttctcctgatgccatcaggcgctcaagtagatcgacggagaaacagcgccgtcctgatacaagcccacgtcatgccaacgggcattcaaagaaatcaagtggcaagcaagactatactgagcgtagccgttacgaaaccagtagacattcaaggagatctcaggagaaacggcactaccctgattctagcgcctctgattactcggactctgatcagcacaaaaaacatcgccaccatccagcagcagccgagagcccaaccccaactccacaagcaaagatgctgtcgtcttccacctccaccctccgcctccaccaaccaacccgaccccaccggcgccacccgccggccccggccttgggggtcgccacccacctggcctccccgcggcggtggcgcggacacgccccgggggcgggggcgcccctccgcgcgcggccccagcgcatccgcgcggtggacgccgcccagccgttcgactacgagtcccgcgcggcggggctgctggaggagcggcagcggctgaagatcgccatcgtcgggttcggcaacttcgggcagttcctggcgcgcacgttcgcgcggcaggggcacacgctgctggcgcactcgcggacggaccacacggcgctggcgacgacgctgggggccaccttcttcgcggacccgcacgacctgtgcgagtgccacccggacgtggtgctcctggccacctccatcctgtcggccgaggccgtgctgcgctcgctccccgtgcaccgcctccgccgcaacacgctcttcgtggacgtgctgtccgtgaaggagttccccaagaacctgctgctcagctccctgccccccgactttgacgtcatctgcacgcaccccatgttcgggccggagtcggcgcgcgacggctgggacggcctgcccttcgtgttcgaccgggtccgcgtcggggactgccccgcgcgccgcgcccgcgccgacgccttcctcaacatcttcgagcgcgagggctgccggatggtggagatgtcctgcgccgagcacgacgcgcacgccgccgagacccagttcctgacgcacaccgtggggcggatgctcgccatgctggagctgcgctccacgcccatcaacaccaagggctacgagacgctgctccgcctcgtggacaacacctgcagcgacagcttcgacctctacaacggcctcttcatgtacaacaagaactccaccgagctgctcaaccgcctcgagtgggccatggactccgtcaagaagaggctcttcgacggcctccacgacgtgcttcggaagcagctcttcgaggggtccccgcacgcccccgacgtctcctcctccaacgtccgcaagtagacacggccgccgccgggggggggggggggggttcgtctcgcccccaatctcatcatcatctgttgttagtaataaattaaattccagttccaattctccttgccattgtatttgtagtaccagcctgtatctgtattctccgtttctcctcccaactccctcctgtcagttcagttttacagttgagggatgaaatgtggcagcttggcattgcaatttgtgacaaacaaactgaataaataagcaatctttggcattgcaagtctgtaataataacaccaggacgagggaaaatcagaagaggtctcaaatacagtgcgcagtcaaaaaccagatggctttcgggtccctaattcatgaacgctgctgctgctgattacggttggtaagctgctttcttgacagcggtggcagg

SEQ ID NO: 53643 - DNA, 3401 bp, Zea Mays
gataggggtctttcggtaatttttcgaggagttggggagggagggattcgaccggcggcgatcgggataggcggaggccggcgagagcgatggaggaggaggtgacggggagcggcgggggaattgggcggaagatggcagcgggggaggtggatcttaaggagaaatcggggacggcgtggagccactcgtacctcaaccagaagccgtggcacccgctctcgtacccgaaccagcgccgcaagtggatcgccgagcaggtccacgccaatcacgcgcgccgccaggaggaggtgcagcgggagttcgcacaggaacaggagttcttccggcagaccgcactcttctctaagaaggacaaggagaagttcagatggaggtaatgaaagctgtgagttttatgtacgtgcgcccaccgggatacaatgcagagagtgcaaaagctgctgaaattgaagatgagaagaagaggtcggatccaggtgacatgggtactgcatctgcaagtacctcttcaatacctgacaagggacctgaaaaggctaaatcaggcgcagataagaaaaataggccaaaagatgtttttggtcggccattggcaacagaacaagaatttgaagttctcaagaatgctccaaggttagacacaggtgctcctgcaagggtcaaaccatttggagttgaagttcgtaatgttagatgtttaaggtgtggaaactatggtcaccaaagtggtgaccgggaatgtcccttgaaggatgcaatcatgcctaacgaggagagtcggttgaaaagagacgatccacttacaactataatggcgcagacggattcaagtgagcctctgaagtgggaacttaagcagaaaccaggcatgagccctcctcgtggtggatttgacccagatgatcctaatcagcagattgtggcagaagacatctttgatgaatatggaggttttctgggcaactgtgatatcccagctctcatttccaatttttctgctaccaaatccaagaaacgttccaagaagaaaagcaagcacaagcaggctaagtctgctattcatgaggactctggtagacatgaaagcagttaccatctatcatcggactttgacaatgagaagagaaacataacatcaagaagcaagagaaagaaagcaaactgttctgattcatcatattctgattccgagatagatgctagaaaaggcaagagcaagtcaaagcataagcatacgaagaaataccagttaaagtcttctgattcagaatttgatgtccgtgaagatacaaggcggcgtctgaagagagaccacatgaaggagaaaagagatgagtcaccattgccgttctctaaggatcaaggagacacagaaggcaagaggcattcaaggtgttcaagggagaagcacaactacagttattcatcgagttcttctgagagaggcaggcggcgttcgagggagaaacgtcactacagttattcaccaagttcttctgagagaggcaggcattctctacggcacaaggagaaacaatattacagtgactcaagttctgatcggagccatcgacactcgagaagatcgagggagaagagacatgatagagactcaagttctcctgatgccatcaggcgctcaagtagatcgacggagaaacagcgccgtcctgatacaagcccacgtcatgccaacgggcattcaaagaaatcaagtggcaagcaagactatactgagcgtagccgttacgaaaccagtagacattcaaggagatctcaggagaaacggcactaccctgattctagcgcctctgattactcggactctgatcagcacaaaaaacatcgccaccatccagcagcagccgagagcccaaccccaactccacaagcaaagatgctgtcgtcttccacctccaccctccgcctccaccaaccaacccgaccccaccggcgccacccgccggccccggccttgggggtcgccacccacctggcctccccgcggcggtggcgcggacacgccccgggggcgggggcgcccctccgcgcgcggccccagcgcatccgcgcggtggacgccgcccagccgttcgactacgagtcccgcgcggcggggctgctggaggagcggcagcggctgaagatcgccatcgtcgggttcggcaacttcgggcagttcctggcgcgcacgttcgcgcggcaggggcacacgctgctggcgcactcgcggacggaccacacggcgctggcgacgacgctgggggccaccttcttcgcggacccgcacgacctgtgcgagtgccacccggacgtggtgctcctggccacctccatcctgtcggccgaggccgtgctgcgctcgctccccgtgcaccgcctccgccgcaacacgctcttcgtggacgtgctgtccgtgaaggagttccccaagaacctgctgctcagctccctgccccccgactttgacgtcatctgcacgcaccccatgttcgggccggagtcggcgcgcgacggctgggacggcctgcccttcgtgttcgaccgggtccgcgtcggggactgccccgcgcgccgcgcccgcgccgacgccttcctcaacatcttcgagcgcgagggctgccggatggtggagatgtcctgcgccgagcacgacgcgcacgccgccgagacccagttcctgacgcacaccgtggggcggatgctcgccatgctggagctgcgctccacgcccatcaacaccaagggctacgagacgctgctccgcctcgtggacaacacctgcagcgacagcttcgacctctacaacggcctcttcatgtacaacaagaactccaccgagctgctcaaccgcctcgagtgggccatggactccgtcaagaagaggctcttcgacggcctccacgacgtgcttcggaagcagctcttcgaggggtccccgcacgcccccgacgtctcctcctccaacgtccgcaagtagacacggccgccgccgggggggggggggggggttcgtctcgcccccaatctcatcatcatctgttgttagtaataaattaaattccagttccaattctccttgccattgtatttgtagtaccagcctgtatctgtattctccgtttctcctcccaactccctcctgtcagttcagttttacagttgagggatgaaatgtggcagcttggcattgcaatttgtgacaaacaaactgaataaataagcaatctttggcattgcaagtctgtaataataacaccaggacgagggaaaatcagaagaggtctcaaatacagtgcgcagtcaaaaaccagatggctttcgggtccctaattcatgaacgctgctgctgctgattacggttggtaagctgctttcttgacagcggtggcagg

SEQ ID NO: 53644 - DNA, 3488 bp, Zea Mays
gttgactgggccgaaattccatataccgttggcctatatggaatcccggcccatataatatttgatccaactcagagctgctggcgatagccgataggggtctttcggtaatttttcgaggagttggggagggagggattcgaccggcggcgatcgggataggcggaggccggcgagagcgatggaggaggaggtgacggggagcggcgggggaattgggcggaagatggcagcgggggaggtggatcttaaggagaaatcggggacggcgtggagccactcgtacctcaaccagaagccgtggcacccgctctcgtacccgaaccagcgccgcaagtggatcgccgagcaggtccacgccaatcacgcgcgccgccaggaggaggtgcagcgggagttcgcacaggaacaggagttcttccggcagaccgcactcttctctaagaaggacaaggagaagatggaggtaatgaaagctgtgagttttatgtacgtgcgcccaccgggatacaatgcagagagtgcaaaagctgctgaaattgaagatgagaagaagaggtcggatccaggtgacatgggtactgcatctgcaagtacctcttcaatacctgacaagggacctgaaaaggctaaatcaggcgcagataagaaaaataggccaaaagatgtttttggtcggccattggcaacagaacaagaatttgaagttctcaagaatgctccaaggttagacacaggtgctcctgcaagggtcaaaccatttggagttgaagttcgtaatgttagatgtttaaggtgtggaaactatggtcaccaaagtggtgaccgggaatgtcccttgaaggatgcaatcatgcctaacgaggagagtcggttgaaaagagacgatccacttacaactataatggcgcagacggattcaagtgagcctctgaagtgggaacttaagcagaaaccaggcatgagccctcctcgtggtggatttgacccagatgatcctaatcagcagattgtggcagaagacatctttgatgaatatggaggttttctgggcaactgtgatatcccagctctcatttccaatttttctgctaccaaatccaagaaacgttccaagaagaaaagcaagcacaagcaggctaagtctgctattcatgaggactctggtagacatgaaagcagttaccatctatcatcggactttgacaatgagaagagaaacataacatcaagaagcaagagaaagaaagcaaactgttctgattcatcatattctgattccgagatagatgctagaaaaggcaagagcaagtcaaagcataagcatacgaagaaataccagttaaagtcttctgattcagaatttgatgtccgtgaagatacaaggcggcgtctgaagagagaccacatgaaggagaaaagagatgagtcaccattgccgttctctaaggatcaaggagacacagaaggcaagaggcattcaaggtgttcaagggagaagcacaactacagttattcatcgagttcttctgagagaggcaggcggcgttcgagggagaaacgtcactacagttattcaccaagttcttctgagagaggcaggcattctctacggcacaaggagaaacaatattacagtgactcaagttctgatcggagccatcgacactcgagaagatcgagggagaagagacatgatagagactcaagttctcctgatgccatcaggcgctcaagtagatcgacggagaaacagcgccgtcctgatacaagcccacgtcatgccaacgggcattcaaagaaatcaagtggcaagcaagactatactgagcgtagccgttacgaaaccagtagacattcaaggagatctcaggagaaacggcactaccctgattctagcgcctctgattactcggactctgatcagcacaaaaaacatcgccaccatccagcagcagccgagagcccaaccccaactccacaagcaaagatgctgtcgtcttccacctccaccctccgcctccaccaaccaacccgaccccaccggcgccacccgccggccccggccttgggggtcgccacccacctggcctccccgcggcggtggcgcggacacgccccgggggcgggggcgcccctccgcgcgcggccccagcgcatccgcgcggtggacgccgcccagccgttcgactacgagtcccgcgcggcggggctgctggaggagcggcagcggctgaagatcgccatcgtcgggttcggcaacttcgggcagttcctggcgcgcacgttcgcgcggcaggggcacacgctgctggcgcactcgcggacggaccacacggcgctggcgacgacgctgggggccaccttcttcgcggacccgcacgacctgtgcgagtgccacccggacgtggtgctcctggccacctccatcctgtcggccgaggccgtgctgcgctcgctccccgtgcaccgcctccgccgcaacacgctcttcgtggacgtgctgtccgtgaaggagttccccaagaacctgctgctcagctccctgccccccgactttgacgtcatctgcacgcaccccatgttcgggccggagtcggcgcgcgacggctgggacggcctgcccttcgtgttcgaccgggtccgcgtcggggactgccccgcgcgccgcgcccgcgccgacgccttcctcaacatcttcgagcgcgagggctgccggatggtggagatgtcctgcgccgagcacgacgcgcacgccgccgagacccagttcctgacgcacaccgtggggcggatgctcgccatgctggagctgcgctccacgcccatcaacaccaagggctacgagacgctgctccgcctcgtggacaacacctgcagcgacagcttcgacctctacaacggcctcttcatgtacaacaagaactccaccgagctgctcaaccgcctcgagtgggccatggactccgtcaagaagaggctcttcgacggcctccacgacgtgcttcggaagcagctcttcgaggggtccccgcacgcccccgacgtctcctcctccaacgtccgcaagtagacacggccgccgccgggggggggggggggggttcgtctcgcccccaatctcatcatcatctgttgttagtaataaattaaattccagttccaattctccttgccattgtatttgtagtaccagcctgtatctgtattctccgtttctcctcccaactccctcctgtcagttcagttttacagttgagggatgaaatgtggcagcttggcattgcaatttgtgacaaacaaactgaataaataagcaatctttggcattgcaagtctgtaataataacaccaggacgagggaaaatcagaagaggtctcaaatacagtgcgcagtcaaaaaccagatggctttcgggtccctaattcatgaacgctgctgctgctgattacggttggtaagctgctttcttgacagcggtggcagg

SEQ ID NO: 53645 - DNA, 1915 bp, Zea Mays
cgcgggtgtgtggcggcaggaattcgcgggaggaatggctggccggcgggagcccagatcaccctcaatcatgcttcgaccaggccaaagaagacggaattatctccgtcgccatccaccactcacaaccggaccgggggctgatgagatgaacgggaacgggtgcccctcgcctccgccgacgtggactcgctgcctgccccgcaaggcccccaggcctctcggttgcggttgcggttgcgtcccggcggcggtagggtgcgtcggctgggcatggaggccgactccgaggccgcgcgggggagggagggcagcaggggtgtcgcccaagtgctcgcactcggcggcggcggcgggagcggtacagtcggaggaccgccgccgcgaggtgctgtaccgcccggtggagctgcccgggacggggtacgggtctgagctggaggcgcggatcgagaaggtcatctacgcctgccgcttcatgaccttcttcggcatttgtggcttgctcctcggctctgtcccatgcttcctcaagggatgcgttttcgtgatggatgccttcgtcgagtactaccggcacggcgcagggaaggtcatcctcctgctggtggaagccattgagatgtttctcattgcaacggtcacgtttgtcttggggacgggcttgtacgagctcttcatcagtaacatggactccttttacgggtccaacctcttcggcctgttcagccttccggaacggcccaagtgggttgaaatcaagtcggtgaatgatctcaagacaaagctgggccatgtcattgtcatggttctgctggttggcatcttcgagaagagcaagagggtgaccatcacatcctgtgctgacctcttgtgctttgctggatcgattttcctgtcttcagtttgcctctacctgctttccaagctccataccaccaagggaggcagccaggcctgagatgagagtgtttgtattttgatgaggaagtactactactattacaattgatgcttcagttctacgacttctttcaaaccaagcgtccgcacatatcttgaggtacgttgtatagtgcttgggccacgaaggatgatggaacctcaaataaattataatgatgagttctaaccaaccaatgggaggcaatgttccaaaacaaaaaaagaccttgaagtgccctttccaaatcaaaatcaaagttccaggaatccttgaaaaaaatgttctcccacagggacgggacagtttttggtggcgcagttccctgcatatatttgtttgctttttttttcttttcttttttgctttgaacattagctgctacatactctttttccatatgcagtgaggagcaacaaaactagaagccccaacttgctttgggttcctccgcccattgtcttgtcctgctcgccgcgccagctcatgccaggaagctgggaacgagcagggcgcctgtcagcggcgtgcgtcctccatgcaccccaaggactgctccgcaggaggctgctgctactgctacccagaccgagtctaccactccaggacacagccccagcattggccacaacactcccccgaactgaaacgctagatcagtcatctgtgatctgtactgtacctcaagcttgtgtggcgttcccttgaaattcgtacggtttgtttaaactttgacaggcgtttgccatggagggcaacctgagttcacctgagcgtgcatgcttccatgctttgtttttccgcttttgcgtggaagacttgctgaacatgaggaggtgtagctgggctcttttgtaagttgttactgctcgatgctgtaaacttgaggaggtgtatgtaacctgaccttgtccaacgttttcctgccacgatgaagtagctctgcttgtatgtcattacttttactttccc

SEQ ID NO: 53646 - DNA, 977 bp, Zea Mays
cgcgggtgtgtggcggcaggaattcgcgggaggaatggctggccggcgggagcccagatcaccctcaatcatgcttcgaccaggccaaagaagacggaattatctccgtcgccatccaccactcacaaccggaccgggggctgatgagatgaacgggaacgggtgcccctcgcctccgccgacgtggactcgctgcctgccccgcaaggcccccaggcctctcggttgcggttgcggttgcgtcccggcggcggtagggtgcgtcggctgggcatggaggccgactccgaggccgcgcgggggagggagggcagcaggggtgtcgcccaagtgctcgcactcggcggcggcggcgggagcggtacagtcggaggaccgccgccgcgaggtgctgtaccgcccggtggagctgcccgggacggggtacgggtctgagctggaggcgcggatcgagaaggtcatctacgcctgccgcttcatgaccttcttcggcatttgtggcttgctcctcggctctgtcccatgcttcctcaagggatgcgttttcgtgatggatgccttcgtcgagtactaccggcacggcgcagggaaggtcatcctcctgctggtggaagccattgagatgtttctcattgcaacggtcacgtttgtcttggggacgggcttgtacgagctcttcatcagtaacatggactccttttacgggtccaacctcttcggcctgttcagccttccggaacggcccaagtgggttgaaatcaagtcggtgaatgatctcaagacaaagctgggccatgtcattgtcatggttctgctggttggcatcttcgagaagagcaagagggtgaccatcacatcctgtgctgacctcttgtgctttgctggatcgattttcctgtcttcagtttgcctctacctgctttccaagctccataccaccaagggaggcagccaggcctgagatgagagtgtttgta

SEQ ID NO: 53647 - DNA, 1189 bp, Zea Mays
cagaattctgatcctctgtttgttttgctgttttgctttatttgttgtgtatcttaatttctgaatttatctcaagcctgtacataaagtttgttgtcattgcttgctctttttaggttactatttatttcaaacagttattttatgtgactgacatttgagttctgcgttgaaaactgattaccaatggatgtatttatatggccattgtgtatgagtcaacgccataataatcctctccctgttttgtgcgtatatggtacctgtgcatgatatcactggttgagcatgagtgggggatatcttctttcagatttatattttgtttgctttatagtgttttttgtggattatgttatgtacaattgttttgagtatgtcccatctagtatagtattttaaacgtgtaactttatttgtttgttgtgttctgggaacacggatacaatctcaccccctcagtgtcaaaatcctttttaagtattgtaccacgttcccgtttcttgaccccatctatccggtaacttggttactaaggtctgactccttttctttgcctaactgttcattcgacatgataataacttctttaaaattagatcaaagctagtgatcattgctaacaactgtcctccgcttcggaagtctgaaattgagtactatgctatgctggctaaggtgacagtccaccacttccatggaaacaatgttgaccttggaacagcctgtggaaaatacttccgtgtctgctgcctcagcattatcgatcctggtgattctgatatcatcaagactacaccgggcgagcagtaaggatgccacaacagctgtactcggcatctgaattcttagtagctgatgattttgatgtacttgtcttttatcgtgttccgtcagaatttatagagttcttggcaacattgtgtggattgaacatttcgttccagacatttgctaattgttgaatggatctcttgccggatgtgctcggattacagcatttagtcccccactgctcaaaattgcactattctctgttgtgtcaaatttgtatcttgtttactgttggtacacgatgctgctttaaacatggtacctcgggcaggacagtcttgtcttaagtcatcggtattgtgatagtaaattttacatattcaagtcgtactcaatttataaggttgtttggtct

SEQ ID NO: 53648 - DNA, 583 bp, Zea Mays
aaaacgcaaatggcgttataaatagtgaagatgtggttgtctacactctaccgctagatagagtagctgattgcataagcaacatacagttggatccatttacacaaaagtcaacaaccagaacatctaatgtgtccagcaattccttgtcacgccaaagttcctaatagatgactcagaacgatagcaacgtgaggaaattcaacaatgtcgatgtgctttcgttttcagagctgttcatgattcgaagagttgcatatatctattgccttaaccacaagcctaactatgtacaagtacaaaggcgaaaaataccggtttatcctggttcattgtttgcttaaagtgcaaaccggcattggtaaacctcatacctttttttcacacttctgtccagcataaacattcaagagccatggaaatacagagttattgtcttgttgctgtgaccatcccagattttgcaggcaatacagttgatgaacagatgcatgaaactgagcctttcttctgagtaggttagaatacgtcaacctactttgcaagcagaacttccagttggatcaacatttgtcacgcctgt

SEQ ID NO: 53649 - DNA, 3147 bp, Zea Mays
ctcgtatatacacaagcttctttgtgagttacagcattgtgtgggcctagaagcgcgtgatgggccttgatccgttcctcttgacgcaggccgcggcgtcctggccccataaccacagcacatgacaacggtcaaaagcgcaggcatccgatgcgtggtggcccccctcggcgaccggccttctacttcttcaccgccacacgccgagagcgtgacaaggaaaggatcggacgccgcctccgctcccgtcgcagtcgcagcacattcaccctacctcactcgccctccccaccctcccctccagaccctcacacggtcacaccaccggcgccgcccgccctgtatggcctactactcgggcggcggcaagctgtcggcggtggacgccatcctggcggaggcggcggacctggtggcgctcgagcaggtcgccaagctcaacacggcccacctcgatgacgactccgcgcttccgtccagcctcgaggcccgcttccgcaagctcaagtccctcccctcgcccgccgcagtgccgcccgtcagcaccctcgcccgcagcgccaccgcgccgcgcccggcccccgctctgcccggccccgatcctcccgctcctgctccgcctgtgcatcacccggtccacgaagacccgccgccgggagacgcggagacgaagggcggcgggtcctcgccgcggcaggctcgcgccccggcacccgcacccacggtccacgccgacgacgccaaggacctagatcagctgttcgggtcggcgccgcggggccggccgacactgcgggagcggaacagggggagcgactcctcctccgtctccccctcgccgccgccgccgccgcgccaggcgtgctgcttcggcttctcccccaagaagcccctgcggagggcgccgtcggccaagggcaagaagaaggaggtctgccacgggtcccgcgacgtcctcggcgtcgacgccgacgagtggggcgacgagaacaggaggatcgccaccgagctcagggagcagcagcgccggctcaggaaggcgctggaggaccaggtgcaggtcagcagggagaccgccaagatggcgcgctgggtcaagcaggcgtccgcgcgcatgacgcacgccgaggccatcgacgacctgctcagtgactgcgaggacgacctcaaatgagctcacgccgacgctttgctcgtcggttcttccactgtctttgtcttgttggtgatcacaagtctgtcaaaaatgctcatatgttttcatgagtgcatttgcatccatgctttggtacaatgcttatacagaagaagcagagtcacgaaacaatgctatttcttttatgtcacatattattaggaccaggcaaagtatatgaatcgatggggcatataaggttttcatgagtgctgaactgctgatataggaaccaagaacgtggtgttgtgaaaaagatttgatcatgtgttctgtttccatgagaagtaattacacctggctattctaattttagtactgcatcaagtatttacaacctgccaggcttgaatcataattgcttgatcctactttgaatgtacatccttaaaatagaatttaagcagcataatgtgatactactacctccccttttgatacttgtcacccctattcatttttgagacatgacaaataaaaaagaacggagggaatatgaagcagagtaaaaacgcaaatggcgttataaatagtgaagatgtggttgtctacactctaccgctagatagagtagctgattgcataagcaacatacagttggatccatttacacaaaagtcaacaaccagaacatctaatgtgtccagcaattccttgtcacgccaaagttcctaatagatgactcagaacgatagcaacgtgaggaaattcaacaatgtcgatgtgctttcgttttcagagctgttcatgattcgaagagttgcatatatctattgccttaaccacaagcctaactatgtacaagtacaaaggcgaaaaataccggtttatcctggttcattgtttgcttaaagtgcaaaccggcattggtaaacctcatacctttttttcacacttctgtccagcataaacattcaagagccatggaaatacagagttattgtcttgttgctgtgaccatcccagattttgcaggcaatacagttgatgaacagatgcatgaaactgagcctttcttctgagtaggttagaatacgtcaacctactttgcaagcagaacttccagttggatcaacatttgtcacgcctcagaaaaaaaagaaaccaatggtgatgagtgtccctaaaggcctaaagaactctggtaattttactggcaccttttcaggttacaaagaatgtgaaatacaaagcaagagatcgattcttctcaggtgtctggcagctcaatgactgacaagggtgagctcgaaaggaaggagataggtagttttgtaatcccattcttcatgcagtaagtgggatgattttatttgcccacattgtaatttcatcattagtgtatcttttgagaaggacagggtaattttgttgggaatgtgagctattagattttgcatctattatgcagttgggataaaagaaacatgaggttaccaaattctggctagatgtgcaaaatcccaccacaacaaattctaatgttgcatgcaacaagagcattttgaatcaagacaaaaggagctcaaatgagctcacgccattgactgtcttgatggccacaaatctatcaaaatgtttgtcttgcttctcgttctagcagagtcacgagaggacgctgctcctttttttgtctcttaattttatgttattgttagcatcaagcaaaatctatgatctgatcaagtatgtaaggagtccatcagtgataatataggaacggagagcctacaattctgatgaaaaggtttgaccatgtgttttatttcattctgtatataaattataagcgatgaagcccacaataaataaactcaataataacagtgtggaaatgggtgccaaagttaattcagtaaccagaacaaaatcaaatatttacacttggctattctaattttaatagtacatcaagccatcaagtatttacagtctgtttattaggactgaat

SEQ ID NO: 53650 - DNA, 1120 bp, Zea Mays
gtcacatctcaccacatccgcgaccgcccgaccgcgacgctgaaggggaacgcctcgccgccaccggcgacagctggcgcgagaggctccgtcgacggacctgctactcgcttccttcatcgccacctcggatggcaggccccgttgaagcacacacactggctgcctcagcaccacctccgacgccaaaccctaacctggactggcgggttcgacacccacccaggcaccatcgcctaccctaaggtactctccgtccaatccccgtccaccttctgtgaatcaagttagacatgacaaatcaatcaagcacgttgatatcgagctttttgattctgcgtgagctccatgcatttcctattttttttccatcaatcgtcgtgtaggtgatggatcagcactcctgttgcttaagtttcgctgacaaggtcattaatgcatccagcggtgttttattatattgattgtgatgaccgatggcgacggcttggcctgtgtcagtcattcccaattcgccggtttgcccctacatttgttgtgtagtgtcattctctcaggcgtaccttctagatggttgacctcacgttactgccttcctcccaccaccccaccctccctagttcttattttttcttggaaaatgggatttagaaaataagatgttgcttcatttacttacattccttggtattggtaggtctttcatctggatgcagggaggagggagctctgcagcaaaggaagtctgtagtcaccatggtccatttcaagaacaggaagcatcaggcggcttgcaagaaagctgcactggagtgcgattgcgacgaagcgaaattttgaacagtacaggttggccgcgcggtggtagtgtcacggtgggtgtcgtccggtccgtagagatcgagctgctttgagaagattagagaggactagagagctagctagccgaagaaggaagaactcgtatctcccccttggtgtttttttctgtttcgttgtatccgcgtgatgctgttaattctgggctatctaaggattttttttttgccccagttattagcatgtgctcataccataacgaattgctgcattcttctgccaatacagttttggataatag

SEQ ID NO: 53651 - DNA, 719 bp, Zea Mays
agaatggcctgagtcacatctcaccacatccgcgaccgcccgaccgcgacgctgaaggggaacgcctcgccgccaccggcgacagctggcgcgagaggctccgtcgacggacctgctactcgcttccttcatcgccacctcggatggcaggccccgttgaagcacacacactggctgcctcagcaccacctccgacgccaaaccctaacctggactggcgggttcgacacccacccaggcaccatcgcctaccctaaggtctttcatctggatgcagggaggagggagctctgcagcaaaggaagtctgtagtcaccatggtccatttcaagaacaggtacatggtggtggaggtctttgtagatgcaggcagaggaagcatcaggcggcttgcaagaaagctgcactggagtgcgattgcgacgaagcgaaattttgaacagtacaggttggccgcgcggtggtagtgtcacggtgggtgtcgtccggtccgtagagatcgagctgctttgagaagattagagaggactagagagctagctagccgaagaaggaagaactcgtatctcccccttggtgtttttttctgtttcgttgtatccgcgtgatgctgttaattctgggctatctaaggattttttttttgccccagttattagcatgtgctcataccataacgaattgctgcattcttctgccaatacagttttggataatag

SEQ ID NO: 53652 - DNA, 1036 bp, Zea Mays
agaatggcctgagtcacatctcaccacatccgcgaccgcccgaccgcgacgctgaaggggaacgcctcgccgccaccggcgacagctggcgcgagaggctccgtcgacggacctgctactcgcttccttcatcgccacctcggatggcaggccccgttgaagcacacacactggctgcctcagcaccacctccgacgccaaaccctaacctggactggcgggttcgacacccacccaggcaccatcgcctaccctaaggtctttcatctggatgcagggaggagggagctctgcagcaaaggaagtctgtagtcaccatggtccatttcaagaacaggtacatggtggtggaggtctttgtagatgcaggcagaggtgatacagaacaatactgtcgcactgccttcttactttgatttggtgcacttatgaaaccttccagaaacacaccttatttatccatgtagttctgtctgttatgtccctgattaaagtattgctgcatgtcaatttggacgtacggtcagcctcattattatataacgtggcacttttgccacactgcaatactaataataacatgtagtccttaagaaaagggccgctagctctctctctctctttttgttatggccgaactgcctcagttgagctcatcaaccatcactgcattcactttttgttttttctaggaagcatcaggcggcttgcaagaaagctgcactggagtgcgattgcgacgaagcgaaattttgaacagtacaggttggccgcgcggtggtagtgtcacggtgggtgtcgtccggtccgtagagatcgagctgctttgagaagattagagaggactagagagctagctagccgaagaaggaagaactcgtatctcccccttggtgtttttttctgtttcgttgtatccgcgtgatgctgttaattctgggctatctaaggattttttttttgccccagttattagcatgtgctcataccataacgaattgctgcattcttctgccaatacagttttggataatag

SEQ ID NO: 53653 - DNA, 1488 bp, Zea Mays
gagaatggcctgagtcacatctcaccacatccgcgaccgcccgaccgcgacgctgaaggggaacgcctcgccgccaccggcgacagctggcgcgagaggctccgtcgacggacctgctactcgcttccttcatcgccacctcggatggcaggccccgttgaagcacacacactggctgcctcagcaccacctccgacgccaaaccctaacctggactggcgggttcgacacccacccaggcaccatcgcctaccctaaggtactctccgtccaatccccgtccaccttctgtgaatcaagttagacatgacaaatcaatcaagcacgttgatatcgagctttttgattctgcgtgagctccatgcatttcctattttttttccatcaatcgtcgtgtaggtgatggatcagcactcctgttgcttaagtttcgctgacaaggtcattaatgcatccagcggtgttttattatattgattgtgatgaccgatggcgacggcttggcctgtgtcagtcattcccaattcgccggtttgcccctacatttgttgtgtagtgtcattctctcaggcgtaccttctagatggttgacctcacgttactgccttcctcccaccaccccaccctccctagttcttattttttcttggaaaatgggatttagaaaataagatgttgcttcatttacttacattccttggtattggtaggtctttcatctggatgcagggaggagggagctctgcagcaaaggaagtctgtagtcaccatggtccatttcaagaacaggtacatggtggtggaggtctttgtagatgcaggcagaggtgatacagaacaatactgtcgcactgccttcttactttgatttggtgcacttatgaaaccttccagaaacacaccttatttatccatgtagttctgtctgttatgtccctgattaaagtattgctgcatgtcaatttggacgtacggtcagcctcattattatataacgtggcacttttgccacactgcaatactaataataacatgtagtccttaagaaaagggccgctagctctctctctctctttttgttatggccgaactgcctcagttgagctcatcaaccatcactgcattcactttttgttttttctaggaagcatcaggcggcttgcaagaaagctgcactggagtgcgattgcgacgaagcgaaattttgaacagtacaggttggccgcgcggtggtagtgtcacggtgggtgtcgtccggtccgtagagatcgagctgctttgagaagattagagaggactagagagctagctagccgaagaaggaagaactcgtatctcccccttggtgtttttttctgtttcgttgtatccgcgtgatgctgttaattctgggctatctaaggattttttttttgccccagttattagcatgtgctcataccataacgaattgctgcattcttctgccaatacagttttggataatag

SEQ ID NO: 53654 - DNA, 723 bp, Zea Mays
atttaatgcataattgttagcccagtggcaacattagccgtgagaatggcctgagtcacatctcaccacatccgcgaccgcccgaccgcgacgctgaaggggaacgcctcgccgccaccggcgacagctggcgcgagaggctccgtcgacggacctgctactcgcttccttcatcgccacctcggatggcaggccccgttgaagcacacacactggctgcctcagcaccacctccgacgccaaaccctaacctggactggcgggttcgacacccacccaggcaccatcgcctaccctaaggtctttcatctggatgcagggaggagggagctctgcagcaaaggaagtctgtagtcaccatggtccatttcaagaacaggaagcatcaggcggcttgcaagaaagctgcactggagtgcgattgcgacgaagcgaaattttgaacagtacaggttggccgcgcggtggtagtgtcacggtgggtgtcgtccggtccgtagagatcgagctgctttgagaagattagagaggactagagagctagctagccgaagaaggaagaactcgtatctcccccttggtgtttttttctgtttcgttgtatccgcgtgatgctgttaattctgggctatctaaggattttttttttgccccagttattagcatgtgctcataccataacgaattgctgcattcttctgccaatacagttttggataatag

SEQ ID NO: 53655 - DNA, 1854 bp, Zea Mays
acttgaacaggcctgctatgtggtgtttatgtgattggttcggatggctatgcgaaaagaaaaccctgtgcttaatgcttgtcaagcatccaatggccggatcacgcgagctcaagctgctgcaaatcgtcgaagctttggaactttcccttctgttccattgcctgcaaaaaccgaacgaaaacagactgcacaagggaaggcaaaacgaggttcttcatatgacaacaccagtgcaagtgttgcactttcaggcccccagcctaaaaggcgcacagtactcagggatgtgaccaatttgagcaatgctaactctaacaaaagttttgctgctgcaccgaagcttcagacaaagccctctctaaggactggaagaaccgtgagcaaaagcaagccgtgcgcaaaaaagattcctaaaaaaccaccaccagctggtaatggaagtgcattgactaatgttttgaacattgctgaagaaacacaagcggagaagattttggcagagagagtggaacccgttctgttgcttgagaacagggggccactttcattgcagaatgttgaaaggaacagggacagtgcttgtcatgaggtattctttgaggaaagaaacctcagggataaatgtgaaccttctgtgtcaaagaatggggactcttatgtgttagacattgtagatatcgacaaagataatggcaatcctcaaatgtgtgcttcctacgttgtggagatatactcaaacctaatggcttcagagcttatgagaagaccaagtccaaattacatggagggtttgcaacgggacatcacaaagggcatgagagaaatactcattgattggcttgtggaggtttctgaagaatacaagcttgttccagacacgctgtacctaactgtatatcttattgaccggtttctttctcggaactacattgaaagacagagactacaacttgtgggaataacaagcatgcttgttgcctcgaaatatgaagagatatgtgctcctcgagtagaagagttctgtttcataaccgacaatacatacacaaaagcagaggtgctgaaaatggagagccagctgctgaatgacctgggatttaacctttctgttccaactacaaaaacatttctcaggagattccttagagcggcacaagcatctcgtaaaactccttctatgactttaggatttctggccaattatctcgcggagttgactttgaccgaatatgagttcttgaaatttcttccgtcgttggtggcagcatcggccgtgtttcttgctagatggacgcttgaccaatccgacctcccatggaaccagactctagagcactacacctcttacaaatgctctgacattcaattgtgtgtctgtgctctacgggaactccagcataacaccagtaactgccctcttaacgccatccgcgagaagtacaggcatcaaaagtttgaatgcgtagcgaacctaacttcaccggagttccctcggtcgttcttcagctgacacgccaatggcaccgattgcctggcctttttcgagtcgcaagtgagatgaagaaggacagagagatggctccttggcttttcttttgtttgtttgacgtaaaaggttcacccggttgtaaacaacactgtgtgtagggctttttgcttgggctgttgttaattaactgtaaggggagatggtccggctggcttgtatgacgacaaacgacgggatgatgtttgtgttgacacaattcgttcattggtagcctcggaatggaaattagtttattgccagtgattactctggatggaatgactgattgagtgtttgttatatatacatgtgcctgattttac

SEQ ID NO: 53656 - DNA, 2145 bp, Zea Mays
gaaaccctcaccgagtccatccattttttccctctcctctctcctccgctcctccgctccggtctccgccctccctcacctctccgtcccaaaaagggcaacgaaatccagacaccgctccccatctccccttccttcctttcctactcccacactcccccaccctccactagtactagtactagtactagtaccacaaccaccccaccgggaaaaaacccaacaaggggtagggccgccgccgccgccagcgccgccgtgcagatcgcggccggatctacggcgctggggcacgggggtccccggatcgacgacgcctccgccgagggttcggatggctatgcgaaaagaaaaccctgtgcttaatgcttgtcaagcatccaatggccggatcacgcgagctcaagctgctgcaaatcgtcgaagctttggaactttcccttctgttccattgcctgcaaaaaccgaacgaaaacagactgcacaagggaaggcaaaacgaggttcttcatatgacaacaccagtgcaagtgttgcactttcaggcccccagcctaaaaggcgcacagtactcagggatgtgaccaatttgagcaatgctaactctaacaaaagttttgctgctgcaccgaagcttcagacaaagccctctctaaggactggaagaaccgtgagcaaaagcaagccgtgcgcaaaaaagattcctaaaaaaccaccaccagctggtaatggaagtgcattgactaatgttttgaacattgctgaagaaacacaagcggagaagattttggcagagagagtggaacccgttctgttgcttgagaacagggggccactttcattgcagaatgttgaaaggaacagggacagtgcttgtcatgaggtattctttgaggaaagaaacctcagggataaatgtgaaccttctgtgtcaaagaatggggactcttatgtgttagacattgtagatatcgacaaagataatggcaatcctcaaatgtgtgcttcctacgttgtggagatatactcaaacctaatggcttcagagcttatgagaagaccaagtccaaattacatggagggtttgcaacgggacatcacaaagggcatgagagaaatactcattgattggcttgtggaggtttctgaagaatacaagcttgttccagacacgctgtacctaactgtatatcttattgaccggtttctttctcggaactacattgaaagacagagactacaacttgtgggaataacaagcatgcttgttgcctcgaaatatgaagagatatgtgctcctcgagtagaagagttctgtttcataaccgacaatacatacacaaaagcagaggtgctgaaaatggagagccagctgctgaatgacctgggatttaacctttctgttccaactacaaaaacatttctcaggagattccttagagcggcacaagcatctcgtaaaactccttctatgactttaggatttctggccaattatctcgcggagttgactttgaccgaatatgagttcttgaaatttcttccgtcgttggtggcagcatcggccgtgtttcttgctagatggacgcttgaccaatccgacctcccatggaaccagactctagagcactacacctcttacaaatgctctgacattcaattgtgtgtctgtgctctacgggaactccagcataacaccagtaactgccctcttaacgccatccgcgagaagtacaggcatcaaaagtttgaatgcgtagcgaacctaacttcaccggagttccctcggtcgttcttcagctgacacgccaatggcaccgattgcctggcctttttcgagtcgcaagtgagatgaagaaggacagagagatggctccttggcttttcttttgtttgtttgacgtaaaaggttcacccggttgtaaacaacactgtgtgtagggctttttgcttgggctgttgttaattaactgtaaggggagatggtccggctggcttgtatgacgacaaacgacgggatgatgtttgtgttgacacaattcgttcattggtagcctcggaatggaaattagtttattgccagtgattactctggatggaatgactgattgagtgtttgttatatatacatgtgcctgattttac

SEQ ID NO: 53657 - DNA, 2098 bp, Zea Mays
gactgacttcatctgcatagagaagttgtacccttgtgtgggtattaggaaaccaccaaaattcgaatctggtcggttgtgtccatcagttaggaaaccatgaaaatttgaagctgatcggccatgtccatcaatttaacagtcaaggtttctgtttttgaatgagaatggggctatcctcagtttgagaaaaaggatactgaaactgctaccgctattggatcaaagtcctacaatgctcttgcttctggacttgctgaattcaagtcaggtaaaccaacagaagaaaacaaatatgtggaggaagaaactgttgattttgctgccgcaacaactgcagctttaaagattccatctcccagtgtttctcgtgggagatcgtttgatgaacatactctctcaaactcatcaactgtaccacataaaaggcgaggtgaccttgaggaagaagaggaactgatgagagtcctcaatctatctaaagctaaaagtggggatgtagaagtttcttttgacacttcacatagtcattcatcctccaatattgagacaccacaaaatgagagttttcagtcagaagcactcgagttggtggtggcgacaaaaaaagaggaatatggtaatcacgctacgagtgatcatgtctctatgctatcagtcacaaatgttgctattaatggcagcgaagttgtacccgaagaatcccaagaaaatttgatatctaaagaaccagaggacaatggaataaagaaccttgatatacccattcaattttcagaaactactccttatccgtctcatgaatcctttgctagcagtgaccaccaacctgctattcctacccttgttgaaggtgataaagaaacctgcaaagaacagttcgatgtacaaattcatggccagtctaatgatactgaggtcgcttgtgactcatcagttacaacttgtgaagctgttccagatcatgctacaacagaactggatgtgaaaagtgattctttagataattctcagtctctaccttcaagcattcaggaatgtgaaccaatataccaaggctgacaagattggggaaagcagttcttctggggatgacaaggccacagaacatcaattctcttctgtttacaagagggacttaacgaaagtgagctttgtgtcttcttccgcaataaccactttaacaccatgttcaagtacaacggaagtctatatctcctagcaactgatcaaggttttataagccaaactgatttggtatggcaaaggttggatgaggtgaatggagatggcgtttttcttactagcaacttcacaccatttaatgctgaaactccaagaaatgattcatggaatgaacagcaagctatgacgagtactgctgattatcttgctcaatttgacaactccacttctggaaactctgatcttgagctagctatagcactccaacagcaagagtttgagcggcaaccacaaaggtttcaagctccacagccgcagcagcaacagcaacaacagcaacaaccaccacctcagacgcagtaccagactcaatctggccgaccaggacttgttgttggtccaaggaggtccaacgccccacctccgtccagaagtgaatcgaagaaagagagatgcatcgtgatgtaaaaataccttcaacagaaatgtagaagaaaaagagagaaggaactcattaagtcattatactgtaaagaaatgttttcttctgcggaggcagtgtctgcgtttagtcaccttgagccatctcccatttgagctttttttttggttttactttctctgatgtatgtaaataacctaaacgaataaagtgtagaaacagatgctgtcaaagtgatggccccatgcaatgtgatttcattcatcgccccgtgcaatttgattttttttcgtagccctctgaaatcgattgattctatttcacttgtcacaatgtaacgctaatttttgaattctaaaattgtgggttattttgataacctgtttagttgtatttattttcagaaaagaactacatatttacttttcacgataaatgaaagtttcgtaaaaataaactaaaaataaaggt

SEQ ID NO: 53658 - DNA, 2743 bp, Zea Mays
cctaaatacaccctcgctccgcccaccttctcccacccactgcctcgtattctattcccctgcctccccatctccgccgtcctcgccttctccaatccactagtcgacaccgcacgcgctcgcctcctcccgcggcgtcgccatagggttagggttccggcgacttccctcctttccgcgtcgcggcgaacgccttgggagacccgccccatgtcgtccgacccatcgccccacctcccctcgccggtggccccgccgggcgcggcggaggcggatccccatcacctgccccaacccgccgagccacacgaggtgatgcaccggacgagggccgtcgacttcctcgggcgacgcacgcccatcgtctaccagaacgacaacgggccctgcccgctcctcgccatctgtaacgtcctgctgctgaagaatgtgatcagtctgaaccctgacgctggcgaggtgtcgcagcagaagctgctctcgctcgtggccgagcgcctcatcgaccccaacattgccggacaggataaggacgaggagtatgtttgcaaccgggagcagaacatcgcggatgccattgatcttctcccgcgccttgcaacaggcattgacgtgaatgtgatgtttaggaagattgatgactttgagttcacccgagaacgtgctatatttgatcttcttgatatcccgctataccatggatggatagtggaccctcaggatactgaaactgctaccgctattggatcaaagtcctacaatgctcttgcttctggacttgctgaattcaagtcaggtaaaccaacagaagaaaacaaatatgtggaggaagaaactgttgattttgctgccgcaacaactgcagctttaaagattccatctcccagtgtttctcgtgggagatcgtttgatgaacatactctctcaaactcatcaactgtaccacataaaaggcgaggtgaccttgaggaagaagaggaactgatgagagtcctcaatctatctaaagctaaaagtggggatgtagaagtttcttttgacacttcacatagtcattcatcctccaatattgagacaccacaaaatgagagttttcagtcagaagcactcgagttggtggtggcgacaaaaaaagaggaatatggtaatcacgctacgagtgatcatgtctctatgctatcagtcacaaatgttgctattaatggcagcgaagttgtacccgaagaatcccaagaaaatttgatatctaaagaaccagaggacaatggaataaagaaccttgatatacccattcaattttcagaaactactccttatccgtctcatgaatcctttgctagcagtgaccaccaacctgctattcctacccttgttgaaggtgataaagaaacctgcaaagaacagttcgatgtacaaattcatggccagtctaatgatactgaggtcgcttgtgactcatcagttacaacttgtgaagctgttccagatcatgctacaacagaactggatgtgaaaagtgattctttagataattctcagtctctaccttcaagcattcaggaatgtgaaccaatataccaaggtgaagagcacatacttggcaccacaaatatggtgtatgaaaatcaagagccagtgtatgagggggaggtggttcttgctgagcaggctgacaagattggggaaagcagttcttctggggatgacaaggccacagaacatcaatgggaactgattgataattttctgctgaccactgctaaccagctgactgtctatggtctcttctgtttacaagagggacttaacgaaagtgagctttgtgtcttcttccgcaataaccactttaacaccatgttcaagtacaacggaagtctatatctcctagcaactgatcaaggttttataagccaaactgatttggtgaatggagatggcgtttttcttactagcaacttcacaccatttaatgctgaaactccaagaaatgattcatggaatgaacagcaagctatgacgagtactgctgattatcttgctcaatttgacaactccacttctggaaactctgatcttgagctagctatagcactccaacagcaagagtttgagcggcaaccacaaaggtttcaagctccacagccgcagcagcaacagcaacaacagcaacaaccaccacctcagacgcagtaccagactcaatctggccgaccaggacttgttgttggtccaaggaggtccaacgccccacctccgtccagaagtgaatcgaagaaagagagatgcatcgtgatgtaaaaataccttcaacagaaatgtagaagaaaaagagagaaggaactcattaagtcattatactgtaaagaaatgttttcttctgcggaggcagtgtctgcgtttagtcaccttgagccatctcccatttgagctttttttttggttttactttctctgatgtatgtaaataacctaaacgaataaagtgtagaaacagatgctgtcaaagtgatggccccatgcaatgtgatttcattcatcgccccgtgcaatttgattttttttcgtagccctctgaaatcgattgattctatttcacttgtcacaatgtaacgctaatttttgaattctaaaattgtgggttattttgataacctgtttagttgtatttattttcagaaaagaactacatatttacttttcacgataaatgaaagtttcgtaaaaataaactaaaaataaaggt

SEQ ID NO: 53659 - DNA, 2182 bp, Zea Mays
cctaaatacaccctcgctccgcccaccttctcccacccactgcctcgtattctattcccctgcctccccatctccgccgtcctcgccttctccaatccactagtcgacaccgcacgcgctcgcctcctcccgcggcgtcgccatagggttagggttccggcgacttccctcctttccgcgtcgcggcgaacgccttgggagacccgccccatgtcgtccgacccatcgccccacctcccctcgccggtggccccgccgggcgcggcggaggcggatccccatcacctgccccaacccgccgagccacacgaggtgatgcaccggacgagggccgtcgacttcctcgggcgacgcacgcccatcgtctaccagaacgacaacgggccctgcccgctcctcgccatctgtaacgtcctgctgctgaagaatgtgatcagtctgaaccctgacgctggcgaggtgtcgcagcagaagctgctctcgctcgtggccgagcgcctcatcgaccccaacattgccggacaggataaggacgaggagtatgtttgcaaccgggagcagaacatcgcggatgccattgatcttctcccgcgccttgcaacaggcattgacgtgaatgtgatgtttaggaagattgatgactttgagttcacccgagaacgtgctatatttgatcttcttgatatcccgctataccatggatggatagtggaccctcaggatactgaaactgctaccgctattggatcaaagtcctacaatgctcttgcttctggacttgctgaattcaagtcaggtgataaagaaacctgcaaagaacagttcgatgtacaaattcatggccagtctaatgatactgaggtcgcttgtgactcatcagttacaacttgtgaagctgttccagatcatgctacaacagaactggatgtgaaaagtgattctttagataattctcagtctctaccttcaagcattcaggaatgtgaaccaatataccaaggtgaagagcacatacttggcaccacaaatatggtgtatgaaaatcaagagccagtgtatgagggggaggtggttcttgctgagcaggctgacaagattggggaaagcagttcttctggggatgacaaggccacagaacatcaatgggaactgattgataattttctgctgaccactgctaaccagctgactgtctatggtctcttctgtttacaagagggacttaacgaaagtgagctttgtgtcttcttccgcaataaccactttaacaccatgttcaagtacaacggaagtctatatctcctagcaactgatcaaggttttataagccaaactgatttggtatggcaaaggttggatgaggtgaatggagatggcgtttttcttactagcaacttcacaccatttaatgctgaaactccaagaaatgattcatggaatgaacagcaagctatgacgagtactgctgattatcttgctcaatttgacaactccacttctggaaactctgatcttgagctagctatagcactccaacagcaagagtttgagcggcaaccacaaaggtttcaagctccacagccgcagcagcaacagcaacaacagcaacaaccaccacctcagacgcagtaccagactcaatctggccgaccaggacttgttgttggtccaaggaggtccaacgccccacctccgtccagaagtgaatcgaagaaagagagatgcatcgtgatgtaaaaataccttcaacagaaatgtagaagaaaaagagagaaggaactcattaagtcattatactgtaaagaaatgttttcttctgcggaggcagtgtctgcgtttagtcaccttgagccatctcccatttgagctttttttttggttttactttctctgatgtatgtaaataacctaaacgaataaagtgtagaaacagatgctgtcaaagtgatggccccatgcaatgtgatttcattcatcgccccgtgcaatttgattttttttcgtagccctctgaaatcgattgattctatttcacttgtcacaatgtaacgctaatttttgaattctaaaattgtgggttattttgataacctgtttagttgtatttattttcagaaaagaactacatatttacttttcacgataaatgaaagtttcgtaaaaataaactaaaaataaaggt

SEQ ID NO: 53660 - DNA, 2680 bp, Zea Mays
cctaaatacaccctcgctccgcccaccttctcccacccactgcctcgtattctattcccctgcctccccatctccgccgtcctcgccttctccaatccactagtcgacaccgcacgcgctcgcctcctcccgcggcgtcgccatagggttagggttccggcgacttccctcctttccgcgtcgcggcgaacgccttgggagacccgccccatgtcgtccgacccatcgccccacctcccctcgccggtggccccgccgggcgcggcggaggcggatccccatcacctgccccaacccgccgagccacacgaggtgatgcaccggacgagggccgtcgacttcctcgggcgacgcacgcccatcgtctaccagaacgacaacgggccctgcccgctcctcgccatctgtaacgtcctgctgctgaagaatgtgatcagtctgaaccctgacgctggcgaggtgtcgcagcagaagctgctctcgctcgtggccgagcgcctcatcgaccccaacattgccggacaggataaggacgaggagtatgtttgcaaccgggagcagaacatcgcggatgccattgatcttctcccgcgccttgcaacaggcattgacgtgaatgtgatgtttaggaagattgatgactttgagttcacccgagaacgtgctatatttgatcttcttgatatcccgctataccatggatggatagtggaccctcaggatactgaaactgctaccgctattggatcaaagtcctacaatgctcttgcttctggacttgctgaattcaagtcaggtaaaccaacagaagaaaacaaatatgtggaggaagaaactgttgattttgctgccgcaacaactgcagctttaaagattccatctcccagtgtttctcgtgggagatcgtttgatgaacatactctctcaaactcatcaactgtaccacataaaaggcgaggtgaccttgaggaagaagaggaactgatgagagtcctcaatctatctaaagctaaaagtggggatgtagaagtttcttttgacacttcacatagtcattcatcctccaatattgagacaccacaaaatgagagttttcagtcagaagcactcgagttggtggtggcgacaaaaaaagaggaatatggtaatcacgctacgagtgatcatgtctctatgctatcagtcacaaatgttgctattaatggcagcgaagttgtacccgaagaatcccaagaaaatttgatatctaaagaaccagaggacaatggaataaagaaccttgatatacccattcaattttcagaaactactccttatccgtctcatgaatcctttgctagcagtgaccaccaacctgctattcctacccttgttgaagttacaacttgtgaagctgttccagatcatgctacaacagaactggatgtgaaaagtgattctttagataattctcagtctctaccttcaagcattcaggaatgtgaaccaatataccaaggtgaagagcacatacttggcaccacaaatatggtgtatgaaaatcaagagccagtgtatgagggggaggtggttcttgctgagcaggctgacaagattggggaaagcagttcttctggggatgacaaggccacagaacatcaatgggaactgattgataattttctgctgaccactgctaaccagctgactgtctatggtctcttctgtttacaagagggacttaacgaaagtgagctttgtgtcttcttccgcaataaccactttaacaccatgttcaagtacaacggaagtctatatctcctagcaactgatcaaggttttataagccaaactgatttggtatggcaaaggttggatgaggtgaatggagatggcgtttttcttactagcaacttcacaccatttaatgctgaaactccaagaaatgattcatggaatgaacagcaagctatgacgagtactgctgattatcttgctcaatttgacaactccacttctggaaactctgatcttgagctagctatagcactccaacagcaagagtttgagcggcaaccacaaaggtttcaagctccacagccgcagcagcaacagcaacaacagcaacaaccaccacctcagacgcagtaccagactcaatctggccgaccaggacttgttgttggtccaaggaggtccaacgccccacctccgtccagaagtgaatcgaagaaagagagatgcatcgtgatgtaaaaataccttcaacagaaatgtagaagaaaaagagagaaggaactcattaagtcattatactgtaaagaaatgttttcttctgcggaggcagtgtctgcgtttagtcaccttgagccatctcccatttgagctttttttttggttttactttctctgatgtatgtaaataacctaaacgaataaagtgtagaaacagatgctgtcaaagtgatggccccatgcaatgtgatttcattcatcgccccgtgcaatttgattttttttcgtagccctctgaaatcgattgattctatttcacttgtcacaatgtaacgctaatttttgaattctaaaattgtgggttattttgataacctgtttagttgtatttattttcagaaaagaactacatatttacttttcacgataaatgaaagtttcgtaaaaataaactaaaaataaaggt

SEQ ID NO: 53661 - DNA, 2334 bp, Zea Mays
cctaaatacaccctcgctccgcccaccttctcccacccactgcctcgtattctattcccctgcctccccatctccgccgtcctcgccttctccaatccactagtcgacaccgcacgcgctcgcctcctcccgcggcgtcgccatagggttagggttccggcgacttccctcctttccgcgtcgcggcgaacgccttgggagacccgccccatgtcgtccgacccatcgccccacctcccctcgccggtggccccgccgggcgcggcggaggcggatccccatcacctgccccaacccgccgagccacacgaggtgatgcaccggacgagggccgtcgacttcctcgggcgacgcacgcccatcgtctaccagaacgacaacgggccctgcccgctcctcgccatctgtaacgtcctgctgctgaagaatgtgatcagtctgaaccctgacgctggcgaggtgtcgcagcagaagctgctctcgctcgtggccgagcgcctcatcgaccccaacattgccggacaggataaggacgaggagtatgtttgcaaccgggagcagaacatcgcggatgccattgatcttctcccgcgccttgcaacaggcattgacgtgaatgtgatgtttaggaagattgatgactttgagttcacccgagaacgtgctatatttgatcttcttgatatcccgctataccatggatggatagtggaccctcaggatactgaaactgctaccgctattggatcaaagtcctacaatgctcttgcttctggacttgctgaattcaagtcaggtaaaccaacagaagaaaacaaatatgtggaggaagaaactgttgattttgctgccgcaacaactgcagctttaaagattccatctcccagtgtttctcgtgggagatcgtttgatgaacatactctctcaaactcatcaactgtaccacataaaaggcgaggtgaccttgaggaagaagaggaactgatgagagtcctcaatctatctaaagctaaaagtggggatgtagaagtttcttttgacacttcacatagtcattcatcctccaatattgagacaccacaaaatgagagttttcagtcagaagcactcgagttggtggtggcgacaaaaaaagaggaatatggtaatcacgctacgagtgatcatgtctctatgctatcagtcacaaatgttgctattaatggcagcgaagttgtacccgaagaatcccaagaaaatttgatatctaaagaaccagaggacaatggaataaagaaccttgatatacccattcaattttcagaaactactccttatccgtctcatgaatcctttgctagcagtgaccaccaacctgctattcctacccttgttgaaggtgataaagaaacctgcaaagaacagttcgatgtacaaattcatggccagtctaatgatactgaggtcgcttgtgactcatcagttacaacttgtgaagctgttccagatcatgctacaacagaactggatgtgaaaagtgattctttagataattctcagtctctaccttcaagcattcaggaatgtgaaccaatataccaaggtgaagagcacatacttggcaccacaaatatggtgtatgaaaatcaagagccagtgtatgagggggaggtggttcttgctgagcaggctgacaagattggggaaagcagttcttctggggatgacaaggccacagaacatcaatgggaactgattgataattttctgctgaccactgctaaccagctgactgtctatggtctcttctgtttacaagagggacttaacgaaagtgagctttgtgtcttcttccgcaataaccactttaacaccatgttcaagtacaacggaagtctatatctcctagcaactgatcaaggttttataagccaaactgatttggtatggcaaaggttggatgaggtgaatggagatggcgtttttcttactagcaacttcacaccatttaatgctgaaactccaagaaatgattcatggaatgaacagcaagctatgacgagtactgctgattatcttgctcaatttgacaactccacttctggaaactctgatcttgagctagctatagcactccaacagcaagagtttgagcggcaaccacaaaggtttcaagctccacagccgcagcagcaacagcaacaacagcaacaaccaccacctcagacgcagtaccagactcaatctggccgaccaggacttgttgttggtccaaggtacattatttctgggaggtctttaaaggttcccttgtggaagtcacctgttttccctcatacacttcatacaaaaaat

SEQ ID NO: 53662 - DNA, 1809 bp, Zea Mays
caaaatacacacccgacccaacccagcccacatccgaggagccaccgcaaccgcatgcaactgcgccgcctctcgcctctcctagcgagcccgcgccgccgcctgcgattgcgctcccccacaaaccctagctctgccaccatgtccccgggcgccgctcacctggccactgccgccgacccggacgaggacctctgcgcgagcgccggggcgtcagaagcggaggtccccgcgcctgccccgcatcttccaccgctgccggtgtccgcggaggagcggttggaacgcgcttgggcgcactggaggcggctggggtccccacggctgctggtggcgccgatggtggacaactcggagctccccttccgcatgctgtgccgccgctacggcgccgacgcggcgtacacgcccatgctccactctcgcatcttctccgagaatgagaagtacaggtccatggagttcaccacgtgcaaggaggaccgaccactttttgttcagttttgtgccaatgatcctgacattttgttgcaagctgcgaagaaggtggaaccatattgcgactacgttgatatcaattttggttgcccgcagcgtattgcaagacggggtaactatggagcatttctcatggacaaccttcccctcgtaaaatccctcgtgcagaatctagcagctaatcttcatgttccagtctcagttaagatccgtgtatttccacgactggaagacacattagcatatgcgaagatgcttgaggaagctggtgcttctcttgtggctgtccacggccggacaagagacgaaaaggatgggaagaaatttcgagctgactgggatgccatcaaggccgtgaaggatgcacttagagtacccgttcttgcaaatggaaacattcgccatatggaggatgtgaagaactgccttgaacatactggtgctgatggtgtgctttcagctgaaactcttctagaaaacccagcagtttttgctggtttcaggacaaaggaatggaaagaagatggtgacgagaatggagacggtggcttggaccaggctgatcttgtgattgaatatctgaagctgtgtgagcagtaccctgtgccgtggagaatggttagatcccatgtccacaagatgttgggcgactggtttagggtgcatccagaggtgagggaggaacttaataagcagaacaagctcaccttcgaatggttgcatgacatggtaatgaggctgaaggacctcggtggaagagtgccactttacagaaaggagactgcactaggacaaacattagcctctagcaatgcctgacaggttcttatatctgcagcctatcattattggagaggagcaattgatgaaaactgaagcattttgtaccaattttgacctgctatagtacagactggaagagattgttggactacaattaaacctcgattagtaaagcatattttgagttgagcagctacagtgcaacggctcacctcattgttgtaacagctgatatgtaaaatcatttttacatcattacatggtctcagataatttggatttgctattgaacttatctttggacgcttcacaaagctatattaccaacatgttcgcgcgcatgttcagctgcgcatatatttcacagaacctctggccgtctggcgtgcaagcaatgacaaaatcatgtacagtactatcaatgctggtggacgcaagaaaagaaaagaaccctactgctcgccactctgaaatggtggccattacaacggctcttcttcgagctccggccgccaatcgggcttctct

SEQ ID NO: 53663 - DNA, 2272 bp, Zea Mays
caaaatacacacccgacccaacccagcccacatccgaggagccaccgcaaccgcatgcaactgcgccgcctctcgcctctcctagcgagcccgcgccgccgcctgcgattgcgctcccccacaaaccctagctctgccaccatgtccccgggcgccgctcacctggccactgccgccgacccggacgaggacctctgcgcgagcgccggggcgtcagaagcggaggtccccgcgcctgccccgcatcttccaccgctgccggtgtccgcggaggagcggttggaacgcgcttgggcgcactggaggcggctggggtccccacggctgctggtggcgccgatggtggacaactcggagctccccttccgcatgctgtgccgccgctacggcgccgacgcggcgtacacgcccatgctccactctcgcatcttctccgagaatgagaagtacaggtccatggagttcaccacgtgcaaggaggaccgaccactttttgttcagttttgtgccaatgatcctgacattttgttgcaagctgcgaagaaggtggaaccatattgcgactacgttgatatcaattttgggtaatgtgcaattccttatgcagttatgctgctttactggttttttattcatatctacttatctagtgctcgattgtagattactccacctttgtaatggcataaatagtttactaacataaacgtcatatactctacaaaaataatctgctcctggataaagtcgttgagtaacgttgttagtggtgcatcagccctcaagccttcaagcgcgatactaatgtgatgaagaataagccaccatgctaggtcattctctgcacactccactcgaaacctgctgctttttaattttagtgttagtttatctgccgctaactgctttcttagcttgcttagagcactagtgctgaatattccacaggtacatctctagttaacatataccatttccccgtatatatattgcttgaaaaatatggttccatattcttctgaatcgcgttaatatattgccttgcagttgcccgcagcgtattgcaagacggggtaactatggagcatttctcatggacaaccttcccctcgtaaaatccctcgtgcagaatctagcagctaatcttcatgttccagtctcagttaagatccgtgtatttccacgactggaagacacattagcatatgcgaagatgcttgaggaagctggtgcttctcttgtggctgtccacggccggacaagagacgaaaaggatgggaagaaatttcgagctgactgggatgccatcaaggccgtgaaggatgcacttagagtacccgttcttgcaaatggaaacattcgccatatggaggatgtgaagaactgccttgaacatactggtgctgatggtgtgctttcagctgaaactcttctagaaaacccagcagtttttgctggtttcaggacaaaggaatggaaagaagatggtgacgagaatggagacggtggcttggaccaggctgatcttgtgattgaatatctgaagctgtgtgagcagtaccctgtgccgtggagaatggttagatcccatgtccacaagatgttgggcgactggtttagggtgcatccagaggtgagggaggaacttaataagcagaacaagctcaccttcgaatggttgcatgacatggtaatgaggctgaaggacctcggtggaagagtgccactttacagaaaggagactgcactaggacaaacattagcctctagcaatgcctgacaggttcttatatctgcagcctatcattattggagaggagcaattgatgaaaactgaagcattttgtaccaattttgacctgctatagtacagactggaagagattgttggactacaattaaacctcgattagtaaagcatattttgagttgagcagctacagtgcaacggctcacctcattgttgtaacagctgatatgtaaaatcatttttacatcattacatggtctcagataatttggatttgctattgaacttatctttggacgcttcacaaagctatattaccaacatgttcgcgcgcatgttcagctgcgcatatatttcacagaacctctggccgtctggcgtgcaagcaatgacaaaatcatgtacagtactatcaatgctggtggacgcaagaaaagaaaagaaccctactgctcgccactctgaaatggtggccattacaacggctcttcttcgagctccggccgccaatcgggcttctct

SEQ ID NO: 53664 - DNA, 1799 bp, Zea Mays
caaaatacacacccgacccaacccagcccacatccgaggagccaccgcaaccgcatgcaactgcgccgcctctcgcctctcctagcgagcccgcgccgccgcctgcgattgcgctcccccacaaaccctagctctgccaccatgtccccgggcgccgctcacctggccactgccgccgacccggacgaggacctctgcgcgagcgccggggcgtcagaagcggaggtccccgcgcctgccccgcatcttccaccgctgccggtgtccgcggaggagcggttggaacgcgcttgggcgcactggaggcggctggggtccccacggctgctggtggcgccgatggtggacaactcggagctccccttccgcatgctgtgccgccgctacggcgccgacgcggcgtacacgcccatgctccactctcgcatcttctccgagaatgagaagtacaggtccatggagttcaccacgtgcaaggaggaccgaccactttttgttcagttttgtgccaatgatcctgacattttgttgcaagctgcgaagaaggtggaaccatattgcgactacgttgatatcaattttggcgtattgcaagacggggtaactatggagcatttctcatggacaaccttcccctcgtaaaatccctcgtgcagaatctagcagctaatcttcatgttccagtctcagttaagatccgtgtatttccacgactggaagacacattagcatatgcgaagatgcttgaggaagctggtgcttctcttgtggctgtccacggccggacaagagacgaaaaggatgggaagaaatttcgagctgactgggatgccatcaaggccgtgaaggatgcacttagagtacccgttcttgcaaatggaaacattcgccatatggaggatgtgaagaactgccttgaacatactggtgctgatggtgtgctttcagctgaaactcttctagaaaacccagcagtttttgctggtttcaggacaaaggaatggaaagaagatggtgacgagaatggagacggtggcttggaccaggctgatcttgtgattgaatatctgaagctgtgtgagcagtaccctgtgccgtggagaatggttagatcccatgtccacaagatgttgggcgactggtttagggtgcatccagaggtgagggaggaacttaataagcagaacaagctcaccttcgaatggttgcatgacatggtaatgaggctgaaggacctcggtggaagagtgccactttacagaaaggagactgcactaggacaaacattagcctctagcaatgcctgacaggttcttatatctgcagcctatcattattggagaggagcaattgatgaaaactgaagcattttgtaccaattttgacctgctatagtacagactggaagagattgttggactacaattaaacctcgattagtaaagcatattttgagttgagcagctacagtgcaacggctcacctcattgttgtaacagctgatatgtaaaatcatttttacatcattacatggtctcagataatttggatttgctattgaacttatctttggacgcttcacaaagctatattaccaacatgttcgcgcgcatgttcagctgcgcatatatttcacagaacctctggccgtctggcgtgcaagcaatgacaaaatcatgtacagtactatcaatgctggtggacgcaagaaaagaaaagaaccctactgctcgccactctgaaatggtggccattacaacggctcttcttcgagctccggccgccaatcgggcttctct

SEQ ID NO: 53665 - DNA, 4033 bp, Zea Mays
gtcgcaaccaaaccctcgcatacagccgcagcgccaaatctcgccgcctccggggctacaagcgcgccgccgccgcctccgctgacggggaccacggaaggacgcgccgacaccggatctccgaacgcacgccactgaactgacgcgggacttggtttgggtgctcgattgcgcctcccggaagagggagagcccccgccggatttaaccagacacaccgaacgcgcagctcctccgcgccgggggccgcagagaattcatgctgccgaggtcccgcattcggggccgtgacccgccgccgtcgggaggacgctaccgccgccgatctccggccccgccgtcaccgcgccaccagcgccgcccgcgtgacccgccctatccccagccgaagaggcgcagctccgagctgccgccgccgcggcgatacgacgagaatcccctccccagcggcttcgccgccgctgccgagaggcgttcgcgcggcgacatcctgctcgaggccggccgcctggccgctcactacttggtcgccgaaggcctcctccccgagcacgttctcctgtcaagggaggacccaaatcacaatcacagttaccgccccgagcctcccgttcccgttcctgccccggttcccgctcccgctccctccagctatgggaggaagagagacgaggacgacggccccaggtggcggcggagtggaagtggagccggggacctggaccgtggctcaaagtgggacgacaacagggaagccaagaggtcggggtgggacaggaggagccacagctttgacgagaggcgtaaatacaacgatggcggtgacgttgaccggggtggccgccggacacgcgactacaatgagctgaagagaccaccaatgtcaaggtcctattcgcataacgatcgccgggctttggctgatggcacagttgatcggaggaggagaagtagaagcaggagcaggacgaggggctactacactggcagcaggagagatccagatctgcgagcaggcactcgagatttggatcgcaccaaggtgacagactctggcgctgttcctgctgctggtggtgatggaggcatgcacaatgtggatgccaacgaaataccaaggcagccgaaggtgcctggttcagtggtggtttcggagacggatgacagcgctgttgaagctgtggctatcgaagataagcaaatggagtcagataccgctggactggaccatgctcaagacatgtctgaaggcgaggacagtgagtttgccgaagacatttctgaagacgaggatggtgagtttgcaggctctgacttgaatgatgaagatggtgatgaaatggataacacccagagccaactgtccgatgtgcatgttcatacatctgaatctgttgaggaacttgatcttagacagtctcagctcagcaatgctgaggagggaatggaaacatgcattgcacacgtctatgcatgcatggtagagccattggcagagaacaatgtttgctctgaaacaaggtatgaaatggaggaaccacaaaatggatctgaaactgctgttggtgatctttatagtgatgaacaagagcaaccattgacagagtataatggttgctctgaagtaaagtgtgagatggaggctgcacggagtgaatttgaaactggtgttgataatcttgatagagatgaacaagagcgactattggcagagaacaatagttgctctgaagtaaggtatggcatggaggctccacaatgtgaggttgaaactggtgttggtggtcttaatagagatgacaaagagcaaccattggtggtgaccaatgattactctgaattaaggtatgaaacaacagcttcacaaactgaagttgaaaccgtcgtcggtgatctcagtagggatgaacaagagctgccagcttggtacaaaatttttgatctcaacgtcattgaaactccagtgggttgtgagttctccgagatttctcgcagtcctccagcagatgatctttgtgattctgtgcctgatttaattggtctggtgaatcaacaagaaaacaatgacacttcagaaattcatggtcaagatgatcgtgcaggggccaatcaaatgttggaggatgagtctaatttggataactatgatctgaacaatgaggctgatgaacatgcacgggatgatacttcagtaaatcaagttcaagacgagaatgcagaggataatcacctaccagaggatgggcatggtttgatgaagtatgatatgaacattgaggctggtgagcctgcacatgataatcaccaaatgaacaatgcggaaatacatctaaatcatagtatggttgcacatatttcagataattgccatatgaacaatgagaaaatgcttctaaagcaaaatgtggacgagcaacagatggagaatgagcagatgcttatagatcaggtcactactgttcatgttttggatagtcaccatgtgaatcatgaacaattgctgctaggtcatagtgtggatgatcatgaccaaatggagccaaatcccatggctttgggtgttcataatttggataactactatctgagcagcaagcaagtactcctgaataatgatgcagaccaacatgcaggagatatacaccatttgaaggatgggcaaattattttagatgaggctgcagatggacaagctagagttaatgggcaaacaattcatgtaattgatctggaagaagattatcaaacctcaacttttcgtgacaatcttcagactaacacacaagcagcttcttcaactgccacaccagatttttgaaactggtgtagtgaaaaggtagctgtgaatgcagatgcacaggtgattcccatttctcagtgatgacgatgtcctgtactcctgtattatatttggattcaacaatatgccattagaagttatggatgtctatgacctgccgtcctctgagcttgggagatcctttgctgaagtaagttagttagtcgactggtcactattctgtatattgtgcagtagtgtaatgccttttagatttcctagtgctcgcattttttttttcttcaaggctcctcgttaacaagttggttacctctgatccccgagatataaggtgcgatgtcagtatgtctcggtagctgaatagatcgttcttttggctagaaatgactcttgctctcctgcttttcaatggaattgtggagtgcacagagaattatggttatggatgcttcacgtgcagctcgtcaggcagaggctgttgcttgcacgggagtaccagtatccatgtccacttcaatcgactctagtctaactgaagcgtgccgtacacatctgcagtaactcctaaggtattcgtggttatcagcttctttaaagcttttggacacgagctttaggatcttccaaacgacaaaaaaaaaaaacttccatgggccaaaagaaaaaaaccaaaaactttgtccccaaataaaggtcgttattatcagcttctttaaaccttttgaacatcagctttgggagttgggaccctccagaagactaaaaactttgtcccaaaataggtggattttgcctatggaatctgtcgttgcagttgacatcacagggaagccgtttgcatgaaagactgagctctggtagctttttccggcgtgatgaggccgaattttttgtattttagcccctaaaccgaagtaaatttacgtttagacctaaaaaaattttaaatgcagttttggaccctttgctcggcgccataggccgtggcaccgagctaacacagctcgacgccacagtctatggcgccgagcttcgtgacgtggcagcccgcgtggcacacctagctcgacgccacagatcttggcgccgagctaggaaacttaaccgaaacgcctttcctcttcgtttcttctctgtttcgctcgcgtcttcattttcctacgcccgccgtcgctcataccgccgccgagctcgccgccagcccgccgccgccgagctcgctgcccgcccgca

SEQ ID NO: 53666 - DNA, 3748 bp, Zea Mays
gtcgcaaccaaaccctcgcatacagccgcagcgccaaatctcgccgcctccggggctacaagcgcgccgccgccgcctccgctgacggggaccacggaaggacgcgccgacaccggatctccgaacgcacgccactgaactgacgcgggacttggtttgggtgctcgattgcgcctcccggaagagggagagcccccgccggatttaaccagacacaccgaacgcgcagctcctccgcgccgggggccgcagagaattcatgctgccgaggtcccgcattcggggccgtgacccgccgccgtcgggaggacgctaccgccgccgatctccggccccgccgtcaccgcgccaccagcgccgcccgcgtgacccgccctatccccagccgaagaggcgcagctccgagctgccgccgccgcggcgatacgacgagaatcccctccccagcggcttcgccgccgctgccgagaggcgttcgcgcggcgacatcctgctcgaggccggccgcctggccgctcactacttggtcgccgaaggcctcctccccgagcacgttctcctgtcaagggaggacccaaatcacaatcacagttaccgccccgagcctcccgttcccgttcctgccccggttcccgctcccgctccctccagctatgggaggaagagagacgaggacgacggccccaggtggcggcggagtggaagtggagccggggacctggaccgtggctcaaagtgggacgacaacagggaagccaagaggtcggggtgggacaggaggagccacagctttgacgagaggcgtaaatacaacgatggcggtgacgttgaccggggtggccgccggacacgcgactacaatgagctgaagagaccaccaatgtcaaggtcctattcgcataacgatcgccgggctttggctgatggcacagttgatcggaggaggagaagtagaagcaggagcaggacgaggggctactacactggcagcaggagagatccagatctgcgagcaggcactcgagatttggatcgcaccaaggtgacagactctggcgctgttcctgctgctggtggtgatggaggcatgcacaatgtggatgccaacgaaataccaaggcagccgaaggtgcctggttcagtggtggtttcggagacggatgacagcgctgttgaagctgtggctatcgaagataagcaaatggagtcagataccgctggactggaccatgctcaagacatgtctgaaggcgaggacagtgagtttgccgaagacatttctgaagacgaggatggtgagtttgcaggctctgacttgaatgatgaagatggtgatgaaatggataacacccagagccaactgtccgatgtgcatgttcatacatctgaatctgttgaggaacttgatcttagacagtctcagctcagcaatgctgaggagggaatggaaacatgcattgcacacgtctatgcatgcatggtagagccattggcagagaacaatgtttgctctgaaacaaggtatgaaatggaggaaccacaaaatggatctgaaactgctgttggtgatctttatagtgatgaacaagagcaaccattgacagagtataatggttgctctgaagtaaagtgtgagatggaggctgcacggagtgaatttgaaactggtgttgataatcttgatagagatgaacaagagcgactattggcagagaacaatagttgctctgaagtaaggtatggcatggaggctccacaatgtgaggttgaaactggtgttggtggtcttaatagagatgacaaagagcaaccattggtggtgaccaatgattactctgaattaaggtatgaaacaacagcttcacaaactgaagttgaaaccgtcgtcggtgatctcagtagggatgaacaagagctgccagcttggtacaaaatttttgatctcaacgtcattgaaactccagtgggttgtgagttctccgagatttctcgcagtcctccagcagatgatctttgtgattctgtgcctgatttaattggtctggtgaatcaacaagaaaacaatgacacttcagaaattcatggtcaagatgatcgtgcaggggccaatcaaatgttggaggatgagtctaatttggataactatgatctgaacaatgaggctgatgaacatgcacgggatgatacttcagtaaatcaagttcaagacgagaatgcagaggataatcacctaccagaggatgggcatggtttgatgaagtatgatatgaacattgaggctggtgagcctgcacatgataatcaccaaatgaacaatgcggaaatacatctaaatcatagtatggttgcacatatttcagataattgccatatgaacaatgagaaaatgcttctaaagcaaaatgtggacgagcaacagatggagaatgagcagatgcttatagatcaggtcactactgttcatgttttggatagtcaccatgtgaatcatgaacaattgctgctaggtcatagtgtggatgatcatgaccaaatggagccaaatcccatggctttgggtgttcataatttggataactactatctgagcagcaagcaagtactcctgaataatgatgcagaccaacatgcaggagatatacaccatttgaaggatgggcaaattattttagatgaggctgcagatggacaagctagagttaatgggcaaacaattcatgtaattgatctggaagaagattatgcacagcagtctgagagcaggaatacaggagaatatctagatgccacaccagatttttgaaactggtgtagtgaaaaggtagctgtgaatgcagatgcacaggtgattcccatttctcagtgatgacgatgtcctgtactcctgtattatatttggattcaacaatatgccattagaagttatggatgtctatgacctgccgtcctctgagcttgggagatcctttgctgaactcgtcaggcagaggctgttgcttgcacgggagtaccagtatccatgtccacttcaatcgactctagtctaactgaagcgtgccgtacacatctgcagtaactcctaaggtattcgtggttatcagcttctttaaagcttttggacacgagctttaggatcttccaaacgacaaaaaaaaaaaacttccatgggccaaaagaaaaaaaccaaaaactttgtccccaaataaaggtcgttattatcagcttctttaaaccttttgaacatcagctttgggagttgggaccctccagaagactaaaaactttgtcccaaaataggtggattttgcctatggaatctgtcgttgcagttgacatcacagggaagccgtttgcatgaaagactgagctctggtagctttttccggcgtgatgaggccgaattttttgtattttagcccctaaaccgaagtaaatttacgtttagacctaaaaaaattttaaatgcagttttggaccctttgctcggcgccataggccgtggcaccgagctaacacagctcgacgccacagtctatggcgccgagcttcgtgacgtggcagcccgcgtggcacacctagctcgacgccacagatcttggcgccgagctaggaaacttaaccgaaacgcctttcctcttcgtttcttctctgtttcgctcgcgtcttcattttcctacgcccgccgtcgctcataccgccgccgagctcgccgccagcccgccgccgccgagctcgctgcccgcccgca

SEQ ID NO: 53667 - DNA, 4141 bp, Zea Mays
gtcgcaaccaaaccctcgcatacagccgcagcgccaaatctcgccgcctccggggctacaagcgcgccgccgccgcctccgctgacggggaccacggaaggacgcgccgacaccggatctccgaacgcacgccactgaactgacgcgggacttggtttgggtgctcgattgcgcctcccggaagagggagagcccccgccggatttaaccagacacaccgaacgcgcagctcctccgcgccgggggccgcagagaattcatgctgccgaggtcccgcattcggggccgtgacccgccgccgtcgggaggacgctaccgccgccgatctccggccccgccgtcaccgcgccaccagcgccgcccgcgtgacccgccctatccccagccgaagaggcgcagctccgagctgccgccgccgcggcgatacgacgagaatcccctccccagcggcttcgccgccgctgccgagaggcgttcgcgcggcgacatcctgctcgaggccggccgcctggccgctcactacttggtcgccgaaggcctcctccccgagcacgttctcctgtcaagggaggacccaaatcacaatcacagttaccgccccgagcctcccgttcccgttcctgccccggttcccgctcccgctccctccagctatgggaggaagagagacgaggacgacggccccaggtggcggcggagtggaagtggagccggggacctggaccgtggctcaaagtgggacgacaacagggaagccaagaggtcggggtgggacaggaggagccacagctttgacgagaggcgtaaatacaacgatggcggtgacgttgaccggggtggccgccggacacgcgactacaatgagctgaagagaccaccaatgtcaaggtcctattcgcataacgatcgccgggctttggctgatggcacagttgatcggaggaggagaagtagaagcaggagcaggacgaggggctactacactggcagcaggagagatccagatctgcgagcaggcactcgagatttggatcgcaccaaggtgacagactctggcgctgttcctgctgctggtggtgatggaggcatgcacaatgtggatgccaacgaaataccaaggcagccgaaggtgcctggttcagtggtggtttcggagacggatgacagcgctgttgaagctgtggctatcgaagataagcaaatggagtcagataccgctggactggaccatgctcaagacatgtctgaaggcgaggacagtgagtttgccgaagacatttctgaagacgaggatggtgagtttgcaggctctgacttgaatgatgaagatggtgatgaaatggataacacccagagccaactgtccgatgtgcatgttcatacatctgaatctgttgaggaacttgatcttagacagtctcagctcagcaatgctgaggagggaatggaaacatgcattgcacacgtctatgcatgcatggtagagccattggcagagaacaatgtttgctctgaaacaaggtatgaaatggaggaaccacaaaatggatctgaaactgctgttggtgatctttatagtgatgaacaagagcaaccattgacagagtataatggttgctctgaagtaaagtgtgagatggaggctgcacggagtgaatttgaaactggtgttgataatcttgatagagatgaacaagagcgactattggcagagaacaatagttgctctgaagtaaggtatggcatggaggctccacaatgtgaggttgaaactggtgttggtggtcttaatagagatgacaaagagcaaccattggtggtgaccaatgattactctgaattaaggtatgaaacaacagcttcacaaactgaagttgaaaccgtcgtcggtgatctcagtagggatgaacaagagctgccagcttggtacaaaatttttgatctcaacgtcattgaaactccagtgggttgtgagttctccgagatttctcgcagtcctccagcagatgatctttgtgattctgtgcctgatttaattggtctggtgaatcaacaagaaaacaatgacacttcagaaattcatggtcaagatgatcgtgcaggggccaatcaaatgttggaggatgagtctaatttggataactatgatctgaacaatgaggctgatgaacatgcacgggatgatacttcagtaaatcaagttcaagacgagaatgcagaggataatcacctaccagaggatgggcatggtttgatgaagtatgatatgaacattgaggctggtgagcctgcacatgataatcaccaaatgaacaatgcggaaatacatctaaatcatagtatggttgcacatatttcagataattgccatatgaacaatgagaaaatgcttctaaagcaaaatgtggacgagcaacagatggagaatgagcagatgcttatagatcaggtcactactgttcatgttttggatagtcaccatgtgaatcatgaacaattgctgctaggtcatagtgtggatgatcatgaccaaatggagccaaatcccatggctttgggtgttcataatttggataactactatctgagcagcaagcaagtactcctgaataatgatgcagaccaacatgcaggagatatacaccatttgaaggatgggcaaattattttagatgaggctgcagatggacaagctagagttaatgggcaaacaattcatgtaattgatctggaagaagattatgcacagcagtctgagagcaggaatacaggagaatatctagaatccacaagtggcacctcgcataaatacacggataatgttcttcaagagcatatgtgttctcaagactagcaaacctcaacttttcgtgacaatcttcagactaacacacaagcagcttcttcaactgccacaccagatttttgaaactggtgtagtgaaaaggtagctgtgaatgcagatgcacaggtgattcccatttctcagtgatgacgatgtcctgtactcctgtattatatttggattcaacaatatgccattagttatggatgtctatgacctgccgtcctctgagcttgggagatcctttgctgaagtaagttagttagtcgactggtcactattctgtatattgtgcagtagtgtaatgccttttagatttcctagtgctcgcattttttttttcttcaaggctcctcgttaacaagttggttacctctgatccccgagatataaggtgcgatgtcagtatgtctcggtagctgaatagatcgttcttttggctagaaatgactcttgctctcctgcttttcaatggaattgtggagtgcacagagaattatggttatggatgcttcacgtgcagctcgtcaggcagaggctgttgcttgcacgggagtaccagtatccatgtccacttcaatcgactctagtctaactgaagcgtgccgtacacatctgcagtaactcctaaggtattcgtggttatcagcttctttaaagcttttggacacgagctttaggatcttccaaacgacaaaaaaaaaaaacttccatgggccaaaagaaaaaaaccaaaaactttgtccccaaataaaggtcgttattatcagcttctttaaaccttttgaacatcagctttgggagttgggaccctccagaagactaaaaactttgtcccaaaataggtggattttgcctatggaatctgtcgttgcagttgacatcacagggaagccgtttgcatgaaagactgagctctggtagctttttccggcgtgatgaggccgaattttttgtattttagcccctaaaccgaagtaaatttacgtttagacctaaaaaaattttaaatgcagttttggaccctttgctcggcgccataggccgtggcaccgagctaacacagctcgacgccacagtctatggcgccgagcttcgtgacgtggcagcccgcgtggcacacctagctcgacgccacagatcttggcgccgagctaggaaacttaaccgaaacgcctttcctcttcgtttcttctctgtttcgctcgcgtcttcattttcctacgcccgccgtcgctcataccgccgccgagctcgccgccagcccgccgccgccgagctcgctgcccgcccgca

SEQ ID NO: 53668 - DNA, 4139 bp, Zea Mays
gttccttcgccactcgcaagtcgcaaccaaaccctcgcatacagccgcagcgccaaatctcgccgcctccggggctacaagcgcgccgccgccgcctccgctgacggggaccacggaaggacgcgccgacaccggatctccgaacgcacgccactgaactgacgcgggacttggtttgggtgctcgattgcgcctcccggaagagggagagcccccgccggatttaaccagacacaccgaacgcgcagctcctccgcgccgggggccgcagagaattcatgctgccgaggtcccgcattcggggccgtgacccgccgccgtcgggaggacgctaccgccgccgatctccggccccgccgtcaccgcgccaccagcgccgcccgcgtgacccgccctatccccagccgaagaggcgcagctccgagctgccgccgccgcggcgatacgacgagaatcccctccccagcggcttcgccgccgctgccgagaggcgttcgcgcggcgacatcctgctcgaggccggccgcctggccgctcactacttggtcgccgaaggcctcctccccgagcacgttctcctgtcaagggaggacccaaatcacaatcacagttaccgccccgagcctcccgttcccgttcctgccccggttcccgctcccgctccctccagctatgggaggaagagagacgaggacgacggccccaggtggcggcggagtggaagtggagccggggacctggaccgtggctcaaagtgggacgacaacagggaagccaagaggtcggggtgggacaggaggagccacagctttgacgagaggcgtaaatacaacgatggcggtgacgttgaccggggtggccgccggacacgcgactacaatgagctgaagagaccaccaatgtcaaggtcctattcgcataacgatcgccgggctttggctgatggcacagttgatcggaggaggagaagtagaagcaggagcaggacgaggggctactacactggcagcaggagagatccagatctgcgagcaggcactcgagatttggatcgcaccaaggtgacagactctggcgctgttcctgctgctggtggtgatggaggcatgcacaatgtggatgccaacgaaataccaaggcagccgaaggtgcctggttcagtggtggtttcggagacggatgacagcgctgttgaagctgtggctatcgaagataagcaaatggagtcagataccgctggactggaccatgctcaagacatgtctgaaggcgaggacagtgagtttgccgaagacatttctgaagacgaggatggtgagtttgcaggctctgacttgaatgatgaagatggtgatgaaatggataacacccagagccaactgtccgatgtgcatgttcatacatctgaatctgttgaggaacttgatcttagacagtctcagctcagcaatgctgaggagggaatggaaacatgcattgcacacgtctatgcatgcatggtagagccattggcagagaacaatgtttgctctgaaacaaggtatgaaatggaggaaccacaaaatggatctgaaactgctgttggtgatctttatagtgatgaacaagagcaaccattgacagagtataatggttgctctgaagtaaagtgtgagatggaggctgcacggagtgaatttgaaactggtgttgataatcttgatagagatgaacaagagcgactattggcagagaacaatagttgctctgaagtaaggtatggcatggaggctccacaatgtgaggttgaaactggtgttggtggtcttaatagagatgacaaagagcaaccattggtggtgaccaatgattactctgaattaaggtatgaaacaacagcttcacaaactgaagttgaaaccgtcgtcggtgatctcagtagggatgaacaagagctgccagcttggtacaaaatttttgatctcaacgtcattgaaactccagtgggttgtgagttctccgagatttctcgcagtcctccagcagatgatctttgtgattctgtgcctgatttaattggtctggtgaatcaacaagaaaacaatgacacttcagaaattcatggtcaagatgatcgtgcaggggccaatcaaatgttggaggatgagtctaatttggataactatgatctgaacaatgaggctgatgaacatgcacgggatgatacttcagtaaatcaagttcaagacgagaatgcagaggataatcacctaccagaggatgggcatggtttgatgaagtatgatatgaacattgaggctggtgagcctgcacatgataatcaccaaatgaacaatgcggaaatacatctaaatcatagtatggttgcacatatttcagataattgccatatgaacaatgagaaaatgcttctaaagcaaaatgtggacgagcaacagatggagaatgagcagatgcttatagatcaggtcactactgttcatgttttggatagtcaccatgtgaatcatgaacaattgctgctaggtcatagtgtggatgatcatgaccaaatggagccaaatcccatggctttgggtgttcataatttggataactactatctgagcagcaagcaagtactcctgaataatgatgcagaccaacatgcaggagatatacaccatttgaaggatgggcaaattattttagatgaggctgcagatggacaagctagagttaatgggcaaacaattcatgtaattgatctggaagaagattatgcacagcagtctgagagcaggaatacaggagaatatctagaatccacaagtggcacctcgcataaatacacggataatgttcttcaagagcatatgtgttctcaagactagcaaacctcaacttttcgtgacaatcttcagactaacacacaagcagcttcttcaactgccacaccagatttttgaaactggtgtagtgaaaaggtgattcccatttctcagtgatgacgatgtcctgtactcctgtattatatttggattcaacaatatgccattagaagttatggatgtctatgacctgccgtcctctgagcttgggagatcctttgctgaagtaagttagttagtcgactggtcactattctgtatattgtgcagtagtgtaatgccttttagatttcctagtgctcgcattttttttttcttcaaggctcctcgttaacaagttggttacctctgatccccgagatataaggtgcgatgtcagtatgtctcggtagctgaatagatcgttcttttggctagaaatgactcttgctctcctgcttttcaatggaattgtggagtgcacagagaattatggttatggatgcttcacgtgcagctcgtcaggcagaggctgttgcttgcacgggagtaccagtatccatgtccacttcaatcgactctagtctaactgaagcgtgccgtacacatctgcagtaactcctaaggtattcgtggttatcagcttctttaaagcttttggacacgagctttaggatcttccaaacgacaaaaaaaaaaaacttccatgggccaaaagaaaaaaaccaaaaactttgtccccaaataaaggtcgttattatcagcttctttaaaccttttgaacatcagctttgggagttgggaccctccagaagactaaaaactttgtcccaaaataggtggattttgcctatggaatctgtcgttgcagttgacatcacagggaagccgtttgcatgaaagactgagctctggtagctttttccggcgtgatgaggccgaattttttgtattttagcccctaaaccgaagtaaatttacgtttagacctaaaaaaattttaaatgcagttttggaccctttgctcggcgccataggccgtggcaccgagctaacacagctcgacgccacagtctatggcgccgagcttcgtgacgtggcagcccgcgtggcacacctagctcgacgccacagatcttggcgccgagctaggaaacttaaccgaaacgcctttcctcttcgtttcttctctgtttcgctcgcgtcttcattttcctacgcccgccgtcgctcataccgccgccgagctcgccgccagcccgccgccgccgagctcgctgcccgcccgca

SEQ ID NO: 53669 - DNA, 3898 bp, Zea Mays
cgtcggttccttcgccactcgcaagtcgcaaccaaaccctcgcatacagccgcagcgccaaatctcgccgcctccggggctacaagcgcgccgccgccgcctccgctgacggggaccacggaaggacgcgccgacaccggatctccgaacgcacgccactgaactgacgcgggacttggtttgggtgctcgattgcgcctcccggaagagggagagcccccgccggatttaaccagacacaccgaacgcgcagctcctccgcgccgggggccgcagagaattcatgctgccgaggtcccgcattcggggccgtgacccgccgccgtcgggaggacgctaccgccgccgatctccggccccgccgtcaccgcgccaccagcgccgcccgcgtgacccgccctatccccagccgaagaggcgcagctccgagctgccgccgccgcggcgatacgacgagaatcccctccccagcggcttcgccgccgctgccgagaggcgttcgcgcggcgacatcctgctcgaggccggccgcctggccgctcactacttggtcgccgaaggcctcctccccgagcacgttctcctgtcaagggaggacccaaatcacaatcacagttaccgccccgagcctcccgttcccgttcctgccccggttcccgctcccgctccctccagctatgggaggaagagagacgaggacgacggccccaggtggcggcggagtggaagtggagccggggacctggaccgtggctcaaagtgggacgacaacagggaagccaagaggtcggggtgggacaggaggagccacagctttgacgagaggcgtaaatacaacgatggcggtgacgttgaccggggtggccgccggacacgcgactacaatgagctgaagagaccaccaatgtcaaggtcctattcgcataacgatcgccgggctttggctgatggcacagttgatcggaggaggagaagtagaagcaggagcaggacgaggggctactacactggcagcaggagagatccagatctgcgagcaggcactcgagatttggatcgcaccaaggtgacagactctggcgctgttcctgctgctggtggtgatggaggcatgcacaatgtggatgccaacgaaataccaaggcagccgaaggtgcctggttcagtggtggtttcggagacggatgacagcgctgttgaagctgtggctatcgaagataagcaaatggagtcagataccgctggactggaccatgctcaagacatgtctgaaggcgaggacagtgagtttgccgaagacatttctgaagacgaggatggtgagtttgcaggctctgacttgaatgatgaagatggtgatgaaatggataacacccagagccaactgtccgatgtgcatgttcatacatctgaatctgttgaggaacttgatcttagacagtctcagctcagcaatgctgaggagggaatggaaacatgcattgcacacgtctatgcatgcatggtagagccattggcagagaacaatgtttgctctgaaacaaggtatgaaatggaggaaccacaaaatggatctgaaactgctgttggtgatctttatagtgatgaacaagagcaaccattgacagagtataatggttgctctgaagtaaagtgtgagatggaggctgcacggagtgaatttgaaactggtgttgataatcttgatagagatgaacaagagcgactattggcagagaacaatagttgctctgaagtaaggtatggcatggaggctccacaatgtgaggttgaaactggtgttggtggtcttaatagagatgacaaagagcaaccattggtggtgaccaatgattactctgaattaaggtatgaaacaacagcttcacaaactgaagttgaaaccgtcgtcggtgatctcagtagggatgaacaagagctgccagcttggtacaaaatttttgatctcaacgtcattgaaactccagtgggttgtgagttctccgagatttctcgcagtcctccagcagatgatctttgtgattctgtgcctgatttaattggtctggtgaatcaacaagaaaacaatgacacttcagaaattcatggtcaagatgatcgtgcaggggccaatcaaatgttggaggatgagtctaatttggataactatgatctgaacaatgaggctgatgaacatgcacgggatgatacttcagtaaatcaagttcaagacgagaatgcagaggataatcacctaccagaggatgggcatggtttgatgaagtatgatatgaacattgaggctggtgagcctgcacatgataatcaccaaatgaacaatgcggaaatacatctaaatcatagtatggttgcacatatttcagataattgccatatgaacaatgagaaaatgcttctaaagcaaaatgtggacgagcaacagatggagaatgagcagatgcttatagatcaggtcactactgttcatgttttggatagtcaccatgtgaatcatgaacaattgctgctaggtcatagtgtggatgatcatgaccaaatggagccaaatcccatggctttgggtgttcataatttggataactactatctgagcagcaagcaagtactcctgaataatgatgcagaccaacatgcaggagatatacaccatttgaaggatgggcaaattattttagatgaggctgcagatggacaagctagagttaatgggcaaacaattcatgtaattgatctggaagaagattatgcacagcagtctgagagcaggaatacaggagaatatctagaatccacaagtggcacctcgcataaatacacggataatgttcttcaagagcatatgtgttctcaagactagcaaacctcaacttttcgtgacaatcttcagactaacacacaagcagcttcttcaactgccacaccagatttttgaaactggtgtagtgaaaaggtagctgtgaatgcagatgcacaggtgattcccatttctcagtgatgacgatgtcctgtactcctgtattatatttggattcaacaatatgccattagaagttatggatgtctatgacctgccgtcctctgagcttgggagatcctttgctgaactcgtcaggcagaggctgttgcttgcacgggagtaccagtatccatgtccacttcaatcgactctagtctaactgaagcgtgccgtacacatctgcagtaactcctaaggtattcgtggttatcagcttctttaaagcttttggacacgagctttaggatcttccaaacgacaaaaaaaaaaaacttccatgggccaaaagaaaaaaaccaaaaactttgtccccaaataaaggtcgttattatcagcttctttaaaccttttgaacatcagctttgggagttgggaccctccagaagactaaaaactttgtcccaaaataggtggattttgcctatggaatctgtcgttgcagttgacatcacagggaagccgtttgcatgaaagactgagctctggtagctttttccggcgtgatgaggccgaattttttgtattttagcccctaaaccgaagtaaatttacgtttagacctaaaaaaattttaaatgcagttttggaccctttgctcggcgccataggccgtggcaccgagctaacacagctcgacgccacagtctatggcgccgagcttcgtgacgtggcagcccgcgtggcacacctagctcgacgccacagatcttggcgccgagctaggaaacttaaccgaaacgcctttcctcttcgtttcttctctgtttcgctcgcgtcttcattttcctacgcccgccgtcgctcataccgccgccgagctcgccgccagcccgccgccgccgagctcgctgcccgcccgca

SEQ ID NO: 53670 - DNA, 1329 bp, Zea Mays
gatgcgttctaatgaattggctcttttttcattcacgtcggccccgcctcttctccccccgacgcgcttgccgatccgcccattccgccgctaccactctcccgccgccgccgcgcgcctcagccgcccgtggcccggacatggagggcgccgccggggaggagggcgcctccacgccggcggcgagagggggagcggaggcaggggcaggggcaggggcaggtggagggatgctgaaggggaggtcctgcaagggctgcctctactactcgtcaaagctcaggtcgcgagcgcgcggccccgtctgcgtcggcgtcacccgcgcccttccccaagtttctgagcgtaaggttggaaaacttgaactggaagctatccaagaaggtcgttatcttgcagatttcagatatgcatgcattggctattcaatgtacttaaatggcaaggaaactcctacgggggtacgagataagccacgtgcccatctgcctgtttgtgctggagtcgagctgttgatagatagaaaagtcccaacaaacgttaagaaagaagctccaaaaccacgtcaatataaaccagggcatgcaggagatgatttcttaacgaaatttcagaggaatgcaggtcttgtggccagtggtgtggctaagaacctgaatagagttgggacctacatcaaagacactgtcagtgatatgatgcagcctcaccgcaagcgtcccaaataaaacataggcctgtctctcctaaatcctgtatggaagtaaacattagaaattagatgatcggggaacatcggatcaatcacttcctcccatacacacccagcgcagcagtagcttagctttctgttggtttcagaaactctagagaattgagagaagatctatggttaggaaaaatagccacttgaaacatgttatccactagctcatggggcttcgattccccctgtctcgccccattttgggagccattgttgttttcactaggcccctccggcaaaacaaccacgttccgccccttctgacaataacgtggtgccgttgagaggtccagtgatgcattttttgttggagcattgaagtatcagtgtacgtagatgatatactaaactcttattctgttactactagatacgtgccctcttattctgttactagattagtgccctcttattctgccttttttatctgcttctagtgctgtggcaagtcatggtccagcacgtcactaagcgccctggatgcttgtacaagctcctctggactgaaaaccatatatgatttaggtatcagttggtgttccaaacatataatcataagggcg

SEQ ID NO: 53671 - DNA, 1286 bp, Zea Mays
gatgcgttctaatgaattggctcttttttcattcacgtcggccccgcctcttctccccccgacgcgcttgccgatccgcccattccgccgctaccactctcccgccgccgccgcgcgcctcagccgcccgtggcccggacatggagggcgccgccggggaggagggcgcctccacgccggcggcgagagggggagcggaggcaggggcaggggcaggggcaggtggagggatgctgaaggggaggtcctgcaagggctgcctctactactcgtcaaagctcaggtcgcgagcgcgcggccccgtctgcgtcggcgtcacccgcgcccttccccaagtttctgagcgtaaggttggaaaacttgaactggaagctatccaagaaggtcgttatcttgcagatttcagatatgcatgcattggctattcaatgtacttaaatggcaaggaaactcctacgggggtacgagataagccacgtgcccatctgcctgtttgtgctggagtcgagctccaaaaccacgtcaatataaaccagggcatgcaggagatgatttcttaacgaaatttcagaggaatgcaggtcttgtggccagtggtgtggctaagaacctgaatagagttgggacctacatcaaagacactgtcagtgatatgatgcagcctcaccgcaagcgtcccaaataaaacataggcctgtctctcctaaatcctgtatggaagtaaacattagaaattagatgatcggggaacatcggatcaatcacttcctcccatacacacccagcgcagcagtagcttagctttctgttggtttcagaaactctagagaattgagagaagatctatggttaggaaaaatagccacttgaaacatgttatccactagctcatggggcttcgattccccctgtctcgccccattttgggagccattgttgttttcactaggcccctccggcaaaacaaccacgttccgccccttctgacaataacgtggtgccgttgagaggtccagtgatgcattttttgttggagcattgaagtatcagtgtacgtagatgatatactaaactcttattctgttactactagatacgtgccctcttattctgttactagattagtgccctcttattctgccttttttatctgcttctagtgctgtggcaagtcatggtccagcacgtcactaagcgccctggatgcttgtacaagctcctctggactgaaaaccatatatgatttaggtatcagttggtgttccaaacatataatcataagggcg

SEQ ID NO: 53672 - DNA, 1767 bp, Zea Mays
aaaaaatctaaagtaaaacatatctctattatagatatttgacgtgtagaatgagatatagaagaagacgttgaagagaaataatatacataggtaaaagaattttgtatagaagaaaagatataaagaagcataaagaggatacatttgaagattatatgggcttcgtggtgcgacatgtcctagctggattgggccctacctctagcccgggcatgggggtctcgggcaggacgacacctctgcacatctatacatatacagcggcgcgtcgcctcctcccttctctcccctctcttcacgcgaaccagcagtccagcacacagcacagcacgactcgggcgcgccgcgcacacggacggcagtgcacgcctcgccggctcaccaatcgacaccctgtccaaccagcaccacccggcgtcgtcctccctggcggggggttaggctagctagagctgtacagcgcgagagcgacgaacggcaggtcgatcggcggtcgtacgtacgtcgtcgaccgagagcagagcaggcgaccgcggcgccagagatagttcgaatccgattccgacccatccatgggggttcacctgctgaagaagcagcactcgtcggcgccgtcgtcgctgggccgcggctccggctccgggtccgcatccgggtcgtcggtgtcggcgtcgtcgatgccgcccaaggggtgcatggcggtgcgcgtggtggggccttcctccgccgccgccgggcggaaggagcaggagcaggaggaggaggaggagcggttcgtggtgcccgtggggtacctgaagcacccgctgttcgtggcgctgctccaggcggcggaggaggagtacgggttcgagcagaagggcgccatcaccatcccctgcggcgtggaccacttccgccgcgtgcagggcatcatccaccaccacggctccggcggcgggcaccaccatggccaccacagcagcagcagcagcaaccacttccacatcgccggctgcttccgcgcctgatcggtcggtcggtcggtcttccatctacaccacgtggatgatggatgaaaatggagaccgatccatgccccgctgggctcctctcctctcctctctagcgccgacgggacgacggatcgatcgaggaacaacaacaatatttactagctctaccgctaaattttctagggttttcttctccttggttaggatttagacgcatggcctctctctggactggaccgaccgaggatcgaaggaccatggttggctcctgcctgcggccgacggagtctaccagaggatggactggtcgctctcgcttttggtcatgcgctgcgcgcggatcaatcgatcggtggatgatgatatattgatatgttttgccatgtgttttttttggagtttttaatatcttaggagtaatttggattgttgttgttgttgttattgttgttgaggatgatgaaaacaaattaaggccttgttcggttaatcccgttacccatggattggatgagattggaaaaaattaagaaagagtttgacttagctgggatttaaacccactcaatcccacttaagggcttgttcggttattgatattacatgtgtattggagtgtattgggtgggattgggatgaattttgacttgttatggatttaaaccggctcaataccatccaatacatgtggattatcaccaaaacgaacaagccctaatccatgtggattggaagctaaccgaacaagccctaaagcggaggaggaaag

SEQ ID NO: 53673 - DNA, 1298 bp, Zea Mays
cgtgcgcgtgcggccgtgccgccgtcgggacccacatcccgtggcgtggcgtggggagccacccgcaagcagaataaaacgtgtggctgtccctcgtctcccccaactccagcacagcacaatggacgccgccgtctccctctccctgcccctgcaccaccacgcccacggcccgctcccgcaccacgccacctccgcgtccgccgtaaccgcgccgccgcccaagcctgacgttcaggctcctccagcggcgcgcctgagccccgccctcgccgcgccatcgccaccccgctcgtccccggccgccgcgcgctcctccagccgcgccgccacgggatacgcggcagcgctggccgacgcgtgcgtccgcgcgggcacgctgcgccgcgccgcgcgccacgcgcgcgcgctcctccaccttctcctccggctagagcggcccctggaagagggcgccgccgcggtcgaggctgccgtgacggtcgcggggcagcagctggacgcgcgggtggccgcgctcgtcaggatgctcgtcgctaagggcagggccggggtgctcgccgaggccctggccgagttcgccgccatctgcgaccacctgctgtcgacgcgcccgcgcgcgcgccacgcctactagctaggcatgctgcttaatcgagtacagtgcccaacaaacagcacgccttttcgacacgaaacacttcatccaccagcgtagcgtttgtactcgtgcatggccttcgttcgccatggatgcatggtctgtactcttctacaagcaaattctgctacatggcgcttagccaacgttgtgtacttgtgttgccattggttatcagtacaacgctacggagcccataaatcttcaataaaacctcctttaaaattttatatgtacacaatataatgtagaaaggacttctctacagtagtttagttcggtctctattaaagttttttttttgctccgtccctgtactactatggagatttagttggttgtcagcacatctgaacatcatcacattgttcttgttcagcagcagttagccagcatcagcagaaactgctgaagctctaattggttcgtttgccgaagcagttcgatgaccatgcttgctgcccccggagacggagagtttctaaatgaggtcggatcaaacggcctgcaaccaacaaagattctgaatcctgcaatgacgtagcttagccgcgtttattgtgcgtgcacactgagagtactgacaacctcatcatgctgatgagtcgttttattgagagtaaaatgcataagcggt

SEQ ID NO: 53674 - DNA, 762 bp, Zea Mays
gcgtccacttcgctcccctaggtcgcgagcgagcgacggccgactgcgcgagaccgcgagtgaccgccggtcgagccccgaggccggagcggctcccccgcaggcctgccctcgtctggtcgccgcctcgccgcgcagcaaccccgcgacccgctgcccggccggcccgcgttactgtgcagccgtgtccattactgcatttgtagacagcgcagctactggctgacccgactcccttctctcccaattctcagcgggcgatgcaggcgaagaagctgaccctgctgcagacggtggcagctgcgggagtcttctctgccgtctccttttggtatggcttcatgttcggaagggagtccgcgcggcgcgagcttggtggcatcatagacgacctccgcagcaacaagcccaccaatacccctgccggtcccgatgctcattcgaagccatagtggggtctgcagtgcgaaggataagatcgtgtggggatcataaacgatgtggttagctgttagaagtgttcagcgaggacaaagatcgttagaggaaggtcgaagaacctggcctatgtttttgtaggtttatgtcttagggaggccgcacttttgaatttgaagaaacgagagacgatatcattgttcgtatttcgtatggcgcgcaggcgcggctaccagtcttcgagcatagcgttgctgttgatgcatcgtactcttgatctgtgattagtttgttccatgacgttactgcttaggaatttgcttt

SEQ ID NO: 53675 - DNA, 557 bp, Zea Mays
gcgtccacttcgctcccctaggtcgcgagcgagcgacggccgactgcgcgagaccgcgagtgaccgccggtcgagccccgaggccggagcggctcccccgcaggcctgccctcgtctgcgggcgatgcaggcgaagaagctgaccctgctgcagacggtggcagctgcgggagtcttctctgccgtctccttttggtatggcttcatgttcggaagggagtccgcgcggcgcgagcttggtggcatcatagacgacctccgcagcaacaagcccaccaatacccctgccggtcccgatgctcattcgaagccatagtggggtatggtgttctgttgttcctcctttgccgtactaaatctaaatgtggtcaagcttgtcttgtggatcctgctaggctgtagacggaagaactagccttggagctaccagttttttgtccccttctttcataatgtgtatacggcttgaacatcagtttttagactgaaaaaaaaaacaagttaacctgccacaaaagacaaggaagaaaaacaagttaaaacctcctttggttcag

SEQ ID NO: 53676 - DNA, 542 bp, Zea Mays
gcgtccacttcgctcccctaggtcgcgagcgagcgacggccgactgcgcgagaccgcgagtgaccgccggtcgagccccgaggccggagcggctcccccgcagcgggcgatgcaggcgaagaagctgaccctgctgcagacggtggcagctgcgggagtcttctctgccgtctccttttggtatggcttcatgttcggaagggagtccgcgcggcgcgagcttggtggcatcatagacgacctccgcagcaacaagcccaccaatacccctgccggtcccgatgctcattcgaagccatagtggggtatggtgttctgttgttcctcctttgccgtactaaatctaaatgtggtcaagcttgtcttgtggatcctgctaggctgtagacggaagaactagccttggagctaccagttttttgtccccttctttcataatgtgtatacggcttgaacatcagtttttagactgaaaaaaaaaacaagttaacctgccacaaaagacaaggaagaaaaacaagttaaaacctcctttggttcag

SEQ ID NO: 53677 - DNA, 1349 bp, Zea Mays
actggacaaggacagccactcatgtcagtctcaatgggaatcgtagagactgggccatgtgagtattagtcaagatagatggcatcataagtcaacctgtgatcagcgccacgcctgttagtctgatcacaccaataattagatacaaggacacggagacagtttcctgatcgttataattattagatgcaagtatatgaaaaagaattccacgcaaatctcaagtgctgacctgtgttccttaataagtgggcacaagcagtggttggctgaagtccagttcctgggtgttcttgagcacccgaacctcgtaaagctgataggctactgcgccgtggattcagaagccagcaagcacaggctgctggtctacgagttcatgcccaacaagagcttggacgaccacctgttcaaccgagctcaccctccgctttcatggagactgaggctgcagatcatgctgggcgctgcgcggggcctggattacctccatgaaggagtgccagaagttcagggatttcaaggcatccaacgtccttctggacgctgaattcaagccgaagctgtcggatttcggcctcgcaagagagggtccaacagaagggaagacacatgtctccaccgcggtggtggggacgcacgggtacgcggcgccggactacatcgagacggggcacctgacggtgaagagcgacgtgtggagcttcggcgtggtgctgtacgagatcctgacgggccgacgctcgctggagcgcagccgccccgcggaggagcagaagctgctggggtgggtgcggcagcacccgccggacggcgccgggttccgggccatcatggacccgcggctgggcgggcggtacccgctggccgccgcgcgcgaggtggccaggctcgccgaccgttgcctcggcaagaaccccaaggagcggccggcgatgagggacgtcgtcgaggtgctcgagcgggttgtgcagatggagccgacgactacgaccgcagacaagagaggaggtgacggcaggctgccggcgaagaggtgacggacggcggcggcggcggcgttgccgggatacgccgctccgtcgtcccgttctggccctccgggtgtgttctaacttccgaagtttgtatgtatcggaaagtatacgtcaggagaaacgaacaatttcctgaacaggctatatactacatgtgagattcgatggtgaatttgtgatttgaacacgcaaatgaagattcagtaaaaattcacataactaactaacacgtgttgcagaaatgcatgagcggtggtatgagtctggtgtgttgtgtaccgctgctaaatgttactccatactcaattcttt

SEQ ID NO: 53678 - DNA, 1288 bp, Zea Mays
gtccgcttgctacctgccatctcctctctctctctctctgcaattctgcattatttgtgcttagatttctcatgccacgccaaagtttgttttgttttcccttttctgaggattcatcggggttcttaatcacagttagcagaccagcaatttggtggaacccctacagatttacagagggcacaagcagtggttggctgaagtccagttcctgggtgttcttgagcacccgaacctcgtaaagctgataggctactgcgccgtggattcagaagccagcaagcacaggctgctggtctacgagttcatgcccaacaagagcttggacgaccacctgttcaaccgagctcaccctccgctttcatggagactgaggctgcagatcatgctgggcgctgcgcggggcctggattacctccatgaaggagtgccagaagttcaggtgatctacagggatttcaaggcatccaacgtccttctggacgctgaattcaagccgaagctgtcggatttcggcctcgcaagagagggtccaacagaagggaagacacatgtctccaccgcggtggtggggacgcacgggtacgcggcgccggactacatcgagacggggcacctgacggtgaagagcgacgtgtggagcttcggcgtggtgctgtacgagatcctgacgggccgacgctcgctggagcgcagccgccccgcggaggagcagaagctgctggggtgggtgcggcagcacccgccggacggcgccgggttccgggccatcatggacccgcggctgggcgggcggtacccgctggccgccgcgcgcgaggtggccaggctcgccgaccgttgcctcggcaagaaccccaaggagcggccggcgatgagggacgtcgtcgaggtgctcgagcgggttgtgcagatggagccgacgactacgaccgcagacaagagaggaggtgacggcaggctgccggcgaagaggtgacggacggcggcggcggcggcgttgccgggatacgccgctccgtcgtcccgttctggccctccgggtgtgttctaacttccgaagtttgtatgtatcggaaagtatacgtcaggagaaacgaacaatttcctgaacaggctatatactacatgtgagattcgatggtgaatttgtgatttgaacacgcaaatgaagattcagtaaaaattcacataactaactaacacgtgttgcagaaatgcatgagcggtggtatgagtctggtgtgttgtgtaccgctgctaaatgttactccatactcaattcttt

SEQ ID NO: 53679 - DNA, 1809 bp, Zea Mays
atggccctgccgggttgcagctgccgggtgcccggctctgccttcgtcaagcacgcggggcctctttcttgtttcttcccgtctggtccaaccctcctccttcccctgcccctcccggcgcttccgaggaggagagggctcttcaattccccaaccgattccaaccccacccggacccgggtacactacagcgacgcgcctgccacttctccttccaccaagtcctcgctcgccagcccgcgctgcagcgctcgtcgtccgatggggtgcttcgcgttcaggagcggcggcaagagcggcagcagcagcagcacgtcctccaggccgcagcagcacccgcgcccgggcgcccggacgccgccggccaagtcggccccggcgtccacgtcgtcgtcctcctcctcctccggcgccggcgccggcgcgcagagcaacaccaaggcggcggcggcctcggcgcccgcggcggcgtcgtcggccacgcccacgcgcaccatccaggagctgtcggaggagcggggcgcccagcgcctccgcgtgttcgacctcgacgagctcggcagcgccaccaacggcttcagccgcgcgctcaagctcggcgagggcggcttcggctccgtctaccgcgccttcttccgctccgccgccggcgcccgcgtcgtgctcgccgtcaagcgcctcaaccagcgcagcctccaggggcacaagcagtggttggctgaagtccagttcctgggtgttcttgagcacccgaacctcgtaaagctgataggctactgcgccgtggattcagaagccagcaagcacaggctgctggtctacgagttcatgcccaacaagagcttggacgaccacctgttcaaccgagctcaccctccgctttcatggagactgaggctgcagatcatgctgggcgctgcgcggggcctggattacctccatgaaggagtgccagaagttcaggtgatctacagggatttcaaggcatccaacgtccttctggacgctgaattcaagccgaagctgtcggatttcggcctcgcaagagagggtccaacagaagggaagacacatgtctccaccgcggtggtggggacgcacgggtacgcggcgccggactacatcgagacggggcacctgacggtgaagagcgacgtgtggagcttcggcgtggtgctgtacgagatcctgacgggccgacgctcgctggagcgcagccgccccgcggaggagcagaagctgctggggtgggtgcggcagcacccgccggacggcgccgggttccgggccatcatggacccgcggctgggcgggcggtacccgctggccgccgcgcgcgaggtggccaggctcgccgaccgttgcctcggcaagaaccccaaggagcggccggcgatgagggacgtcgtcgaggtgctcgagcgggttgtgcagatggagccgacgactacgaccgcagacaagagaggaggtgacggcaggctgccggcgaagaggtgacggacggcggcggcggcggcgttgccgggatacgccgctccgtcgtcccgttctggccctccgggtgtgttctaacttccgaagtttgtatgtatcggaaagtatacgtcaggagaaacgaacaatttcctgaacaggctatatactacatgtgagattcgatggtgaatttgtgatttgaacacgcaaatgaagattcagtaaaaattcacataactaactaacacgtgttgcagaaatgcatgagcggtggtatgagtctggtgtgttgtgtaccgctgctaaatgttactccatactcaattcttt

SEQ ID NO: 53680 - DNA, 715 bp, Zea Mays
atatgctagtaaggaaatgatgaaaatcgtcactggataggcctgccactagaatgaatgtttacagacactgtaatgccgatgggatgcctatcacgtcgcctccgataaatgactatccctggagtcctagatgggaccaggcagagatggttgaacggatctacgacttcctgaccgacgagtgccaaaatttcaagaagttctgcagcgatgctatcactcagcagaagtagctgacatcgttctgcagcagaaagccgtggtgctgattttctcagcaacaggctttcttattcccagcaagcggcacacgtgtctacttgtgcgcccgccccaagcctgcaaccgttgatgctgttctctttcttgtcatgtgagaggacgcaacctcaggcgttggttaggatcggcataaaccaagcaggacaacacaagacctgttggttgtttacgatgtcgtacccctgtataagctgccgacatggtgactgtttgggatatggtatagatggatacaatccagttcttttgtaaatatgatatgaaggatggtggcactcctacccccgttgcattctcctctccaaagcaccacatgctgtcgatgccgttgggaagtttgcaaaaatcttactcttattgttatgcaatcaaattgtgtgtttccacgcgatatttcctgcatacagcatacctgctgtcagggccctcg

SEQ ID NO: 53681 - DNA, 1730 bp, Zea Mays
cgtggccagtgtgggtttaatggcaaatggagtatcatccgggctctatttctaaacccaagactgatcaagcgaacaaatcattaataaaaagtttgctagtgagtcgagaagagagagagaggcgtccggaattcatcgccagcgatgtctccgtccgccgacgcccccggcccggcctcctccgcctcggcgcccccgctcgcgcccctcatcgccgcgcagctcaactacctcctctcgcactccaagctgcccattagggtggtacagatctggtccggctgccgcaacggtcgccctgccgatcggttcaggctcgccatccccttctgcctcgactacgtccactgggatttcgtgtacaatgcgctgtctcccaaggtggcaccagacgtggtgttcggtccggaggatgagaggttccagccgctggtcgattacgctgctgctggaaatggcgataagagctgcttggcgcgttgggattgccgcgcccccgagggactccatgcgctcgtacaggagcttcgagaattgtacattgaataccaaaaggagcgggttcacatggtggatgacgcgagactagcgtttgaactaagcacagttctctctaaggaggggattgaagtctgcatggtaccttctgctgatagggatgtccttggagattacctcaaaagatccatctccaggtcatttttcctatcagcaggagttcaagctactcttctatgccttctgctccacgactcaaactaatctcaacaccagatttgaggtcacttctctcagttgaggatgtgaaactccctccatggtcaaatgggatgtgtttggcggagtatcttcctgctttagaagacagtcttaacggtctgcttgtagatgcgtcggcttcaattggttccagaagacgctttattgaggcactagctcccatctttgggagaccattagaggctgatccggagggctacagttctttccatttctggaatgttcacatttctggttcactttgccatcccccttcaattcccaaagcaacaacctgtcgtcacactgcagagttctcagcactgtaatgccgatgggatgcctatcacgtcgcctccgataaatgactatccctggagtcctagatgggaccaggcagagatggttgaacggatctacgacttcctgaccgacgagtgccaaaatttcaagaagttctgcagcgatgctatcactcagcagaagtagctgacatcgttctgcagcagaaagccgtggtgctgattttctcagcaacaggctttcttattcccagcaagcggcacacgtgtctacttgtgcgcccgccccaagcctgcaaccgttgatgctgttctctttcttgtcatgtgagaggacgcaacctcaggcgttggttaggatcggcataaaccaagcaggacaacacaagacctgttggttgtttacgatgtcgtacccctgtataagctgccgacatggtgactgtttgggatatggtatagatggatacaatccagttcttttgtaaatatgatatgaaggatggtggcactcctacccccgttgcattctcctctccaaagcaccacatgctgtcgatgccgttgggaagtttgcaaaaatcttactcttattgttatgcaatcaaattgtgtgtttccacgcgatatttcctgcatacagcatacctgctgtcagggccctcg

SEQ ID NO: 53682 - DNA, 1793 bp, Zea Mays
cgtggccagtgtgggtttaatggcaaatggagtatcatccgggctctatttctaaacccaagactgatcaagcgaacaaatcattaataaaaagtttgctagtgagtcgagaagagagagagaggcgtccggaattcatcgccagcgatgtctccgtccgccgacgcccccggcccggcctcctccgcctcggcgcccccgctcgcgcccctcatcgccgcgcagctcaactacctcctctcgcactccaagctgcccattagggtggtacagatctggtccggctgccgcaacggtcgccctgccgatcggttcaggctcgccatccccttctgcctcgactacgtccactgggatttcgtgtacaatgcgctgtctcccaaggtggcaccagacgtggtgttcggtccggaggatgagaggttccagccgctggtcgattacgctgctgctggaaatggcgataagagctgcttggcgcgttgggattgccgcgcccccgagggactccatgcgctcgtacaggagcttcgagaattgtacattgaataccaaaaggagcgggttcacatggtggatgacgcgagactagcgtttgaactaagcacagttctctctaaggaggggattgaagtctgcatggtaccttctgctgataggatgaggccaaatttgctgtaccacttctggagtctgactttgactttgccaaactggtgccaggatgtccttggagattacctcaaaagatccatctccaggtcatttttcctatcagcaggagttcaagctactcttctatgccttctgctccacgactcaaactaatctcaacaccagatttgaggtcacttctctcagttgaggatgtgaaactccctccatggtcaaatgggatgtgtttggcggagtatcttcctgctttagaagacagtcttaacggtctgcttgtagatgcgtcggcttcaattggttccagaagacgctttattgaggcactagctcccatctttgggagaccattagaggctgatccggagggctacagttctttccatttctggaatgttcacatttctggttcactttgccatcccccttcaattcccaaagcaacaacctgtcgtcacactgcagagttctcagcactgtaatgccgatgggatgcctatcacgtcgcctccgataaatgactatccctggagtcctagatgggaccaggcagagatggttgaacggatctacgacttcctgaccgacgagtgccaaaatttcaagaagttctgcagcgatgctatcactcagcagaagtagctgacatcgttctgcagcagaaagccgtggtgctgattttctcagcaacaggctttcttattcccagcaagcggcacacgtgtctacttgtgcgcccgccccaagcctgcaaccgttgatgctgttctctttcttgtcatgtgagaggacgcaacctcaggcgttggttaggatcggcataaaccaagcaggacaacacaagacctgttggttgtttacgatgtcgtacccctgtataagctgccgacatggtgactgtttgggatatggtatagatggatacaatccagttcttttgtaaatatgatatgaaggatggtggcactcctacccccgttgcattctcctctccaaagcaccacatgctgtcgatgccgttgggaagtttgcaaaaatcttactcttattgttatgcaatcaaattgtgtgtttccacgcgatatttcctgcatacagcatacctgctgtcagggccctcg

SEQ ID NO: 53683 - DNA, 1840 bp, Zea Mays
tatacttggattggatggcatggtactcgagtgaacttcttggcgtggccagtgtgggtttaatggcaaatggagtatcatccgggctctatttctaaacccaagactgatcaagcgaacaaatcattaataaaaagtttgctagtgagtcgagaagagagagagaggcgtccggaattcatcgccagcgatgtctccgtccgccgacgcccccggcccggcctcctccgcctcggcgcccccgctcgcgcccctcatcgccgcgcagctcaactacctcctctcgcactccaagctgcccattagggtggtacagatctggtccggctgccgcaacggtcgccctgccgatcggttcaggctcgccatccccttctgcctcgactacgtccactgggatttcgtgtacaatgcgctgtctcccaaggtggcaccagacgtggtgttcggtccggaggatgagaggttccagccgctggtcgattacgctgctgctggaaatggcgataagagctgcttggcgcgttgggattgccgcgcccccgagggactccatgcgctcgtacaggagcttcgagaattgtacattgaataccaaaaggagcgggttcacatggtggatgacgcgagactagcgtttgaactaagcacagttctctctaaggaggggattgaagtctgcatggtaccttctgctgataggccagatgaggccaaatttgctgtaccacttctggagtctgactttgactttgccaaactggtgccaggatgtccttggagattacctcaaaagatccatctccaggtcatttttcctatcagcaggagttcaagctactcttctatgccttctgctccacgactcaaactaatctcaacaccagatttgaggtcacttctctcagttgaggatgtgaaactccctccatggtcaaatgggatgtgtttggcggagtatcttcctgctttagaagacagtcttaacggtctgcttgtagatgcgtcggcttcaattggttccagaagacgctttattgaggcactagctcccatctttgggagaccattagaggctgatccggagggctacagttctttccatttctggaatgttcacatttctggttcactttgccatcccccttcaattcccaaagcaacaacctgtcgtcacactgcagagttctcagcactgtaatgccgatgggatgcctatcacgtcgcctccgataaatgactatccctggagtcctagatgggaccaggcagagatggttgaacggatctacgacttcctgaccgacgagtgccaaaatttcaagaagttctgcagcgatgctatcactcagcagaagtagctgacatcgttctgcagcagaaagccgtggtgctgattttctcagcaacaggctttcttattcccagcaagcggcacacgtgtctacttgtgcgcccgccccaagcctgcaaccgttgatgctgttctctttcttgtcatgtgagaggacgcaacctcaggcgttggttaggatcggcataaaccaagcaggacaacacaagacctgttggttgtttacgatgtcgtacccctgtataagctgccgacatggtgactgtttgggatatggtatagatggatacaatccagttcttttgtaaatatgatatgaaggatggtggcactcctacccccgttgcattctcctctccaaagcaccacatgctgtcgatgccgttgggaagtttgcaaaaatcttactcttattgttatgcaatcaaattgtgtgtttccacgcgatatttcctgcatacagcatacctgctgtcagggccctcg

SEQ ID NO: 53684 - DNA, 1937 bp, Zea Mays
gttggtaatactgtacaaattttcgtctagttgcgtgctctcgctagggttccgccccgccggcatacccgaccataaaccccgcgccgcccgccagcaaccttcagtctcatttctcacgcgtagctcggacaggcagcttgaagctcgcgaaccagccatggcgaatggggacgcggccgtggaggtcggcgggaacggggagcaggaagccgcggcgcgccaggcgtcgacgttcgcggagctgggtatctgcgcggagctggtggaggcgtgcgacgccatggggtggaaggagcccaccaggatccaggccgaggccatcccccacgcgctccaagggaaggacctgatcgctctggcgcagacggggtccggaaagacgggcgcgttcgcgctgcccatcctgcaggagctgctcagcaaccgccaggctgaacagtctttcttcgcttgcgtgctctcgccaacaagagagctggcgattcagatcgcagagcagtttgaggcgcttggatcagctattggtttgcgttgctcagtgcttgttggaggagtggatcgggtgcagcaagtgttatccatcggaaaacgtccacatattgtagttggaactcctggccgtcttttggaccatttgacagagactaaaggttttagccttaagaaaatcaagtatttggtattggatgaagctgataaattacttaatgtggagtttgagaaatcccttgatgacattctaagcgagatgcctaaagacaggaggactttccttttttcagcgactatgaccaaaaaggtaaataaactgcaacgtgcttgtctcaggaatcctgctaaggttgaagtgtcctccaaatattctacagtagattcacttaaacaagagttctattttgttcctgcagatgacaaggattgctatcttcttcatgttctgaacgagaggctggagagcatgatcatgatctttgtgcgcacctgtgaatctactagactccttgctcttatgttgaggaatcttggtttgaaagctatgtctatcagtggccagatgagtcaggacaagagattaggtgctttgaacagattcaaagcgaaagattgcaatatccttatttgcactgatgtagcaagtcgcggcctcgacattcaaggagttgatatggtcatcaactatgatattccaatgaattctaaggattatgttcatcgggtgggcaggactgcacgtgcagggcgatcaggatacgctgtatctttggtgaaccaatatgaagcccagtggttcgtgctgatcgagcagctccttggttttgcaggcaagaaaattgaccagtgtaaggtggacagagatgaagtccttatacttaaagggcccatatccgatgcaaagagaattgcgctgacgaaattgaaggattccggtggccacaagaagcggagaaatgtgggagatgacgatgaagaggttgaagatcattcttctcattctagaagaccgaaatccttgaagagatcaaacagacgatgaaggctctggagcatgtctggactgcctcgtttcgtgcaagtcctttgtggttcagcgcagatccaccctgtggtggtttggagtgatgctttgcctatttatactagggccagttaagacgttcacttgacaccattccttgggttgaaagcaagtctcccccaattttgtcatcccgacccaaaccatgcttacataaggaatcattttttgctgatggctgccattggtgtattgtagcttctgagtcgcatgtgcggttttgcccaaggcacaggcagccgttgctttgtgtcaacacggaagtgctagcttgacgttttaccggccatatcaccgtatgtccggtatggctataaagtttttaataatgctataaaaatatcgtctcagtctaaat

SEQ ID NO: 53685 - DNA, 1300 bp, Zea Mays
gtttatttgccttttaatttatttaaactgaattatataatctagaggataaataaacatagcctatataatctataagctggattatataattctgcaaggaaataaacagggtcttaagattatgggactcacccaattgtcctttgatttaagctcatgggactcacccaattgccctctgagcttatccggctcatttctgctttcccttatacaggtggcggaggacacacttacctctccgagcctctatggtgggcgggaatgaccacaatgctgcttggggaggtcgcaaacttcattgcttacatatttgcgccggctgtactcgtgactccacttggggcgttaagcataatcgtaagtgttggcgcactttgtgctcaaggagcggcttgagaagctcggggtccttggctgtgtgtcgtgcatagtaggttcagttgttgttgtcatgcatgctcctgaagagcatatgcctaactctgtcaaggaaatctggaacctagctactcaaccagggtttctagcatatgtggtgacagcattgttacttgtgggagcgctagtactcttctttgaacctcgatacggtcagactaacatcctgatatatctgggtatctgctcttcaatgggatcgctaacggtcgttagcatcaaagccattggtgttgccataaagcttacgttggatggggtgaatcaggctgcttatccatacacatggctttttcttatggttgcaattgtttgtggggtttctcaaataaattacctgaacaaggcattggatacctttaatctggctattgtctctcctatatattatgtaatgtttactacccttacaatagtggcaagtggaattatgtttaaggactgggctggtcaaagcttaagtagtattgcttctgaattatgcggcctgataaccatcctttctgggacaattttgttgcacacagcagaggagggagccaacaattctgcagctttgttgccttggcctttggataaagggtctatatcatggtgtatcaacttaagcagtgacaatcttctaaagaatgtcgaagaggactacttcacagctctgcaaagttcacctgccccagtataatgaagaaactgataaatatctaaaagggaacatgcaaatcaaggatagaacttctccattgtttgttcaaggcaagcagaattatcgcctgcatgttgtattttgtataaatgttcatcctttaactaaaactcagaagtgaagattgatatatctagctgctgtgttctacgt

SEQ ID NO: 53686 - DNA, 750 bp, Zea Mays
attaacatctagcaaaacgtaggggagggcgggtgcgagtaggaaggcagtctatctaggccatcaattacgtcaagatccctgccccggccgcgctgctgcacggcgggggtcctgccgaactccgtcgccggggagctgccgtggctccggcacgggtcccagctcctgtgggccttgctccgtcggtggccaggcggaggctcgcagctctggctcctgccgtaggccgtcctcctgaagctcaggtggtccagcgccgcgcgctcgcagtccgacagcgggctcgaggccgtgcggctgttcaccggcgacgtgttgtgccgagtctccgtctccggtcggaggtccgttgccgccgccttgcgggaccgggacgacgcgtcgtgcctcgacgatttgctggtcccgtagcctctgttcttcacctggatcaccaggtggtggaggagcgccaccagctccagcatgtagtgctcggttttcgccttgtcggcgtgatggagcgtctggatgcgggtgacgctgtgctgggagcctgatttcttgctcatgtcgctcctgcgagcaaggtggatgcatgttaggtggtgctgcaactgcaagcaaaacatgttacgctacattgtcgatggggagatcataataaggtttatcaacggtcgcatgggaatcatggtttctcaattcggtactcacccaagatttgcccactcgccgacccatccaaaaccttggtgtgcccttatt

SEQ ID NO: 53687 - DNA, 2814 bp, Zea Mays
tggccccggcccattttaaggcgtttcctctccggcgcagagcgggtagcgggacgaactcgtcactggtgtgggccgtggctgtacgccgcagagtgaagcgagacgagacgacgatgcgcaacgatgacttagctaacccacccaaggtagaggagaagcttggtgctgtccctcatggcctgtccaccgactctgaggttgcccagagggaagctgagtctatctctaggaagactcttaggagctccgccgagaagtttgagttccaggctgaggtgtccagactcatggacatcatcatcaactcactctacagcaacaaggatatcttcctgagggagctcatatccaatgcctctgatgcattggataagatcaggttcctttcccttactgataaggaagttctgggtgaaggtgacactgcaaagcttgagattcagattaagttggacaaagagaagaaaatcctctccattcgggataggggtattggtatgaccaaggaggatcttattaataaccttggaaccattgctaagtctggcacttcagcttttgtcgaaaagatgcagtctggaggtgacctcaatcttattggacagtttggtgttggcttctactcggtgtacttggttgctgactatgtcgaagtggtcagcaagcacaatgatgataaacaatatgtttgggaatcaaaagctgatggatcgtttgctatctccgaggatacatggaatgaaccccttggccgtggaaccgagataagattacatctgcgagatgaggccaaggagtacttggaagaggataagcttaaggatttggttaagaagtactctgagttcatcaacttccctatctatttgtggtcaaccaaggaggttgatgttgaagtgccagctgatgaggatgagacaagtgaagaagaggattcgtccccagaaactacagaagaagagacagaagaagatgaagagaaagagaaaaagcctaagacgaagacgataaaggagactacttctgaatgggaacttctgaatgatatgaaggctgtatggcttcgcagcccgaaggaggttactgatgaggaatactcgaagttttaccactcactagccaaggacttcggtgatgacaagcctatgggttggagccacttcactgctgaaggagatgttgagttcaaagctttgctcttcattccaccgaaggctccgcatgatctctatgagagttactacaacagcaacaagtcaaacctcaagttgtatgttagaagagtgttcatctctgatgaatttgatgaccttcttccgaagtatctcagctttttgaggggtattgttgactcagacacactgccgctgaatgtgtcacgagaaatgctccaacaacatagcagtctgaagactatcaagaagaagctgatccgcaaagctcttgacatgattaggaaacttgctgaagaagaccctgatgagtacagcaacaaggataagacagatgaagagaaaaatgagatggaggagaagaagggccagtacgccaagttctggaatgagtttggcaaatcaatcaagctgggtatcattgaagacgcaactaacaggaaccgccttgcgaagcttcttagatttgaaagtaccaagtcggatggcaaacttgcctcccttgacgagtacatttcaaggatgaagccagggcagaaagacatcttctacctcacgggaagcagcaaagatcagctggagaagtctccgttcctggagaggctaaccaagaagaactacgaggtcatcttcttcaccgaccctatggacgagtacctgatgcagtacctgatggactacgaggacaggaagttccagaacgtgtccaaggagggcctgaagctgggcaaggactcgaggctcaaggacctcaaggagtcgttcaaggagctgacggagtggtggaagaaggccctggagagcgagagcgtggactcggtgaaggtcagcagccggctgcacgacaccccctgcgtcgtcgtcacctccaagtacgggtggagcgccaacatggagaagatcatgcaggcgcagacgctgtcggactcgagcaagcaggcgtacatgcgcggcaagagggtgctggagatcaaccccaggcaccccatcatcaaggagctccgcgacaaggtcgcccaggacaacgagagcgaggagctgaagcagacggcgaggctggtgtaccagacggcccttatggagagcgggttcaacctccccgaccccaaggagttcgcgtccagcatctacaagtcggtgcacaagagcctggacctgagccccgacgcggccgtggaggaggaggacgaggccgaggagcagccggaggtggaagagaaggagccggcggccaaggaggggtcggagccgtccttcgacaaggacgagctgtagtcggcgtgctgtggtctcgtctcgtcttcgggatctgttttgaagtctagctgtagctcccgtttagttgagatatcggggagcccactcactgccagctttgtgtttaggaacgtgatacgggatctttttttttttgttgcctgtctttgtacttgtacaaacctcagttcagtgactcggtctaattaccggctccgattagtgaactgtttctgtctgattagtgagctcaccgacatccatagggtggcgctccctcccttctaatttaacttgtattcttaagttcagctgctcagcttttgtagcttcggtcggatttatatgaagatacaaaaatacaaaccatgtttatagcaag

SEQ ID NO: 53688 - DNA, 2866 bp, Zea Mays
gtcgcttcccaggcacgactccatccccctctctctttctctctctctcttcgacgactcccgccgctgtcttccactcgggggccgccgtccctgtcgtcttccgcccatcactgtcttcttcgctccaccacacttgggactaagaagctacaggtgaatgcggaagagagcagcgatgacttagctaacccacccaaggtagaggagaagcttggtgctgtccctcatggcctgtccaccgactctgaggttgcccagagggaagctgagtctatctctaggaagactcttaggagctccgccgagaagtttgagttccaggctgaggtgtccagactcatggacatcatcatcaactcactctacagcaacaaggatatcttcctgagggagctcatatccaatgcctctgatgcattggataagatcaggttcctttcccttactgataaggaagttctgggtgaaggtgacactgcaaagcttgagattcagattaagttggacaaagagaagaaaatcctctccattcgggataggggtattggtatgaccaaggaggatcttattaataaccttggaaccattgctaagtctggcacttcagcttttgtcgaaaagatgcagtctggaggtgacctcaatcttattggacagtttggtgttggcttctactcggtgtacttggttgctgactatgtcgaagtggtcagcaagcacaatgatgataaacaatatgtttgggaatcaaaagctgatggatcgtttgctatctccgaggatacatggaatgaaccccttggccgtggaaccgagataagattacatctgcgagatgaggccaaggagtacttggaagaggataagcttaaggatttggttaagaagtactctgagttcatcaacttccctatctatttgtggtcaaccaaggaggttgatgttgaagtgccagctgatgaggatgagacaagtgaagaagaggattcgtccccagaaactacagaagaagagacagaagaagatgaagagaaagagaaaaagcctaagacgaagacgataaaggagactacttctgaatgggaacttctgaatgatatgaaggctgtatggcttcgcagcccgaaggaggttactgatgaggaatactcgaagttttaccactcactagccaaggacttcggtgatgacaagcctatgggttggagccacttcactgctgaaggagatgttgagttcaaagctttgctcttcattccaccgaaggctccgcatgatctctatgagagttactacaacagcaacaagtcaaacctcaagttgtatgttagaagagtgttcatctctgatgaatttgatgaccttcttccgaagtatctcagctttttgaggggtattgttgactcagacacactgccgctgaatgtgtcacgagaaatgctccaacaacatagcagtctgaagactatcaagaagaagctgatccgcaaagctcttgacatgattaggaaacttgctgaagaagaccctgatgagtacagcaacaaggataagacagatgaagagaaaaatgagatggaggagaagaagggccagtacgccaagttctggaatgagtttggcaaatcaatcaagctgggtatcattgaagacgcaactaacaggaaccgccttgcgaagcttcttagatttgaaagtaccaagtcggatggcaaacttgcctcccttgacgagtacatttcaaggatgaagccagggcagaaagacatcttctacctcacgggaagcagcaaagatcagctggagaagtctccgttcctggagaggctaaccaagaagaactacgaggtcatcttcttcaccgaccctatggacgagtacctgatgcagtacctgatggactacgaggacaggaagttccagaacgtgtccaaggagggcctgaagctgggcaaggactcgaggctcaaggacctcaaggagtcgttcaaggagctgacggagtggtggaagaaggccctggagagcgagagcgtggactcggtgaaggtcagcagccggctgcacgacaccccctgcgtcgtcgtcacctccaagtacgggtggagcgccaacatggagaagatcatgcaggcgcagacgctgtcggactcgagcaagcaggcgtacatgcgcggcaagagggtgctggagatcaaccccaggcaccccatcatcaaggagctccgcgacaaggtcgcccaggacaacgagagcgaggagctgaagcagacggcgaggctggtgtaccagacggcccttatggagagcgggttcaacctccccgaccccaaggagttcgcgtccagcatctacaagtcggtgcacaagagcctggacctgagccccgacgcggccgtggaggaggaggacgaggccgaggagcagccggaggtggaagagaaggagccggcggccaaggaggggtcggagccgtccttcgacaaggacgagctgtagtcggcgtgctgtggtctcgtctcgtcttcgggatctgttttgaagtctagctgtagctcccgtttagttgagatatcggggagcccactcactgccagctttgtgtttaggaacgtgatacgggatctttttttttttgttgcctgtctttgtacttgtacaaacctcagttcagtgactcggtctaattaccggctccgattagtgaactgtttctgtctgattagtgagctcaccgacatccatagggtggcgctccctcccttctaatttaacttgtattcttaagttcagctgctcagcttttgtagcttcggtcggatttatatgaagatacaaaaatacaaaccatgtttatagcaag

SEQ ID NO: 53689 - DNA, 3521 bp, Zea Mays
gtcgcttcccaggcacgactccatccccctctctctttctctctctctcttcgacgactcccgccgctgtcttccactcgggggccgccgtccctgtcgtcttccgcccatcactgtcttcttcgctccaccacacttgggaaacgcagcgatggatggccagccaggtgctgctgcgttgtcgagtcctggtccgagagtaaaagcaagcctggttctgggatccgaatcgttcgctatcaactccgagttcggtaccctgtcggagcagctggccgcggtgaaggagaagagcatggcggtcctcaaggaacacatcgccaggcacaatgctccgaacgaggtccccgacgaggccgccgagggcgagtctgacataactcagccggcaggaaactactgttctgtggctctcaggctgaatggtgatggtgaggtgatcaagttcccaggacaatctcaggcgatgagcaagttcaatgcagctccggagctgctcgtctctgacggagacctgacaagccttggggcagtggtagaccgtttggtgaccctaaagtacgtagcatctccccaccccctgaaaatccagtctgggctggtgggcaggatcgggagcgggattgttgtgcgagatcggacggctgaggttatagaatgtaaattcaagtccctatcagctctggtttctatctattgtgctgtgcctgcataccaaaagcatacatataagtggaagttcaatcttctgatccttgtgaaatttcaatcttgttctgaccctgcctctactgcagctaagaagctacaggtgaatgcggaagagagcagcgatgacttagctaacccacccaaggtagaggagaagcttggtgctgtccctcatggcctgtccaccgactctgaggttgcccagagggaagctgagtctatctctaggaagactcttaggagctccgccgagaagtttgagttccaggctgaggtgtccagactcatggacatcatcatcaactcactctacagcaacaaggatatcttcctgagggagctcatatccaatgcctctgatgcattggataagatcaggttcctttcccttactgataaggaagttctgggtgaaggtgacactgcaaagcttgagattcagattaagttggacaaagagaagaaaatcctctccattcgggataggggtattggtatgaccaaggaggatcttattaataaccttggaaccattgctaagtctggcacttcagcttttgtcgaaaagatgcagtctggaggtgacctcaatcttattggacagtttggtgttggcttctactcggtgtacttggttgctgactatgtcgaagtggtcagcaagcacaatgatgataaacaatatgtttgggaatcaaaagctgatggatcgtttgctatctccgaggatacatggaatgaaccccttggccgtggaaccgagataagattacatctgcgagatgaggccaaggagtacttggaagaggataagcttaaggatttggttaagaagtactctgagttcatcaacttccctatctatttgtggtcaaccaaggaggttgatgttgaagtgccagctgatgaggatgagacaagtgaagaagaggattcgtccccagaaactacagaagaagagacagaagaagatgaagagaaagagaaaaagcctaagacgaagacgataaaggagactacttctgaatgggaacttctgaatgatatgaaggctgtatggcttcgcagcccgaaggaggttactgatgaggaatactcgaagttttaccactcactagccaaggacttcggtgatgacaagcctatgggttggagccacttcactgctgaaggagatgttgagttcaaagctttgctcttcattccaccgaaggctccgcatgatctctatgagagttactacaacagcaacaagtcaaacctcaagttgtatgttagaagagtgttcatctctgatgaatttgatgaccttcttccgaagtatctcagctttttgaggggtattgttgactcagacacactgccgctgaatgtgtcacgagaaatgctccaacaacatagcagtctgaagactatcaagaagaagctgatccgcaaagctcttgacatgattaggaaacttgctgaagaagaccctgatgagtacagcaacaaggataagacagatgaagagaaaaatgagatggaggagaagaagggccagtacgccaagttctggaatgagtttggcaaatcaatcaagctgggtatcattgaagacgcaactaacaggaaccgccttgcgaagcttcttagatttgaaagtaccaagtcggatggcaaacttgcctcccttgacgagtacatttcaaggatgaagccagggcagaaagacatcttctacctcacgggaagcagcaaagatcagctggagaagtctccgttcctggagaggctaaccaagaagaactacgaggtcatcttcttcaccgaccctatggacgagtacctgatgcagtacctgatggactacgaggacaggaagttccagaacgtgtccaaggagggcctgaagctgggcaaggactcgaggctcaaggacctcaaggagtcgttcaaggagctgacggagtggtggaagaaggccctggagagcgagagcgtggactcggtgaaggtcagcagccggctgcacgacaccccctgcgtcgtcgtcacctccaagtacgggtggagcgccaacatggagaagatcatgcaggcgcagacgctgtcggactcgagcaagcaggcgtacatgcgcggcaagagggtgctggagatcaaccccaggcaccccatcatcaaggagctccgcgacaaggtcgcccaggacaacgagagcgaggagctgaagcagacggcgaggctggtgtaccagacggcccttatggagagcgggttcaacctccccgaccccaaggagttcgcgtccagcatctacaagtcggtgcacaagagcctggacctgagccccgacgcggccgtggaggaggaggacgaggccgaggagcagccggaggtggaagagaaggagccggcggccaaggaggggtcggagccgtccttcgacaaggacgagctgtagtcggcgtgctgtggtctcgtctcgtcttcgggatctgttttgaagtctagctgtagctcccgtttagttgagatatcggggagcccactcactgccagctttgtgtttaggaacgtgatacgggatctttttttttttgttgcctgtctttgtacttgtacaaacctcagttcagtgactcggtctaattaccggctccgattagtgaactgtttctgtctgattagtgagctcaccgacatccatagggtggcgctccctcccttctaatttaacttgtattcttaagttcagctgctcagcttttgtagcttcggtcggatttatatgaagatacaaaaatacaaaccatgtttatagcaag

SEQ ID NO: 53690 - DNA, 3999 bp, Zea Mays
gtcgcttcccaggcacgactccatccccctctctctttctctctctctcttcgacgactcccgccgctgtcttccactcgggggccgccgtccctgtcgtcttccgcccatcactgtcttcttcgctccaccacacttgggaaacgcagcgatggatggccagccaggtgctgctgcgttgtcgagtcctggtccgagagtaaaagcaagcctggttctgggatccgaatcgttcgctatcaactccgagttcggtaccctgtcggagcagctggccgcggtgaaggagaagagcatggcggtcctcaaggaacacatcgccaggcacaatgctccgaacgaggtccccgacgaggccgccgagggcgagtctgacagtgagggcgaagcgccgcttgtcgacaacccgccgaagaaacctaagaagcagaagtgaccgtctctagtcatgcacttgacttttttttttttgccatgcgttgcttgtgtaacgccagactgttgtcagtcacaatagcaatatgcaggtgttagcactcacttgctgttcgtaccactatcattagttctgcttctctgtcatgtgttcatatttttcttcccatacacttgcaagggtgttcttgtctgtcggtgtgctgcacgctccgtatatctgtagcagaaacacaattcactaacagcttggtttgaggaatgggttagcctatcatcttctcagtcaattttttgtttggtttatagaatgaaatgagttgatccatcaacaattagtaatagcagctgtaacacagagctagctggttaattctgtccccgaaggagtatggtttcctctcggtggttattatccagtaactcagccggcaggaaactactgttctgtggctctcaggctgaatggtgatggtgaggtgatcaagttcccaggacaatctcaggcgatgagcaagttcaatgcagctccggagctgctcgtctctgacggagacctgacaagccttggggcagtggtagaccgtttggtgaccctaaagtacgtagcatctccccaccccctgaaaatccagtctgggctggtgggcaggatcgggagcgggattgttgtgcgagatcggacggctgaggttatagaatgtaaattcaagtccctatcagctctggtttctatctattgtgctgtgcctgcataccaaaagcatacatataagtggaagttcaatcttctgatccttgtgaaatttcaatcttgttctgaccctgcctctactgcagctaagaagctacaggtgaatgcggaagagagcagcgatgacttagctaacccacccaaggtagaggagaagcttggtgctgtccctcatggcctgtccaccgactctgaggttgcccagagggaagctgagtctatctctaggaagactcttaggagctccgccgagaagtttgagttccaggctgaggtgtccagactcatggacatcatcatcaactcactctacagcaacaaggatatcttcctgagggagctcatatccaatgcctctgatgcattggataagatcaggttcctttcccttactgataaggaagttctgggtgaaggtgacactgcaaagcttgagattcagattaagttggacaaagagaagaaaatcctctccattcgggataggggtattggtatgaccaaggaggatcttattaataaccttggaaccattgctaagtctggcacttcagcttttgtcgaaaagatgcagtctggaggtgacctcaatcttattggacagtttggtgttggcttctactcggtgtacttggttgctgactatgtcgaagtggtcagcaagcacaatgatgataaacaatatgtttgggaatcaaaagctgatggatcgtttgctatctccgaggatacatggaatgaaccccttggccgtggaaccgagataagattacatctgcgagatgaggccaaggagtacttggaagaggataagcttaaggatttggttaagaagtactctgagttcatcaacttccctatctatttgtggtcaaccaaggaggttgatgttgaagtgccagctgatgaggatgagacaagtgaagaagaggattcgtccccagaaactacagaagaagagacagaagaagatgaagagaaagagaaaaagcctaagacgaagacgataaaggagactacttctgaatgggaacttctgaatgatatgaaggctgtatggcttcgcagcccgaaggaggttactgatgaggaatactcgaagttttaccactcactagccaaggacttcggtgatgacaagcctatgggttggagccacttcactgctgaaggagatgttgagttcaaagctttgctcttcattccaccgaaggctccgcatgatctctatgagagttactacaacagcaacaagtcaaacctcaagttgtatgttagaagagtgttcatctctgatgaatttgatgaccttcttccgaagtatctcagctttttgaggggtattgttgactcagacacactgccgctgaatgtgtcacgagaaatgctccaacaacatagcagtctgaagactatcaagaagaagctgatccgcaaagctcttgacatgattaggaaacttgctgaagaagaccctgatgagtacagcaacaaggataagacagatgaagagaaaaatgagatggaggagaagaagggccagtacgccaagttctggaatgagtttggcaaatcaatcaagctgggtatcattgaagacgcaactaacaggaaccgccttgcgaagcttcttagatttgaaagtaccaagtcggatggcaaacttgcctcccttgacgagtacatttcaaggatgaagccagggcagaaagacatcttctacctcacgggaagcagcaaagatcagctggagaagtctccgttcctggagaggctaaccaagaagaactacgaggtcatcttcttcaccgaccctatggacgagtacctgatgcagtacctgatggactacgaggacaggaagttccagaacgtgtccaaggagggcctgaagctgggcaaggactcgaggctcaaggacctcaaggagtcgttcaaggagctgacggagtggtggaagaaggccctggagagcgagagcgtggactcggtgaaggtcagcagccggctgcacgacaccccctgcgtcgtcgtcacctccaagtacgggtggagcgccaacatggagaagatcatgcaggcgcagacgctgtcggactcgagcaagcaggcgtacatgcgcggcaagagggtgctggagatcaaccccaggcaccccatcatcaaggagctccgcgacaaggtcgcccaggacaacgagagcgaggagctgaagcagacggcgaggctggtgtaccagacggcccttatggagagcgggttcaacctccccgaccccaaggagttcgcgtccagcatctacaagtcggtgcacaagagcctggacctgagccccgacgcggccgtggaggaggaggacgaggccgaggagcagccggaggtggaagagaaggagccggcggccaaggaggggtcggagccgtccttcgacaaggacgagctgtagtcggcgtgctgtggtctcgtctcgtcttcgggatctgttttgaagtctagctgtagctcccgtttagttgagatatcggggagcccactcactgccagctttgtgtttaggaacgtgatacgggatctttttttttttgttgcctgtctttgtacttgtacaaacctcagttcagtgactcggtctaattaccggctccgattagtgaactgtttctgtctgattagtgagctcaccgacatccatagggtggcgctccctcccttctaatttaacttgtattcttaagttcagctgctcagcttttgtagcttcggtcggatttatatgaagatacaaaaatacaaaccatgtttatagcaag

SEQ ID NO: 53691 - DNA, 985 bp, Zea Mays
cgagtaacaacaaaaaaattggtttgtagatcaatcggtgatgcttatctcaagaagcaagagttcaatagggaacccctatatgtgaaatttcggcttcgtgaaccttttcacaagccgatactaagttcagaaccatcgatcaatgtgcaaccactacaaccacacgaccagtttctcatatttgcatctgatggactttgggagcacttaaccaaccaagaagctgttgatattgttcacagtagcccccgcagtggctgtgctaggaggctgataagagcggcgctgcaagtggcagccaagaaaagggagatgaggtactcagacctcaagaagatcgaccgcggtgttcgccgccacttccacgacgacataacagtcatagtagtgttccttgattccagcctcgtgagcaaggcgagcacgcaccgaggccccactctttccctgcgaggcggcggtgccagcgctggtctgcgcagcaacacgcttgcaccaacgtcaatgtggctatgaggaggctacaccctgactggaggacgttttctttcctcgtgtcgaatgtgttatatatgtacttgtaccggccaaggtcatccatctcccctcaatggtgtaaagaactaggagaggcgtggaagctcctctccagcgtctttgaatcccctcaatggtgtcaaggtgtggactcaagtcaatagcttcgctgttctgatgatgctctgtggaaactcgaatccttccacctgaaaaccaagtagtatgtcttctagtgctggaattaaccctagtgcatatatacatatgaaataaaaaaaagccaaaaggaggagtaacttatttaactgatgctgtgaggtgtatgtatgttttgtattgtatgtgtactgattttgactgccactgcatatactgttgttaatcgacccctggtaaagtgaaatcgctgatttcgtcctactattatcagctgttcccagta

SEQ ID NO: 53692 - DNA, 1837 bp, Zea Mays
ttcgaatcagcgtgcctgttctattagttttcggcgcttgcgtgccctggctgaaagtcagtggagttctcagttctcaccaacattcagaaaactgttggctcgctgacaagtccaactgtgtttttcttggactacagatgaagcgagctcgaaggcgtatgtgcaagagatgactgatgagggatgctagtgacattgatgaacttgttacgggcgtgctggcgaccgtcatcgaaccggcatgcccgaacaggctcagatgttaccggtaggcaggatggacttctatggtacaaggacgccgggcagcatgtcaacggggagttttccatggctgttgttcaggccaataacttacttgaggaccagtgtcagattgagtcgggcccactgagttttctagattccggaccatatggcacttttgttggcgtttacgatggacatggtggtccagagacggcctgctatatcaatgatcatctcttccagaatctgaaaaggtttgcatctgagcagaatacaatgtctgctgatgtactgaagaaggcgtatgaagctacagaagatggattcttttctgttgttaccaaacaatggcctgtaaagcctcagatagcagctgtcggctcatgctgcctggtcggtgtaatttgtggtggcatgctttatgttgccaatgttggggattcccgtgttgttttaggaagacatgttaaggctactggagaagttttggctgtccaactgtcagcagagcataatgtaagtattgagtcagtgagaaaagaactgcagtcaatgcacccagaagataggcacattgttgttctcaagcacaatgtttggcgtgtaaaaggactaattcaggtttgtagatcaatcggtgatgcttatctcaagaagcaagagttcaatagggaacccctatatgtgaaatttcggcttcgtgaaccttttcacaagccgatactaagttcagaaccatcgatcaatgtgcaaccactacaaccacacgaccagtttctcatatttgcatctgatggactttgggagcacttaaccaaccaagaagctgttgatattgttcacagtagcccccgcagtggctgtgctaggaggctgataagagcggcgctgcaagtggcagccaagaaaagggagatgaggtactcagacctcaagaagatcgaccgcggtgttcgccgccacttccacgacgacataacagtcatagtagtgttccttgattccagcctcgtgagcaaggcgagcacgcaccgaggccccactctttccctgcgaggcggcggtgccagcgctggtctgcgcagcaacacgcttgcaccaacgtcaatgtggctatgaggaggctacaccctgactggaggacgttttctttcctcgtgtcgaatgtgttatatatgtacttgtaccggccaaggtcatccatctcccctcaatggtgtaaagaactaggagaggcgtggaagctcctctccagcgtctttgaatcccctcaatggtgtcaaggtgtggactcaagtcaatagcttcgctgttctgatgatgctctgtggaaactcgaatccttccacctgaaaaccaagtagtatgtcttctagtgctggaattaaccctagtgcatatatacatatgaaataaaaaaaagccaaaaggaggagtaacttatttaactgatgctgtgaggtgtatgtatgttttgtattgtatgtgtactgattttgactgccactgcatatactgttgttaatcgacccctggtaaagtgaaatcgctgatttcgtcctactattatcagctgttcccagta

SEQ ID NO: 53693 - DNA, 1722 bp, Zea Mays
ttaccatttttttcggtttttacagatgaagcgagctcgaaggcgtatgtgcaagagatgactgatgagggatgctagtgacattgatgaacttgttacgggcgtgctggcgaccgtcatcgaaccggcatgcccgaacaggctcagatgttaccggtaggcaggatggacttctatggtacaaggacgccgggcagcatgtcaacggggagttttccatggctgttgttcaggccaataacttacttgaggaccagtgtcagattgagtcgggcccactgagttttctagattccggaccatatggcacttttgttggcgtttacgatggacatggtggtccagagacggcctgctatatcaatgatcatctcttccagaatctgaaaaggtttgcatctgagcagaatacaatgtctgctgatgtactgaagaaggcgtatgaagctacagaagatggattcttttctgttgttaccaaacaatggcctgtaaagcctcagatagcagctgtcggctcatgctgcctggtcggtgtaatttgtggtggcatgctttatgttgccaatgttggggattcccgtgttgttttaggaagacatgttaaggctactggagaagttttggctgtccaactgtcagcagagcataatgtaagtattgagtcagtgagaaaagaactgcagtcaatgcacccagaagataggcacattgttgttctcaagcacaatgtttggcgtgtaaaaggactaattcaggtttgtagatcaatcggtgatgcttatctcaagaagcaagagttcaatagggaacccctatatgtgaaatttcggcttcgtgaaccttttcacaagccgatactaagttcagaaccatcgatcaatgtgcaaccactacaaccacacgaccagtttctcatatttgcatctgatggactttgggagcacttaaccaaccaagaagctgttgatattgttcacagtagcccccgcagtggctgtgctaggaggctgataagagcggcgctgcaagtggcagccaagaaaagggagatgaggtactcagacctcaagaagatcgaccgcggtgttcgccgccacttccacgacgacataacagtcatagtagtgttccttgattccagcctcgtgagcaaggcgagcacgcaccgaggccccactctttccctgcgaggcggcggtgccagcgctggtctgcgcagcaacacgcttgcaccaacgtcaatgtggctatgaggaggctacaccctgactggaggacgttttctttcctcgtgtcgaatgtgttatatatgtacttgtaccggccaaggtcatccatctcccctcaatggtgtaaagaactaggagaggcgtggaagctcctctccagcgtctttgaatcccctcaatggtgtcaaggtgtggactcaagtcaatagcttcgctgttctgatgatgctctgtggaaactcgaatccttccacctgaaaaccaagtagtatgtcttctagtgctggaattaaccctagtgcatatatacatatgaaataaaaaaaagccaaaaggaggagtaacttatttaactgatgctgtgaggtgtatgtatgttttgtattgtatgtgtactgattttgactgccactgcatatactgttgttaatcgacccctggtaaagtgaaatcgctgatttcgtcctactattatcagctgttcccagta

SEQ ID NO: 53694 - DNA, 1520 bp, Zea Mays
cggaaaccccattccttgacgctttctcccgcatgccgtgtcgtcgtcccacatatactacatccgatgacaccaccatggagaggagcagctccacctcttcttccagcaggacgactccgggcagctcgaggctacagccgacgcgcagccgcctcggcgtcgacgaggagtacgacagcgccttcaagtccaagtctttcctcgacctctggtcgcacgcgcaccgccacctcaggcacaccttctcctcctcgccgtccttcaagctcgccacgtcgtcgtcgttcaagtccgccggcgtcgtcaaggaccacgaccacgacgcggcgtcggacgccgccttggagcagtcgtgctcgtacaccgtcctcgacgacttcgtgctggagcccagcccggaggtgctcgcgcgggggcgagggcggcggaggcggaggcgccgcgtcgacaagctgctggtcgagtacttcgacgtgacgcaggaggcctgcgaggcgtgctcctcgctcctcgccgccatcgccgcggcgcggcgccaccagctgacgctccgccgcctactccgccggctggaggacgacgacgacgacgaccaagccgccgcgtgggacgcagtcgcggcgcacgtccgcctcgacaaccctctgtcgtcgccgggccggctcgcggcgttccacgccgtgcacgggcggtgcggcccgctcgcggcgcgtctggcgtcggcgcagcgccggctgcggcggctggcgcgggcgatgcgcgtggcgcggggcgcggccgcggcggcgctcgtggcggcgtgtgcggcggccatcgtggcctcggtggtgttcgccgcgcacgccgtggtgggcatcggggcggccgccgctgccgcgggcgtgggagctggcccggccacctccgtgcggcggcggtggtacgcgcgcgcgggcgccgcggtggacgcagcggcgcgcggcgcatacatcgttggacgggacctggacacggtgagctgtatggtgcggcgcgcgcacgacgagctggagcacggtcgcgacgtggcgcgcatcgcggtgcagggccgcggcgagcgcccgctgctgcaggaggtgacgagggaggaggcggagtgcgaggaggacctcaggacgcagctggaggagctagaggagcatgtctgcctctgcctcatcaccatcaaccggagcaggaggatggtggcgcacgagatgacgggaggctcgctgcagccgacgccacaacattagcttctgtgtgagtgagaaagacgaggaaacgatttggtttctcatcattgttcatatgatcgattctatagttgaaactagacgaataattcttttacatgtacagtagtagtatacgaaaatttttataggaagggtgtgtgtacgaccgaggtacaaatactcatttgaacttgtttacttgagatatgtttttccttttgtttgtgctggtttattttagcatattttatatattgcatttagatatgaactagaattggc

SEQ ID NO: 53695 - DNA, 1734 bp, Zea Mays
catgcatgcatgtttatctccttgatcgcagtgtctgcgaattggagttgcttttgctggcgatatgatgatgcacatactacatatatacatacacctgtacttatttatttctatagactagctaagctaagctcgttactctcctggagtacatacttgcatgtaaagtaaagcaacgctaatatctctactcgatcggaaaccccattccttgacgctttctcccgcatgccgtgtcgtcgtcccacatatactacatgtatgaaccacgcacccgatgacaccaccatggagaggagcagctccacctcttcttccagcaggacgactccgggcagctcgaggctacagccgacgcgcagccgcctcggcgtcgacgaggagtacgacagcgccttcaagtccaagtctttcctcgacctctggtcgcacgcgcaccgccacctcaggcacaccttctcctcctcgccgtccttcaagctcgccacgtcgtcgtcgttcaagtccgccggcgtcgtcaaggaccacgaccacgacgcggcgtcggacgccgccttggagcagtcgtgctcgtacaccgtcctcgacgacttcgtgctggagcccagcccggaggtgctcgcgcgggggcgagggcggcggaggcggaggcgccgcgtcgacaagctgctggtcgagtacttcgacgtgacgcaggaggcctgcgaggcgtgctcctcgctcctcgccgccatcgccgcggcgcggcgccaccagctgacgctccgccgcctactccgccggctggaggacgacgacgacgacgaccaagccgccgcgtgggacgcagtcgcggcgcacgtccgcctcgacaaccctctgtcgtcgccgggccggctcgcggcgttccacgccgtgcacgggcggtgcggcccgctcgcggcgcgtctggcgtcggcgcagcgccggctgcggcggctggcgcgggcgatgcgcgtggcgcggggcgcggccgcggcggcgctcgtggcggcgtgtgcggcggccatcgtggcctcggtggtgttcgccgcgcacgccgtggtgggcatcggggcggccgccgctgccgcgggcgtgggagctggcccggccacctccgtgcggcggcggtggtacgcgcgcgcgggcgccgcggtggacgcagcggcgcgcggcgcatacatcgttggacgggacctggacacggtgagctgtatggtgcggcgcgcgcacgacgagctggagcacggtcgcgacgtggcgcgcatcgcggtgcagggccgcggcgagcgcccgctgctgcaggaggtgacgagggaggaggcggagtgcgaggaggacctcaggacgcagctggaggagctagaggagcatgtctgcctctgcctcatcaccatcaaccggagcaggaggatggtggcgcacgagatgacgggaggctcgctgcagccgacgccacaacattagcttctgtgtgagtgagaaagacgaggaaacgatttggtttctcatcattgttcatatgatcgattctatagttgaaactagacgaataattcttttacatgtacagtagtagtatacgaaaatttttataggaagggtgtgtgtacgaccgaggtacaaatactcatttgaacttgtttacttgagatatgtttttccttttgtttgtgctggtttattttagcatattttatatattgcatttagatatgaactagaattggc

SEQ ID NO: 53696 - DNA, 1906 bp, Zea Mays
gttgcctctgtacgtgtccttttccttccttaatagctcgagcctgtatccagaaagaagaagccagctagctagctctctctctctctctctctctctctctctctctgttggcgcgtgggtgggggtggcttgtgggctctctttcttgccttgcaagagctagctttctcttggatcatcattttctctgcccccacattcccggatatcccagtgccctatatataattcaagttccatgtgcaaaaacaaaaacacacacatacagttatgttaggttgttgactgatcgatcagacaaatccagtggtagcacgattttgttttatttgttctccgaaccagcaccgccaaaatgagaccgtcatcgctgcctccttcttcttcttctctgtcatcgtcattgccatcgtcgtcgtcgacctccattttcgggattggaactcccgatgacaccaccatggagaggagcagctccacctcttcttccagcaggacgactccgggcagctcgaggctacagccgacgcgcagccgcctcggcgtcgacgaggagtacgacagcgccttcaagtccaagtctttcctcgacctctggtcgcacgcgcaccgccacctcaggcacaccttctcctcctcgccgtccttcaagctcgccacgtcgtcgtcgttcaagtccgccggcgtcgtcaaggaccacgaccacgacgcggcgtcggacgccgccttggagcagtcgtgctcgtacaccgtcctcgacgacttcgtgctggagcccagcccggaggtgctcgcgcgggggcgagggcggcggaggcggaggcgccgcgtcgacaagctgctggtcgagtacttcgacgtgacgcaggaggcctgcgaggcgtgctcctcgctcctcgccgccatcgccgcggcgcggcgccaccagctgacgctccgccgcctactccgccggctggaggacgacgacgacgacgaccaagccgccgcgtgggacgcagtcgcggcgcacgtccgcctcgacaaccctctgtcgtcgccgggccggctcgcggcgttccacgccgtgcacgggcggtgcggcccgctcgcggcgcgtctggcgtcggcgcagcgccggctgcggcggctggcgcgggcgatgcgcgtggcgcggggcgcggccgcggcggcgctcgtggcggcgtgtgcggcggccatcgtggcctcggtggtgttcgccgcgcacgccgtggtgggcatcggggcggccgccgctgccgcgggcgtgggagctggcccggccacctccgtgcggcggcggtggtacgcgcgcgcgggcgccgcggtggacgcagcggcgcgcggcgcatacatcgttggacgggacctggacacggtgagctgtatggtgcggcgcgcgcacgacgagctggagcacggtcgcgacgtggcgcgcatcgcggtgcagggccgcggcgagcgcccgctgctgcaggaggtgacgagggaggaggcggagtgcgaggaggacctcaggacgcagctggaggagctagaggagcatgtctgcctctgcctcatcaccatcaaccggagcaggaggatggtggcgcacgagatgacgggaggctcgctgcagccgacgccacaacattagcttctgtgtgagtgagaaagacgaggaaacgatttggtttctcatcattgttcatatgatcgattctatagttgaaactagacgaataattcttttacatgtacagtagtagtatacgaaaatttttataggaagggtgtgtgtacgaccgaggtacaaatactcatttgaacttgtttacttgagatatgtttttccttttgtttgtgctggtttattttagcatattttatatattgcatttagatatgaactagaattggc

SEQ ID NO: 53697 - DNA, 1932 bp, Zea Mays
ggaagccacgcgcggcgcggatacggttgcgtgaacgtgcacatcagctagctaggtctagaatcattcatatcaccaccccggacgtaaacgatcgatggagccctccaccacttctctctcatatatccatatcgatgtggatcgccgacaagcgcgcggtccatgcatggatctgcatgcggcctctcgctcttctctttcttcttcctctagcttcctggttctttcttcttttgtatgcctgctagctgccatccgatccgaagaagaccgcgatgctccgggtccagcggaggatcctccggtcgcgtggcgtggacgattgtacgagagaaagagagagagagagagagagagagagagagagagagagagatcaggattggcgatttgcatgccaaatcgcaatgctgcgtgctggagagagatatggacacacacacaacagtgatgctgcccaagcaacgagacgccgatgacaccaccatggagaggagcagctccacctcttcttccagcaggacgactccgggcagctcgaggctacagccgacgcgcagccgcctcggcgtcgacgaggagtacgacagcgccttcaagtccaagtctttcctcgacctctggtcgcacgcgcaccgccacctcaggcacaccttctcctcctcgccgtccttcaagctcgccacgtcgtcgtcgttcaagtccgccggcgtcgtcaaggaccacgaccacgacgcggcgtcggacgccgccttggagcagtcgtgctcgtacaccgtcctcgacgacttcgtgctggagcccagcccggaggtgctcgcgcgggggcgagggcggcggaggcggaggcgccgcgtcgacaagctgctggtcgagtacttcgacgtgacgcaggaggcctgcgaggcgtgctcctcgctcctcgccgccatcgccgcggcgcggcgccaccagctgacgctccgccgcctactccgccggctggaggacgacgacgacgacgaccaagccgccgcgtgggacgcagtcgcggcgcacgtccgcctcgacaaccctctgtcgtcgccgggccggctcgcggcgttccacgccgtgcacgggcggtgcggcccgctcgcggcgcgtctggcgtcggcgcagcgccggctgcggcggctggcgcgggcgatgcgcgtggcgcggggcgcggccgcggcggcgctcgtggcggcgtgtgcggcggccatcgtggcctcggtggtgttcgccgcgcacgccgtggtgggcatcggggcggccgccgctgccgcgggcgtgggagctggcccggccacctccgtgcggcggcggtggtacgcgcgcgcgggcgccgcggtggacgcagcggcgcgcggcgcatacatcgttggacgggacctggacacggtgagctgtatggtgcggcgcgcgcacgacgagctggagcacggtcgcgacgtggcgcgcatcgcggtgcagggccgcggcgagcgcccgctgctgcaggaggtgacgagggaggaggcggagtgcgaggaggacctcaggacgcagctggaggagctagaggagcatgtctgcctctgcctcatcaccatcaaccggagcaggaggatggtggcgcacgagatgacgggaggctcgctgcagccgacgccacaacattagcttctgtgtgagtgagaaagacgaggaaacgatttggtttctcatcattgttcatatgatcgattctatagttgaaactagacgaataattcttttacatgtacagtagtagtatacgaaaatttttataggaagggtgtgtgtacgaccgaggtacaaatactcatttgaacttgtttacttgagatatgtttttccttttgtttgtgctggtttattttagcatattttatatattgcatttagatatgaactagaattggc

SEQ ID NO: 53698 - DNA, 993 bp, Zea Mays
ccataccctgcagcctgcaggcaattcctctcgcacaggaaaaacccttacccgaaaatactcatctgtcgaggtccattccggaaaaccgcgccagcaggcccagctccaaccaccgctcgtctcgtctccttcctcctctgcttcctcccgtctcgtctccgacgacctcgtctttcccccccagccagcctcgcctcaccgactccccgatccggtccctcccttcgccagctatgcatccctcctccggcgcgggggactacgccccttactacccaccttatccctccccggccgcgccgcctcccgccgcctacccgtcggtgtccgccccggcttctgcgcccccgtactcgtcgtaccccgcggacttcgcccccgcgccttcgtaccccgcgtacccgcccgccgacctcccccactacgcgccgccgccggctgcgcccgcgcccccgcagccgtactacccctacgagccggcgccggcgccgccgctgccgccgtccccgcacaacccggtgccctctccgtacccgtcgctggatcgggcggggagctacggctacggatctggccctggctccgggtacggccaggagctgtacccgcccaagccggcgggcgggtggtccgacgacggagcgtacgcttacaacgggggcgacgcgccggagccgtacgggtccaggggcaccgcaccgaggccgggctcgggatccgcgctgtttgatgactacgggaggtccattggctcagctgccgataggggtggccgtgggggtagcgcggccagccccaaggtggtgagggccgtgcccaaggcagagacgtcagaggacgtcaggggtggggtgcagaagttcagggtcaagctgctgccggagggcgctgggagccccatggatgtgctctgtcagatccatcgcacccacacgcagtgcagtgctccagccgccaacctgcagacgccatcgcgtccacacgccacag

SEQ ID NO: 53699 - DNA, 1675 bp, Zea Mays
gttttcaagtgcttgcctggtttgggcatacgatgaaaaaaaaagaccttcaaattcatcattgtttcgaaagaatagttatttttcctctaaatggttcactgcggatttatgaaaaatagtggtgcagatatggatatcattgatgtcaagtacatacagaaatgcaaattcgtggttgcctctggtattttcgatggttacgacatccctcaccagccatccaatatcagccgccggtctcagaagctgttctgcttcctgatggtggtggacgaagtatctcttgattttatccaaaagaacaccaccgtcaagatcgacagcgctggagggaaatgggttggcatatggcgacttctaacagtgcaccgcctcccattcgacgaacctagaaggaacgggaaaatacccaagatcttgacgcacagactattccctcaagcttggtatagcatttggattgacgggaaaatggagctcatagttgatccgctgcttattctcgagaggtacctctggcgtggaaaatacacattcgcggtggctgtccacaagcatcataggagcatctacgaggagggcgacgcgatcaagcgacggaagcgctacgcccgccctttggttgatcttcagatgaagatgtactattacgaggggatggagccttggagcccgaagaaaaagatgcctggcgatgtgccggagggagccgtgctgatccgggaacacacagcgacgaccaacctgttcagctgcctctggttcaacgaggtgaacctcttcaccccacgcgaccagatcagcttcggctacgtggcgcgcaggctcggcgacgctctcgagctcttcatgttccccaactgcgagtacaactcgctgttcgtcctgcacaggcacacgagggagcactcgtctaaggtggagtgggccaaaacggtcgacgagatcgtggagaaggggctgagggagagtagaggagggttggggctgtggactccgtaccctgcggacctcagctccgtggaactccctgctgtaagaagaacttcgccggcaggataaggctaggctgtcaaagaccacaaagctcccagcctagcctgccgatcctgtgatctttgattcgttcatggttgtacagagtagaactccactgtttgtttgttttttttggcgtagattctgtaggctgacgcttggagtttgttgcttccagttctgtacaacactcatctacggaggtagcacagaaggatttctcacaaaagaaaaatcatgactcgtcaggtctagtatagggatatcaaaacagcattagaagtcgtcacacacaaaacaaccatagcacctgaaaatgatcagcgccaacgcatcatgcacttccttaattttaatgaatcgtttgcctttcccctgatacaatcacatcacatcagcattctgtgacctaccaaatgttcctacaccagaatcacaggacgcgcgtttcctttacatttacgtctggcgcctgacgtgtggggccacaccatagccgcagctggccccacggccctacacgtgagtcagccagttgcagctatgttcacggacgtatatacagatgatcccgccgggaatcacaagggccaactcgaggtggaagtggaacacaagactcggtctgcacggc

SEQ ID NO: 53700 - DNA, 1792 bp, Zea Mays
attagggcatttggcactgaagcatttgcagatattgttgaatgctaaatgaatgggtctggcatgagccaatcatcaacttgatattctccaagatccatagatgatgaaggttcactgcggatttatgaaaaatagtggtgcagatatggatatcattgatgtcaagtacatacagaaatgcaaattcgtggttgcctctggtattttcgatggttacgacatccctcaccagccatccaatatcagccgccggtctcagaagctgttctgcttcctgatggtggtggacgaagtatctcttgattttatccaaaagaacaccaccgtcaagatcgacagcgctggagggaaatgggttggcatatggcgacttctaacagtgcaccgcctcccattcgacgaacctagaaggaacgggaaaatacccaagatcttgacgcacagactattccctcaagcttggtatagcatttggattgacgggaaaatggagctcatagttgatccgctgcttattctcgagaggtacctctggcgtggaaaatacacattcgcggtggctgtccacaagcatcataggagcatctacgaggagggcgacgcgatcaagcgacggaagcgctacgcccgccctttggttgatcttcagatgaagatgtactattacgaggggatggagccttggagcccgaagaaaaagatgcctggcggtgagtgaaatcacacatgcccacaatactctacacaactgttgttttgtcactttaacgttagcacttcctgaaagaccagctaaagctataacctgcagatgtgccggagggagccgtgctgatccgggaacacacagcgacgaccaacctgttcagctgcctctggttcaacgaggtgaacctcttcaccccacgcgaccagatcagcttcggctacgtggcgcgcaggctcggcgacgctctcgagctcttcatgttccccaactgcgagtacaactcgctgttcgtcctgcacaggcacacgagggagcactcgtctaaggtggagtgggccaaaacggtcgacgagatcgtggagaaggggctgagggagagtagaggagggttggggctgtggactccgtaccctgcggacctcagctccgtggaactccctgctgtaagaagaacttcgccggcaggataaggctaggctgtcaaagaccacaaagctcccagcctagcctgccgatcctgtgatctttgattcgttcatggttgtacagagtagaactccactgtttgtttgttttttttggcgtagattctgtaggctgacgcttggagtttgttgcttccagttctgtacaacactcatctacggaggtagcacagaaggatttctcacaaaagaaaaatcatgactcgtcaggtctagtatagggatatcaaaacagcattagaagtcgtcacacacaaaacaaccatagcacctgaaaatgatcagcgccaacgcatcatgcacttccttaattttaatgaatcgtttgcctttcccctgatacaatcacatcacatcagcattctgtgacctaccaaatgttcctacaccagaatcacaggacgcgcgtttcctttacatttacgtctggcgcctgacgtgtggggccacaccatagccgcagctggccccacggccctacacgtgagtcagccagttgcagctatgttcacggacgtatatacagatgatcccgccgggaatcacaagggccaactcgaggtggaagtggaacacaagactcggtctgcacggc

SEQ ID NO: 53701 - DNA, 1985 bp, Zea Mays
cctacggcggccagtaacaggcatacagaaactcatccatgactaaagcaaactaacaagaactaccacaatgctagctaactagcagggaggcccgaaatgggggcggtgagcaaagacaactttgcaccagccatctctcaaagctctttgcaaaaaagacagtaaagttctctctgtgttggactcgatggggctctcatccaaaccactccaccgctgcccgatacctgttgcggatgatccaaatgttgttgtcataccaaagaggactcccaacacaattgtgaagaagttggcatatataactgttgacaaacaggataaagatccctcaccgctgtttggaggacgtcaaaactggaaacagagggaggagagctttaaactgaactctaccatgaaggttcactgcggatttatgaaaaatagtggtgcagatatggatatcattgatgtcaagtacatacagaaatgcaaattcgtggttgcctctggtattttcgatggttacgacatccctcaccagccatccaatatcagccgccggtctcagaagctgttctgcttcctgatggtggtggacgaagtatctcttgattttatccaaaagaacaccaccgtcaagatcgacagcgctggagggaaatgggttggcatatggcgacttctaacagtgcaccgcctcccattcgacgaacctagaaggaacgggaaaatacccaagatcttgacgcacagactattccctcaagcttggtatagcatttggattgacgggaaaatggagctcatagttgatccgctgcttattctcgagaggtacctctggcgtggaaaatacacattcgcggtggctgtccacaagcatcataggagcatctacgaggagggcgacgcgatcaagcgacggaagcgctacgcccgccctttggttgatcttcagatgaagatgtactattacgaggggatggagccttggagcccgaagaaaaagatgcctggcgatgtgccggagggagccgtgctgatccgggaacacacagcgacgaccaacctgttcagctgcctctggttcaacgaggtgaacctcttcaccccacgcgaccagatcagcttcggctacgtggcgcgcaggctcggcgacgctctcgagctcttcatgttccccaactgcgagtacaactcgctgttcgtcctgcacaggcacacgagggagcactcgtctaaggtggagtgggccaaaacggtcgacgagatcgtggagaaggggctgagggagagtagaggagggttggggctgtggactccgtaccctgcggacctcagctccgtggaactccctgctgtaagaagaacttcgccggcaggataaggctaggctgtcaaagaccacaaagctcccagcctagcctgccgatcctgtgatctttgattcgttcatggttgtacagagtagaactccactgtttgtttgttttttttggcgtagattctgtaggctgacgcttggagtttgttgcttccagttctgtacaacactcatctacggaggtagcacagaaggatttctcacaaaagaaaaatcatgactcgtcaggtctagtatagggatatcaaaacagcattagaagtcgtcacacacaaaacaaccatagcacctgaaaatgatcagcgccaacgcatcatgcacttccttaattttaatgaatcgtttgcctttcccctgatacaatcacatcacatcagcattctgtgacctaccaaatgttcctacaccagaatcacaggacgcgcgtttcctttacatttacgtctggcgcctgacgtgtggggccacaccatagccgcagctggccccacggccctacacgtgagtcagccagttgcagctatgttcacggacgtatatacagatgatcccgccgggaatcacaagggccaactcgaggtggaagtggaacacaagactcggtctgcacggc

SEQ ID NO: 53702 - DNA, 797 bp, Zea Mays
ctacgctacgcggcggcggttagcccgccgtaaccacccagccttggtgcaatctgacagcaccccggcctgattcgctcggacgcggctatggggctggtggtgagcgccgccacggggagcggctggaccacgggatcgggaatggagggcccgccgacggcgagcaaagctggtggggcgggcagaccggaggtgtcgacgctgccttggtccctcttcacgaaatcaccacggcggcgcatgcgggtggccttcacctgcaacgtgtgcgggcagcgtacgaccagggccatcaatcctcatgcctacactgatggaactgtgtttgttcagtgctgcggttgcaatgtgttccataagttggtcgacaacctgaacctgtttcatgagatgaagtgctacgtcggtccagacttccgctaccaaggggatgctccattcaactaccttgacccaaacgaggataacgacactaccttccctctctgaagcctaaagcctcctttatgttgccagtacaaaattggtcggtgtcgttctaatttgctcgtatagatgtacttaataagcaggtgtacgtaccttcatgaacctgtaagattgttcagatgtatataattctacttagtgcacacaggtagtggataataatggatagacgaggaagtttatgcattcggctttgtgctccaggagcctgtagtgtgtgaacatgatatgtatgaatgtattatatatctcaagtgtgtttatggagtatatttgtgtaaagtggatttctggagtagatttgt

SEQ ID NO: 53703 - DNA, 5749 bp, Zea Mays
cccctccacttccgttcgaaattaaggagggaaagaaaaagggcaaggccagcgagggccgccgccgagccctccgcccctcccggccccgttttcgctggcggcgatcgcggggccatggcgacctacatcaacgagctgcgcgccctcatcgcctccacctcgacctccactgcgtccgccgagggcgccgggccggcctccgcgcacctcgaggtcaaactccgcgaggtcctcccgaacctcctacgagactacgtcgtaccctcccccaaagccgccgggagggagctcagggaagtcagcgcaatcctgaagctgatcaccttcacggcgctcaagttccccggggtcttctacaacggtcgcgccgccgacgtcctcagcgtcatcgcccgcatcctcacgttcctcgccgagcccaatttcagaggatatccttccgcgaacctatgtaaaattgttgaaatcctagaagaacttgttgtaagaaacaatagcttgctaaagcaacatatacgtgaactaccactgttacctagtataccgtctttatcggaagtaaacaaggtaatacaggaagctagagggctaatgacactgcaagatcatctgaaggatgctgtcaatggtcttcatcatgaaagcttaaatgtgaggtacatggtagcttgtgagctgagtaagttattcaatgccagaagggaggatatgactgctcttatcattggtgaagatattgctgatttggatatgataagctctttagttatggctttactaaaaggatgtgcagagcaatcaaggactgttgttggccagagactgaaactagtttgtgcagattgtcttggcgcacttggtgctattgatcctgctaagttaaaggtaagttcttgtgagcgctttaagatagaatgttcagatgatgatctgatttttgagttgatccacaagcatcttgcaagggcattcagagctgctgttgacactacagtgcaagattctgctgccttggctatccaggagctattaaaattggcaggttgccagtcttcatctagtgaagaatcaaattgttgtgagatgagctacaggggccagaagttgtgggatcgtttctcaaactatgtcaaggaaattattgccccatgcttaacatcgaggtttcatcttcctaacacaactgattctgctaaagtcagcccaatataccgccccacaatgtcctttagaaggtggatatactactggattagaaagttgtcatcacatgcaactggatcccgttctagtatttttagtgcatgccgtggaattcttcggcatgacatgccaactgcaatctatctcttaccatacttggtcttaaatgttgtctgttatggtactccagaggctcgtcagagcattactgaggaaattctgtgtgttctcaatgctgctgcttgtgaagatagtggtggggctgctgttcatgaaattgtagtggggcagagtgaggtctgtattcaagccatcttcactttacttgataaccttggacaatgggttgatgacctcaaacaggaaattgctttattccagtctacttatgccatgtctggaaagcatggaggtaaattgaaagatggaacatattctgatcatgaacaggatcaaatgctggtgcagtgtagcaatgttgctgagttgctggctgctatacctaaagttactctagcaagggcctctcttagatgtcaagctcatgctcgtgctctaatgtactttgaatctcatgtccaggagaattccggttcctccaatccagctgctgagtatagtggcaccttttcagacaatgacatatcttttcttatggaaatatatggaggactggatgagcctgatggcctcctaggtttagcgaatctaaggaagtcatcaagcctacaggatcagcttatcattaatgagaaagctggaaactgggctgaagttttaaccttatgcgaacaggccttgcaaatggaacctacctctgttcatagacaatccgatgttcttaattgtttgctaaacatgtgccaccttcaaggcatgatcgcccatgtggatggtttggtttgcagtataccccaatacaagaaaacttggtgcatgcatggagtgcaagcggcgtggcgattagggagatgggatctcatggattcatatctgactgggacagacaagggtctggtgttcagcagttctgagaacaatgcttcttttgacatggatcttgctaagatattcaaggccatgatgatcaaagatcagtttctggtcgctgaaaaaattgcccagtccaagcaagcattgcttgtacctctggctgcggcaggcatggactcatatatgcgtgcatatccttatgttgttaagctgcatatgttgcgtgagttggaagacttcaattccctattgggagacacgtcgtttattgataagtcatttggttcagacgatccaaattttctgaagttaacaaaggattgggagaaccgtctgagatgcacacagccatcattgtggacgagggaacctttacttgctctgcgaagggtggtttttagtcagagtcatatgaatgttcaggttgggaactgctggcttcagtatgctaagctctgccgcttggctggtcacaatgagacagcccaccttgcaatactagaagcagatgcctcaggtgcccccaatgctcacatggagaaggcaaagtatctctggaacatacggaagtttgatagcgctatagctgaacttcagcaaacacttctcgacatgccagcagaagttttgggaaacaccgtcctttcatctctttgtagcctctctcttgctttgccaaatgcacctatctctgcaacacaaacatcgaaagagaatccagatgtatctaaaaccctgcttctttatactagatggatccacaatacagggcaaaaacagagtgcagatatcaaatctctatattctagagtaacagaattgcgaccgaagtgggaaaagggttttttctgcatggcaaagttttttgatgatttgcttgttgatgctagaaaaaggcaagaagataagttcgcttgtaaagtcggaccaatcccttctagctctgcaagcagggcaagtgacgaaaaagagaagccttggtgtgaatttcttccgagagtgctactatgttatggaaaagcacttcacaaaggacataagaatctttttcaagcactgcctcgtatgcttactctttggtttgaatttggaagcatatacgtccgagatggatcttcctccaatcaactcatgaaagagattaatgcaaatgttttaggcctcatacgtgggtgtttgaaggatctgccaacatatcagtggcttactgtgctgtctcagttgatctcccgcatctgtcaccaaaatgctgatgttgtcagaatggtcaaatgcatcatcacatctattttacgggaataccctcaacaagctctttggatgatggctgcagtgtctaattcaactgttctggcaagacgagatgctgctgcagaaatattgcagtcagcaaagaaaggatgccggcgtgggaatccaaacagtgcactctttagtcaatttacaaatcttataggccatcttattaagctctgctctcatccagggcaagcaagggcaaaaacaataaacatctcaactgaattcagttccttgaaaagaatgatgccactaggaattatcttacctgtccagcaagctttaactgtgactctgccatcatatgattcaaatatgtcggatcaatctggttttcaccccttctcagtctctgaacatcccactatagctggaatagctgatgaagcagaaattcttaactcccttcagaaaccaaagaaggttgttttcctcggaagtgatggggttgaacgtccatttctttgcaaacctaaggatgatcttaggaaagactcacgcatgatggagttcaatgcaatgatcaaccgtctcctctccaaggtccctgagagccgcaggagaaagctctatattagaacttttgcagtggtaccacttaccgaagattgtggaatggtagaatgggtgcccaatactcgtggtcttcggcatattcttcaggacatctacataactcttgggaagtttgatagggtgaaaacaaattcacagatcaagaagatatatgacacatgccatggcaaaatgcctgacgatgtgatgctgaagacgaaaatccttccaatgttccccccagttttccacaaatggttcttgatgagattctctgaaccagctgcatggtttcgtgctagagtggcatatgcacataccacagcagtgtggtcgatggttgggcacattgtggggcttggtgacaggcatggcgaaaatatcctttttgactcgacgaccggggattgtgtgcacgtggattttagctgcctttttgataggggcttgctgctggacaagcctgaggtggtgccgtttaggctgacacagaacatgatcgatggcttgggcatcacaggttatgaaggcgtatttctcaaggtctgtgaaatcactctatctgttctcaggacccacaaggagaccctcatgactgtccttgagaccttcatccatgatccactcgtggagtggaccaaagttaacaagtctagtggaggcgaagtccagaacccgcacgcacagagggccatcaccaacatcaacgcaaggctccagggagttgtggtgggtgttaaagccagcccttccctgcctctctccgtggaaggccaagcccggcggctgatcgctgaagcagtctccctcaacaacctcggcaaaatgtacatctggtggatgccatggttctaagttatacatatctaacagcagataacacacacatacgctgtgactgtgaaggaggaggaagtgagtcagtagcagcaagcaagggtccaaaaccatctttctgcacggcacagactttgaaaggctcaacccctcatgactcttgaggcacaggggattcagaggcaggtctgggtacgtaggacagaatagtctgcacacacagaaactcttgtccacaccccacccaccatcccaaactttggtgagtgagtgacatacatgaaccctcgcgcggaatgaggcccgtgattttgcttccccttctacagcccagggctaattctatatgttgtggtgctgtgttgggtcatgctgctgatgctagctgcagcaaggttctttttattgcccaaacacaaacagtacctgccggaaagatggaattcctgttgcatatataggggtggaggaaggatgaggaggatgatgaaaaccacgtgtccaagttccccccttctctgcctcctcattgtcatgccagctgaatgcaatgaaacggagtggattgatttctgtgacaaacattttctttagtcgctacgtactaggagcagtcgtgtatacactcttgcaactgctgctacatgttacgtgttcctgatcctacatatgtatatagcagaagcaataatgttctggttctaaactgcaaggagatggtatttgaacgtgaccagatctttattccgcttggaaaatacgcctagttgagagcatgattaggctgggaccagaccagatcagatcagatcaaatcaaaaacccggtctcagaagatcccgttggtgtgaggggcccc

SEQ ID NO: 53704 - DNA, 5768 bp, Zea Mays
ggaacatgtctcctccggtcctcccctccacttccgttcgaaattaaggagggaaagaaaaagggcaaggccagcgagggccgccgccgagccctccgcccctcccggccccgttttcgctggcggcgatcgcggggccatggcgacctacatcaacgagctgcgcgccctcatcgcctccacctcgacctccactgcgtccgccgagggcgccgggccggcctccgcgcacctcgaggtcaaactccgcgaggtcctcccgaacctcctacgagactacgtcgtaccctcccccaaagccgccgggagggagctcagggaagtcagcgcaatcctgaagctgatcaccttcacggcgctcaagttccccggggtcttctacaacggtcgcgccgccgacgtcctcagcgtcatcgcccgcatcctcacgttcctcgccgagcccaatttcagaggatatccttccgcgaacctatgtaaaattgttgaaatcctagaagaacttgttgtaagaaacaatagcttgctaaagcaacatatacgtgaactaccactgttacctagtataccgtctttatcggaagtaaacaaggtaatacaggaagctagagggctaatgacactgcaagatcatctgaaggatgctgtcaatggtcttcatcatgaaagcttaaatgtgaggtacatggtagcttgtgagctgagtaagttattcaatgccagaagggaggatatgactgctcttatcattggtgaagatattgctgatttggatatgataagctctttagttatggctttactaaaaggatgtgcagagcaatcaaggactgttgttggccagagactgaaactagtttgtgcagattgtcttggcgcacttggtgctattgatcctgctaagttaaaggtaagttcttgtgagcgctttaagatagaatgttcagatgatgatctgatttttgagttgatccacaagcatcttgcaagggcattcagagctgctgttgacactacagtgcaagattctgctgccttggctatccaggagctattaaaattggcaggttgccagtcttcatctagtgaagaatcaaattgttgtgagatgagctacaggggccagaagttgtgggatcgtttctcaaactatgtcaaggaaattattgccccatgcttaacatcgaggtttcatcttcctaacacaactgattctgctaaagtcagcccaatataccgccccacaatgtcctttagaaggtggatatactactggattagaaagttgtcatcacatgcaactggatcccgttctagtatttttagtgcatgccgtggaattcttcggcatgacatgccaactgcaatctatctcttaccatacttggtcttaaatgttgtctgttatggtactccagaggctcgtcagagcattactgaggaaattctgtgtgttctcaatgctgctgcttgtgaagatagtggtggggctgctgttcatgaaattgtagtggggcagagtgaggtctgtattcaagccatcttcactttacttgataaccttggacaatgggttgatgacctcaaacaggaaattgctttattccagtctacttatgccatgtctggaaagcatggaggtaaattgaaagatggaacatattctgatcatgaacaggatcaaatgctggtgcagtgtagcaatgttgctgagttgctggctgctatacctaaagttactctagcaagggcctctcttagatgtcaagctcatgctcgtgctctaatgtactttgaatctcatgtccaggagaattccggttcctccaatccagctgctgagtatagtggcaccttttcagacaatgacatatcttttcttatggaaatatatggaggactggatgagcctgatggcctcctaggtttagcgaatctaaggaagtcatcaagcctacaggatcagcttatcattaatgagaaagctggaaactgggctgaagttttaaccttatgcgaacaggccttgcaaatggaacctacctctgttcatagacaatccgatgttcttaattgtttgctaaacatgtgccaccttcaaggcatgatcgcccatgtggatggtttggtttgcagtataccccaatacaagaaaacttggtgcatgcatggagtgcaagcggcgtggcgattagggagatgggatctcatggattcatatctgactgggacagacaagggtctggtgttcagcagttctgagaacaatgcttcttttgacatggatcttgctaagatattcaaggccatgatgatcaaagatcagtttctggtcgctgaaaaaattgcccagtccaagcaagcattgcttgtacctctggctgcggcaggcatggactcatatatgcgtgcatatccttatgttgttaagctgcatatgttgcgtgagttggaagacttcaattccctattgggagacacgtcgtttattgataagtcatttggttcagacgatccaaattttctgaagttaacaaaggattgggagaaccgtctgagatgcacacagccatcattgtggacgagggaacctttacttgctctgcgaagggtggtttttagtcagagtcatatgaatgttcaggttgggaactgctggcttcagtatgctaagctctgccgcttggctggtcacaatgagacagcccaccttgcaatactagaagcagatgcctcaggtgcccccaatgctcacatggagaaggcaaagtatctctggaacatacggaagtttgatagcgctatagctgaacttcagcaaacacttctcgacatgccagcagaagttttgggaaacaccgtcctttcatctctttgtagcctctctcttgctttgccaaatgcacctatctctgcaacacaaacatcgaaagagaatccagatgtatctaaaaccctgcttctttatactagatggatccacaatacagggcaaaaacagagtgcagatatcaaatctctatattctagagtaacagaattgcgaccgaagtgggaaaagggttttttctgcatggcaaagttttttgatgatttgcttgttgatgctagaaaaaggcaagaagataagttcgcttgtaaagtcggaccaatcccttctagctctgcaagcagggcaagtgacgaaaaagagaagccttggtgtgaatttcttccgagagtgctactatgttatggaaaagcacttcacaaaggacataagaatctttttcaagcactgcctcgtatgcttactctttggtttgaatttggaagcatatacgtccgagatggatcttcctccaatcaactcatgaaagagattaatgcaaatgttttaggcctcatacgtgggtgtttgaaggatctgccaacatatcagtggcttactgtgctgtctcagttgatctcccgcatctgtcaccaaaatgctgatgttgtcagaatggtcaaatgcatcatcacatctattttacgggaataccctcaacaagctctttggatgatggctgcagtgtctaattcaactgttctggcaagacgagatgctgctgcagaaatattgcagtcagcaaagaaaggatgccggcgtgggaatccaaacagtgcactctttagtcaatttacaaatcttataggccatcttattaagctctgctctcatccagggcaagcaagggcaaaaacaataaacatctcaactgaattcagttccttgaaaagaatgatgccactaggaattatcttacctgtccagcaagctttaactgtgactctgccatcatatgattcaaatatgtcggatcaatctggttttcaccccttctcagtctctgaacatcccactatagctggaatagctgatgaagcagaaattcttaactcccttcagaaaccaaagaaggttgttttcctcggaagtgatggggttgaacgtccatttctttgcaaacctaaggatgatcttaggaaagactcacgcatgatggagttcaatgcaatgatcaaccgtctcctctccaaggtccctgagagccgcaggagaaagctctatattagaacttttgcagtggtaccacttaccgaagattgtggaatggtagaatgggtgcccaatactcgtggtcttcggcatattcttcaggacatctacataactcttgggaagtttgatagggtgaaaacaaattcacagatcaagaagatatatgacacatgccatggcaaaatgcctgacgatgtgatgctgaagacgaaaatccttccaatgttccccccagttttccacaaatggttcttgatgagattctctgaaccagctgcatggtttcgtgctagagtggcatatgcacataccacagcagtgtggtcgatggttgggcacattgtggggcttggtgacaggcatggcgaaaatatcctttttgactcgacgaccggggattgtgtgcacgtggattttagctgcctttttgataggggcttgctgctggacaagcctgaggtggtgccgtttaggctgacacagaacatgatcgatggcttgggcatcacaggttatgaaggcgtatttctcaaggtctgtgaaatcactctatctgttctcaggacccacaaggagaccctcatgactgtccttgagaccttcatccatgatccactcgtggagtggaccaaagttaacaagtctagtggaggcgaagtccagaacccgcacgcacagagggccatcaccaacatcaacgcaaggctccagggagttgtggtgggtgttaaagccagcccttccctgcctctctccgtggaaggccaagcccggcggctgatcgctgaagcagtctccctcaacaacctcggcaaaatgtacatctggtggatgccatggttctaagttatacatatctaacagataacacacacatacgctgtgactgtgaaggaggaggaagtgagtcagtagcagcaagcaagggtccaaaaccatctttctgcacggcacagactttgaaaggctcaacccctcatgactcttgaggcacaggggattcagaggcaggtctgggtacgtaggacagaatagtctgcacacacagaaactcttgtccacaccccacccaccatcccaaactttggtgagtgagtgacatacatgaaccctcgcgcggaatgaggcccgtgattttgcttccccttctacagcccagggctaattctatatgttgtggtgctgtgttgggtcatgctgctgatgctagctgcagcaaggttctttttattgcccaaacacaaacagtacctgccggaaagatggaattcctgttgcatatataggggtggaggaaggatgaggaggatgatgaaaaccacgtgtccaagttccccccttctctgcctcctcattgtcatgccagctgaatgcaatgaaacggagtggattgatttctgtgacaaacattttctttagtcgctacgtactaggagcagtcgtgtatacactcttgcaactgctgctacatgttacgtgttcctgatcctacatatgtatatagcagaagcaataatgttctggttctaaactgcaaggagatggtatttgaacgtgaccagatctttattccgcttggaaaatacgcctagttgagagcatgattaggctgggaccagaccagatcagatcagatcaaatcaaaaacccggtctcagaagatcccgttggtgtgaggggcccc

SEQ ID NO: 53705 - DNA, 2223 bp, Zea Mays
  misc_feature (2222)..(2223): n is a, c, g, or t
atggtcgcgattgttggatttggtgatagatggcggctacggttgagccatgagattatattccaggcagtttggaatcttctctccattctccgcacaggtgatcgtgaagcctacagacaattctttctagatgctatggttgcggtagaagacgtgctatatgtggcatcattgcatgacagaagtcttagtggtgtgtctcctggaagatgtttagttaaatgcctatgtggatccttggacatattagacacacctgggccttttagtgagctcccagccagttgccgacctaagaatggacctggcgtgctggttgatctgacaggcgatgcaagatggcgcccatttgccacttcgttgattaagctagttaacaaatgtcttacagacgggaccttgtatgtcgatgggctcgttaccatgccatttgtttctgctgcttgttctatcctctgctatggtgatggttctctgcacaaggtttgttttgatttcgcacgtattgttgccacggtaatgactcctgagattcttcctctagaaagcatcattcgttcaatcacatgcattttgagccaagaaattagcgaactctctgatatcagagatgcagattatgacttttcaatgggagcgtgcctttgtgcactgcattcttcatgtcctgactatattgttgaatctacagctgctgatattgttaatgttctcaaaagagcagtaaagaccagcaaaagtgcagaacttcaggttgcactgtacactgcatacaagagaataattgaactctgctctgtacaagtatggaaaccagaaatccttctgaagttgctcagcttgccaaaaccttgcagcaaactgatccaatgtattcgagcagttattggcaaatttggtcaaacctttttcactctggatgatggtaacagtcaaagcagtcctcaggcaagatctgaaaaaaatgagttgcaaaaagctggccataaaagaataccacagaacgaggaaagcaattctgccaaacgtcagaagataactgaatcaggattttctgctgccactggatttgaaaaagaagattatggctatgcttttctacagtctttaaattcactgattaattgcctgtcaccagacaatcatgagtcttatccattagaccctgatgttgctatagaaacagtccagagaaacctgtattcctttgatgcatcactgtattttgaagctcttcatactgtaatgcttctccaattcaatcttcctggacacacgaaactgcttgaagatgactatcagttgattggcgatggtacacattttgttaatccaatatatgctgacctcatcagcatgttgaaactgatatgggatgttggtcatgatgtcactgaaacaagttcaaactacaagatagagtatcttttgatgcaagtctttgctaagcttggcaatagactgaattctggatgtgatcttgaattctttgatttggctatctgtaatggaactgctgagattaaaaatgaagcaattatatcactacccataattgtgctgtattctggtcctaggattcttggagcgatgtttaagaaacttgagtcagtggatgctttaggactcgagaacgtggggaaacatattgccttttcacttggttttctatcttgcttaaatggaaccacttattacactgacaatgtggggaaggggaaccattgcaagctattcttggacaagcactatgaacaacctgtgtcaacattagatcttctcttgagaggtttctgttgtcctcaatgtgatatcaggaatagaactatccacaatgaagaacaaatttctatagtgaacattgcaccattacaagttgagaatgcggacttcaatattaacatctccaaggcccacactctccttttcaaatttctctacgcagggacttctgaggaatttatagtttctttggttgaagcgtcttctacttgagatgagaactcaatggaatcagtgttttgaatttctactgtgtcatgaaatgaaagctgtcagggaagcattttctggtgtagtctactgcttcttggaagacagtgttatggatattttgttttctggtggactgggaatgaatggagggtctaaagaacttcaattcatggataagataaaatgtgctttcactgaagctgaagatcctcagattcttttgnn

SEQ ID NO: 53706 - DNA, 2225 bp, Zea Mays
  misc_feature (2224)..(2225): n is a, c, g, or t
atggtcgcgattgttggatttggtgatagatggcggctacggttgagccatgagattatattccaggcagtttggaatcttctctccattctccgcacaggtgatcgtgaagcctacagacaattctttctagatgctatggttgcggtagaagacacacctgggccttttagtgagctcccagccagttgccgacctaagaatggacctggcgtgctggttgatctgacaggcgatgcaagatggcgcccatttgccacttcgttgattaagctagttaacaaatgtcttacagacgggaccttgtatgtcgatgggctcgttaccatgccatttgtttctgctgcttgttctatcctctgctatggtgatggttctctgcacaaggtttgttttgatttcgcacgtattgttgccacggtaatgactcctgagattcttcctctagaaagcatcattcgttcaatcacatgcattttgagccaagaaattagcgaactctctgatatcagagatgcagattatgacttttcaatgggagcgtgcctttgtgcactgcattcttcatgtcctgactatattgttgaatctacagctgctgatattgttaatgttctcaaaagagcagtaaagaccagcaaaagtgcagaacttcaggttgcactgtacactgcatacaagagaataattgaactctgctctgtacaagtatggaaaccagaaatccttctgaagttgctcagcttgccaaaaccttgcagcaaactgatccaatgtattcgagcagttattggcaaatttggtcaaacctttttcactctggatgatggtaacagtcaaagcagtcctcaggcaagatctgaaaaaaatgagttgcaaaaagctggccataaaagaataccacagaacgaggaaagcaattctgccaaacgtcagaagataactgaatcaggattttctgctgccactggatttgaaaaagaagattatggctatgcttttctacagtctttaaattcactgattaattgcctgtcaccagacaatcatgagtcttatccattagaccctgatgttgctatagaagtgattagtctgctgtgtatttcattatgtgtttatccgaagacaagtttgtttaccagagtttctaagcaagttctttcctggatttcttggattcataaacagtccagagaaacctgtattcctttgatgcatcactgtattttgaagctcttcatactgtaatgcttctccaattcaatcttcctggacacacgaaactgcttgaagatgactatcagttgattggcgatggtacacattttgttaatccaatatatgctgacctcatcagcatgttgaaactgatatgggatgttggtcatgatgtcactgaaacaagttcaaactacaagatagagtatcttttgatgcaagtctttgctaagcttggcaatagactgaattctggatgtgatcttgaattctttgatttggctatctgtaatggaactgctgagattaaaaatgaagcaattatatcactacccataattgtgctgtattctggtcctaggattcttggagcgatgtttaagaaacttgagtcagtggatgctttaggactcgagaacgtggggaaacatattgccttttcacttggttttctatcttgcttaaatggaaccacttattacactgacaatgtggggaaggggaaccattgcaagctattcttggacaagcactatgaacaacctgtgtcaacattagatcttctcttgagaggtttctgttgtcctcaatgtgatatcaggaatagaactatccacaatgaagaacaaatttctatagtgaacattgcaccattacaagttgagaatgcggacttcaatattaacatctccaaggcccacactctccttttcaaatttctctacgcagggacttctgaggaatttatagtttctttggttgaagcgtcttctacttgagatgagaactcaatggaatcagtgttttgaatttctactgtgtcatgaaatgaaagctgtcagggaagcattttctggtgtagtctactgcttcttggaagacagtgttatggatattttgttttctggtggactgggaatgaatggagggtctaaagaacttcaattcatggataagataaaatgtgctttcactgaagctgaagatcctcagattcttttgnn

SEQ ID NO: 53707 - DNA, 2258 bp, Zea Mays
  misc_feature (2257)..(2258): n is a, c, g, or t
atggtcgcgattgttggatttggtgatagatggcggctacggttgagccatgagattatattccaggcagtttggaatcttctctccattctccgcacaggtgatcgtgaagcctacagacaattctttctagatgctatggttgcggtagaagcagacgtgctatatgtggcatcattgcatgacagaagtcttagtggtgtgtctcctggaagatgtttagttaaatgcctatgtggatccttggacatattagacacacctgggccttttagtgagctcccagccagttgccgacctaagaatggacctggcgtgctggttgatctgacaggcgatgcaagatggcgcccatttgccacttcgttgattaagctagttaacaaatgtcttacagacgggaccttgtatgtcgatgggctcgttaccatgccatttgtttctgctgcttgttctatcctctgctatggtgatggttctctgcacaaggtttgttttgatttcgcacgtattgttgccacggtaatgactcctgagattcttcctctagaaagcatcattcgttcaatcacatgcattttgagccaagaaattagcgaactctctgatatcagagatgcagattatgacttttcaatgggagcgtgcctttgtgcactgcattcttcatgtcctgactatattgttgaatctacagctgctgatattgttaatgttctcaaaagagcagtaaagaccagcaaaagtgcagaacttcaggttgcactgtacactgcatacaagagaataattgaactctgctctgtacaagtatggaaaccagaaatccttctgaagttgctcagcttgccaaaaccttgcagcaaactgatccaatgtattcgagcagttattggcaaatttggtcaaacctttttcactctggatgatggtaacagtcaaagcagtcctcaggcaagatctgaaaaaaatgagttgcaaaaagctggccataaaagaataccacagaacgaggaaagcaattctgccaaacgtcagaagataactgaatcaggattttctgctgccactggatttgaaaaagaagattatggctatgcttttctacagtctttaaattcactgattaattgcctgtcaccagacaatcatgagtcttatccattagaccctgatgttgctatagaaacagtccagagaaacctgtattcctttgatgcatcactgtattttgaagctcttcatactgtaatgcttctccaattcaatcttcctggacacacgaaactgcttgaagatgactatcagttgattggcgatggtacacattttgttaatccaatatatgctgacctcatcagcatgttgaaactgatatgggatgttggtcatgatgtcactgaaacaagttcaaactacaagatagagtatcttttgatgcaagtctttgctaagcttggcaatagactgaattctggatgtgatcttgaattctttgatttggctatctgtaatggaactgctgagattaaaaatgaagcaattatatcactacccataattgtgctgtattctggtcctaggattcttggagcgatgtttaagaaacttgagtcagtggatgctttaggactcgagaacgtggggaaacatattgccttttcacttggttttctatcttgcttaaatggaaccacttattacactgacaatgtggggaaggggaaccattgcaagctattcttggacaagcactatgaacaacctgtgtcaacattagatcttctcttgagaggtttctgttgtcctcaatgtgatatcaggaatagaactatccacaatgaagaacaaatttctatagtgaacattgcaccattacaagttgagaatgcggacttcaatattaacatctccaaggcccacactctccttttcaaatttctctacgcagggacttctgaggaatttatagtttctttggttgaagtattgccacggctattgaggcattctaacaggcgtcttctacttgagatgagaactcaatggaatcagtgttttgaatttctactgtgtcatgaaatgaaagctgtcagggaagcattttctggtgtagtctactgcttcttggaagacagtgttatggatattttgttttctggtggactgggaatgaatggagggtctaaagaacttcaattcatggataagataaaatgtgctttcactgaagctgaagatcctcagattcttttgnn

SEQ ID NO: 53708 - DNA, 1382 bp, Zea Mays
gttgttgttgcgttgccccgacccagacccccgagcagtttctcacccacaccacaccacaccacacacgtccacaccgcgcgcgcgttatccattatccgtctcgtcgtcgcccgtatctatccgatccgcctgctccgtcactgacagacatcctgctctagctagctttggtccccaaatgccgcaaggataggacatgacacagcaagctggaagatcaccagtcgcaacagtattagttaacaacgagggaaaggagaaactgatgtgattagcaagcacgggcacggtaaagcagagagcctcttgctgttagtgaactaaggcgacggagaccgcgagggcggcgaactaggctgggcagcgatgatggcgacctcggccagcggcgtctccctcctcctcctcctcgcccatccggcgccgcgctagctcctcatcctgctcgcttcgcggccaagaggaggacgctccggttggttaacgtcagcgtcagctgcagcgccgaggcgctgcgctccgacggcgctggcgcggagccggcggtgccgcggtctgtgccggtgcgcgtcgcctacgagctgcaacaggccggccaccgctacctcgacgtcagaacggagggcgagtttagcgccggccaccctgaaggagctgtgaacatcccatacatgaacaaaaccggctcaggaatgacgaaaaacgctcactttctcgagcaagtgtcgagggctttcgggaaggacgacgagatcatcgtgggctgccaaagcggcaagaggtctctcatggcggcgaccgagctctgctccgcttcaatccaatcactgctaccgtgttttcagggcttcaccgctgtcaccgacatcgccggcggattctcgacctggagggagaacgagctgcctaccgtccagtgacggtgatttcagcctgcctcgccggcgtcgtaagtgtggttggagcttgcccagcgttttctgtccaagcctgtacatatgtcttcctgccttctgctatagttctggaataaagagtgctggggaatggaatggagcatgttgtaaagtaaagcacaacgagtaggcttctttcttttttacgtcatgcttcatctcatgcataggacattcttatctgctcggtactccctgcatgcggatttgttcatagtatgggtttcctcgtcgaactctgaaactagacaccttacccctctgaactctcaagaccactcagacgagtcagatcaccttctgtcttggtttggaatgattttatccttttttatagccaaaatcattaaatacatgagcagtccccatttctattactatcataacagaaatacaaagcagtttggatagttcccacatata

SEQ ID NO: 53709 - DNA, 2741 bp, Zea Mays
agtaatcattttaccaagtctagcggatctcagatttcaactgaagttgtttaaattttggtggtcaagagcaaattcgccactgcagctactgtgcaagaagataaaactatggcaactgccaaaggcgatgtcgaccatctccccatatacgacctggaccccaagctggagatattcaaggaccatttcaggtaccggatgaaaagattcctagagcagaaaggatcaattgaagaaaatgagggaagtcttgaatctttttctaaaggctatttgaaatttgggattaatacaaatgaggatggaactgtatatcgtgaatgggcacctgctgcgcaggaggcagagcttattggtgacttcaatgactggaatggtgcaaaccataagatggagaaggataaatttggtgtttggtcgatcaaaattgaccatgtcaaagggaaacctgccatccctcacaattccaaggttaaatttcgctttctacatggtggagtatgggttgatcgtattccagcattgattcgttatgcgactgttgatgcctctaaatttggagctccctatgatggtgttcattgggatcctcctgcttctgaaaggtacacatttaagcatcctcggccttcaaagcctgctgctccacgtatctatgaagcccatgtaggtatgagtggtgaaaagccagcagtaagcacatatagggaatttgcagacaatgtgttgccacgcatacgagcaaataactacaacacagttcagttgatggcagttatggagcattcgtactatgcttctttcgggtaccatgtgacaaatttctttgcggttagcagcagatcaggcacaccagaggacctcaaatatcttgttgataaggcacacagtttgggtttgcgagttctgatggatgttgtccatagccatgcaagtaataatgtcacagatggtttaaatggctatgatgttggacaaagcacccaagagtcctattttcatgcgggagatagaggttatcataaactttgggatagtcggctgttcaactatgctaactgggaggtattaaggtttcttctttctaacctgagatattggttggatgaattcatgtttgatggcttccgatttgatggagttacatcaatgctgtatcatcaccatggtatcaatgtggggtttactggaaactaccaggaatatttcagtttggacacagctgtggatgcagttgtttacatgatgcttgcaaaccatttaatgcacaaactcttgccagaagcaactgttgttgctgaagatgtttcaggcatgccggtcctttgccggccagttgatgaaggtggggttgggtttgactatcgcctggcaatggctatccctgatagatggattgactacctgaagaataaagatgactctgagtggtcgatgggtgaaatagcgcatactttgactaacaggagatatactgaaaaatgcatcgcatatgctgagagccatgatcagtctattgttggcgacaaaactattgcatttctcctgatggacaaggaaatgtacactggcatgtcagacttgcagcctgcttcacctacaattgatcgagggattgcactccaaaagatgattcacttcatcacaatggcccttggaggtgatggctacttgaattttatgggaaatgagtttggtcacccagaatggattgactttccaagagaagggaacaactggagctatgataaatgcagacgacagtggagccttgtggacactgatcacttgcggtacaagtacatgaatgcgtttgaccaagcgatgaatgcgctcgatgagagattttccttcctttcgtcgtcaaagcagatcgtcagcgacatgaacgatgaggaaaaggttattgtctttgaacgtggagatttagtttttgttttcaatttccatcccaagaaaacttacgagggctacaaagtgggatgcgatttgcctgggaaatacagagtagccctggactctgatgctctggtcttcggtggacatggaagagttggccacgacgtggatcacttcacgtcgcctgaaggggtgccaggggtgcccgaaacgaacttcaacaaccggccgaactcgttcaaagtcctttctccgccccgcacctgtgtggcttattaccgtgtagacgaagcaggggctggacgacgtcttcacgcgaaagcagagacaggaaagacgtctccagcagagagcatcgacgtcaaagcttccagagctagtagcaaagaagacaaggaggcaacggctggtggcaagaagggatggaagtttgcgcggcagccatccgatcaagataccaaatgaagccaggagtccttggtgaggactggactggctgccggcgccctgttagtagtcctgctctactggactagccgccgctggcgcccttggaacggtcctttcctgtagcttgcaggcgactggtgtctcatcaccgagcaggcaggcactgcttgtatagcttttctagaataataatcagggatggatggatggtgtgtattggctatctggctagacgtgcatgtgcccagtttgtatgtacaggagcagttcccgtccagaataaaaaaaaacttgttggggggtttttcttctactctgtagtctgttcttgctagaacaaagtagataattgtctaaatatttctagcaaagtaacaataaaaaaaaga

SEQ ID NO: 53710 - DNA, 3185 bp, Zea Mays
aacaacataaaataaaaaaaggcaaaccgggaagcgtgcaagcccaaaggccaatcggcccagaaccagctccacggttgttcgtgtccgcccacgtggcacgcccggccattccgggcccacagatccggctcagggtcatgtgccactgccatggccccctccttgtcgcagcggcagattgcgacggggaagaaaggtgaggagaccaagcgaaaaaaatcacgctttcattgcgaggggggaggatagggaggaagacgccaagccagctccagtccggcacccgatataaagcggcaggcacttggattgctgacgagatgggactcacacgccgtcacaatgctgtgcctcgtgtcgccctcttcctcgccgactccgcttccgccgccgcggcgctctcgctcgcatgctgatcgggcggcaccgccggggatcgcgggtggcggcaatgtgcgcctgagtgtgttgtctgtccagtgcaaggctcgccggtcaggggtgcggaagagcaaattcgccactgcagctactgtgcaagaagataaaactatggcaactgccaaaggcgatgtcgaccatctccccatatacgacctggaccccaagctggagatattcaaggaccatttcaggtaccggatgaaaagattcctagagcagaaaggatcaattgaagaaaatgagggaagtcttgaatctttttctaaaggctatttgaaatttgggattaatacaaatgaggatggaactgtatatcgtgaatgggcacctgctgcgcaggaggcagagcttattggtgacttcaatgactggaatggtgcaaaccataagatggagaaggataaatttggtgtttggtcgatcaaaattgaccatgtcaaagggaaacctgccatccctcacaattccaaggttaaatttcgctttctacatggtggagtatgggttgatcgtattccagcattgattcgttatgcgactgttgatgcctctaaatttggagctccctatgatggtgttcattgggatcctcctgcttctgaaaggtacacatttaagcatcctcggccttcaaagcctgctgctccacgtatctatgaagcccatgtaggtatgagtggtgaaaagccagcagtaagcacatatagggaatttgcagacaatgtgttgccacgcatacgagcaaataactacaacacagttcagttgatggcagttatggagcattcgtactatgcttctttcgggtaccatgtgacaaatttctttgcggttagcagcagatcaggcacaccagaggacctcaaatatcttgttgataaggcacacagtttgggtttgcgagttctgatggatgttgtccatagccatgcaagtaataatgtcacagatggtttaaatggctatgatgttggacaaagcacccaagagtcctattttcatgcgggagatagaggttatcataaactttgggatagtcggctgttcaactatgctaactgggaggtattaaggtttcttctttctaacctgagatattggttggatgaattcatgtttgatggcttccgatttgatggagttacatcaatgctgtatcatcaccatggtatcaatgtggggtttactggaaactaccaggaatatttcagtttggacacagctgtggatgcagttgtttacatgatgcttgcaaaccatttaatgcacaaactcttgccagaagcaactgttgttgctgaagatgtttcaggcatgccggtcctttgccggccagttgatgaaggtggggttgggtttgactatcgcctggcaatggctatccctgatagatggattgactacctgaagaataaagatgactctgagtggtcgatgggtgaaatagcgcatactttgactaacaggagatatactgaaaaatgcatcgcatatgctgagagccatgatcagtctattgttggcgacaaaactattgcatttctcctgatggacaaggaaatgtacactggcatgtcagacttgcagcctgcttcacctacaattgatcgagggattgcactccaaaagatgattcacttcatcacaatggcccttggaggtgatggctacttgaattttatgggaaatgagtttggtcacccagaatggattgactttccaagagaagggaacaactggagctatgataaatgcagacgacagtggagccttgtggacactgatcacttgcggtacaagtacatgaatgcgtttgaccaagcgatgaatgcgctcgatgagagattttccttcctttcgtcgtcaaagcagatcgtcagcgacatgaacgatgaggaaaaggttattgtctttgaacgtggagatttagtttttgttttcaatttccatcccaagaaaacttacgagggctacaaagtgggatgcgatttgcctgggaaatacagagtagccctggactctgatgctctggtcttcggtggacatggaagagttggccacgacgtggatcacttcacgtcgcctgaaggggtgccaggggtgcccgaaacgaacttcaacaaccggccgaactcgttcaaagtcctttctccgccccgcacctgtgtggcttattaccgtgtagacgaagcaggggctggacgacgtcttcacgcgaaagcagagacaggaaagacgtctccagcagagagcatcgacgtcaaagcttccagagctagtagcaaagaagacaaggaggcaacggctggtggcaagaagggatggaagtttgcgcggcagccatccgatcaagataccaaatgaagccaggagtccttggtgaggactggactggctgccggcgccctgttagtagtcctgctctactggactagccgccgctggcgcccttggaacggtcctttcctgtagcttgcaggcgactggtgtctcatcaccgagcaggcaggcactgcttgtatagcttttctagaataataatcagggatggatggatggtgtgtattggctatctggctagacgtgcatgtgcccagtttgtatgtacaggagcagttcccgtccagaataaaaaaaaacttgttggggggtttttcttctactctgtagtctgttcttgctagaacaaagtagataattgtctaaatatttctagcaaagtaacaataaaaaaaaga

SEQ ID NO: 53711 - DNA, 2255 bp, Zea Mays
gtagcccccttcaatatctgttcccagtatcccccttcaaatctttgatgggggttgtgaatcatgatcctctaataaccataccctggaaggctggaacaaatttcgttccaaaagggacataatcagagaaggccagttaagggggcagtgagaagggatggcgatggagttggccaagcaattgctcgtcgctgttctcagaagctatgcaccacctctctgggctacaatcattgccagtgtttttgttatcatctccgtctcactgtccctgtacttgctactcaatcatctgtcagcctacaaaaacccagaggaacagaagtttcttgtcggcgtcatcctcatggtgccatgctatgcagtcgagtcgtatatatcattggtatatccgtcaataagtgtggacatcgaaattatgcgagatggttatgaggcatttgctatgtactgttttgggcgctatctagttgcttgcttaggtggtgaagataggacaattgaatttttgaaaagggaaggtggttcaggttctgctgtaccactcttaggccaagcatctgaacaacgatatgtaaaccatccatttccaatgaactacatgcttaaaccatggccgctaggcgaatggttttacttggtcatcaaatttgggctagttcaatatatgataataaaatcaatatgtgctattcttgcggtgattcttgaatcctttggagtgtactgtgaaggagagtttaagttgaactgtgggtactcttacacggctgtggttctcaatttcagtcagtcatgggccttatactgtctcgttcagttctatgctgtgataaaggatgagttagctcatataaagcctcttgcaaagtttctgacattcaagtctattgtgttcttaacatggtggcaaggtatagcaattgcactgctcttcaactggggttcgttgagaggccctattgctcaagaattgcagttcaagtcaagtatccaagactttattatctgcatagagttcttggagattatgcttctgtcgactgccctctagaccccgatgaagtcaaggatagtgagcgcccaaccaagtttaggctcccccagccagatgatcatgttaggtgttccactgccataaaagaaagcgtccgtgatgtcgtacttgggggcggtgaatacattgtgaatgacttgaagtttaccgtgaaccatgctgtggaacccatcaatgaaaagctgcacatgatatccgagaacatcaaaaagcgtgagaagggaaagaggaaaacgaatgatgatagctgcatcagttcaccaacatccttgaccagggtcatcagtgggattgatgatccgctcctgaacggaagcttgagtgacaacagcggtccaaagaaagcacggaggcagcgcaggaaatcaggctatgcaagcgcagagagcggtggggagagcagcgaccatggcctaggcgggtttgagatccgagggaacagatggattactagggagtgacagctaggagcaatctgtggagatactatgtaaatgtcacaggagttggcctgtggtgatgtgcgataaccgggccagtgggttctgagcgtaagacgaggtctctagcaatgatatgttgtagcgtgactaaatcgagatgagcaatcaggttgttgtctgttgattctttcggctgaccatttcggctgctgaggccttgatcctgtatttgagatgtcaggcctacttagagcaaatgctggaaggaagcaatgtgcctgttctgaggtccctccagcatcacttgtaatttgtaaagtactcaagtacagactagaactagtcatgcataccagaagaatagatagatgtttcagaagttgaggcctgagatgccgtgccactctatttgctctgtttcatgctttgccgttattatatcactattttcactgttcattctaaggccgttgtcacacgggtaccagaagagcagaacacctttttacgttccttttgctgctatggatggacttcgagagttccttgagaaagcactctcatctatctttccaattccttgtttccttgtggatcctgatcactgaagatggccatttgatttttcacttttcagttatatataaagtgaagacggttgtctcacgcaatatgtgaagtgcaagatgagctctacactgcaaggaaccccaagaaaaaaccacaggtaagtttgtctgattgacaacggc

SEQ ID NO: 53712 - DNA, 1999 bp, Zea Mays
gtagcccccttcaatatctgttcccagtatcccccttcaaatctttgatgggggttgtgaatcatgatcctctaataaccataccctggaaggctggaacaaatttcgttccaaaagggacataatcagagaaggccagttaagggggcagtgagaagggatggcgatggagttggccaagcaattgctcgtcgctgttctcagaagctatgcaccacctctctgggctacaatcattgccagtgtttttgttatcatctccgtctcactgtccctgtacttgctactcaatcatctgtcagcctacaaaaacccagaggaacagaagtttcttgtcggcgtcatcctcatggtgccatgctatgcagtcgagtcggtaagtatatatcattggtatatccgtcaataagtgtggacatcgaaattatgcgagatggttatgaggcatttgctatgtactgttttgggcgctatctagttgcttgcttaggtggtgaagataggacaattgaatttttgaaaagggaaggtggttcaggttctgctgtaccactcttaggccaagcatctgaacaacgatatgtaaaccatccatttccaatgaactacatgcttaaaccatggccgctaggcgaatggttttacttggtcatcaaatttgggctagttcaatatatgataataaaatcaatatgtgctattcttgcggtgattcttgaatcctttggagtgtactgtgaaggagagtttaagttgaactgtgggtactcttacacggctgtggttctcaatttcagtcagtcatgggccttatactgtctcgttcagttctatgctgtgataaaggatgagttagctcatataaagcctcttgcaaagtttctgacattcaagtctattgtgttcttaacatggtggcaaggtatagcaattgcactgctcttcaactggggttcgttgagaggccctattgctcaagaattgcagttcaagtcaagtatccaagactttattatctgcatagagatgggtgttgctgccgttgcccacctgtatgtcttccctgcgaagccatacgagctaattggtgattgttttgttggagatgtttcagttcttggagattatgcttctgtcgactgccctctagaccccgatgaagtcaaggatagtgagcgcccaaccaagtttaggctcccccagccagatgatcatgttaggtgttccactgccataaaagaaagcgtccgtgatgtcgtacttgggggcggtgaatacattgtgaatgacttgaagtttaccgtgaaccatgctgtggaacccatcaatgaaaagctgcacatgatatccgagaacatcaaaaagcgtgagaagggaaagaggaaaacgaatgatgatagctgcatcagttcaccaacatccttgaccagggtcatcagtgggattgatgatccgctcctgaacggaagcttgagtgacaacagcggtccaaagaaagcacggaggcagcgcaggaaatcaggctatgcaagcgcagagagcggtggggagagcagcgaccatggcctaggcgggtttgagatccgagggaacagatggattactagggagtgacagctaggagcaatctgtggagatactatgtaaatgtcacaggagttggcctgtggtgatgtgcgataaccgggccagtgggttctgagcgtaagacgaggtctctagcaatgatatgttgtagcgtgactaaatcgagatgagcaatcaggttgttgtctgttgattctttcggctgaccatttcggctgctgaggccttgatcctgtatttgagatgtcaggcctacttagagcaaatgctggaaggaagcaatgtgcctgttctgagttatatataaagtgaagacggttgtctcacgcaatatgtgaagtgcaagatgagctctacactgcaaggaaccccaagaaaaaaccacaggtaagtttgtctgattgacaacggc

SEQ ID NO: 53713 - DNA, 1994 bp, Zea Mays
gtagcccccttcaatatctgttcccagtatcccccttcaaatctttgatgggggttgtgaatcatgatcctctaataaccataccctggaaggctggaacaaatttcgttccaaaagggacataatcagagaaggccagttaagggggcagtgagaagggatggcgatggagttggccaagcaattgctcgtcgctgttctcagaagctatgcaccacctctctgggctacaatcattgccagtgtttttgttatcatctccgtctcactgtccctgtacttgctactcaatcatctgtcagcctacaaaaacccagaggaacagaagtttcttgtcggcgtcatcctcatggtgccatgctatgcagtcgagtcgtatatatcattggtatatccgtcaataagtgtggacatcgaaattatgcgagatggttatgaggcatttgctatgtactgttttgggcgctatctagttgcttgcttaggtggtgaagataggacaattgaatttttgaaaagggaaggtggttcaggttctgctgtaccactcttaggccaagcatctgaacaacgatatgtaaaccatccatttccaatgaactacatgcttaaaccatggccgctaggcgaatggttttacttggtcatcaaatttgggctagttcaatatatgataataaaatcaatatgtgctattcttgcggtgattcttgaatcctttggagtgtactgtgaaggagagtttaagttgaactgtgggtactcttacacggctgtggttctcaatttcagtcagtcatgggccttatactgtctcgttcagttctatgctgtgataaaggatgagttagctcatataaagcctcttgcaaagtttctgacattcaagtctattgtgttcttaacatggtggcaaggtatagcaattgcactgctcttcaactggggttcgttgagaggccctattgctcaagaattgcagttcaagtcaagtatccaagactttattatctgcatagagatgggtgttgctgccgttgcccacctgtatgtcttccctgcgaagccatacgagctaattggtgattgttttgttggagatgtttcagttcttggagattatgcttctgtcgactgccctctagaccccgatgaagtcaaggatagtgagcgcccaaccaagtttaggctcccccagccagatgatcatgttaggtgttccactgccataaaagaaagcgtccgtgatgtcgtacttgggggcggtgaatacattgtgaatgacttgaagtttaccgtgaaccatgctgtggaacccatcaatgaaaagctgcacatgatatccgagaacatcaaaaagcgtgagaagggaaagaggaaaacgaatgatgatagctgcatcagttcaccaacatccttgaccagggtcatcagtgggattgatgatccgctcctgaacggaagcttgagtgacaacagcggtccaaagaaagcacggaggcagcgcaggaaatcaggctatgcaagcgcagagagcggtggggagagcagcgaccatggcctaggcgggtttgagatccgagggaacagatggattactagggagtgacagctaggagcaatctgtggagatactatgtaaatgtcacaggagttggcctgtggtgatgtgcgataaccgggccagtgggttctgagcgtaagacgaggtctctagcaatgatatgttgtagcgtgactaaatcgagatgagcaatcaggttgttgtctgttgattctttcggctgaccatttcggctgctgaggccttgatcctgtatttgagatgtcaggcctacttagagcaaatgctggaaggaagcaatgtgcctgttctgagttatatataaagtgaagacggttgtctcacgcaatatgtgaagtgcaagatgagctctacactgcaaggaaccccaagaaaaaaccacaggtaagtttgtctgattgacaacggc

SEQ ID NO: 53714 - DNA, 2741 bp, Zea Mays
gaagagggcagaatgagagggtccagagagcgcgagagattgtgctgagttcctggctgacgcgaccagacagcgtctgcaaacaaaaaaaaaaccagaaacatttttgggaggatgtgatgcaggacaaaggatttctctccccgccgtccctgtctcccagacaactacctccacgctccccacggtcctctcctaatcccaattaatgctacgcaggcaaagatcgttttttttgttcttgtgcaccggttctctgattgcggagtcctgctctctctgcggtcggttttcgttgatccctcctgcattggtccgctccggctcagatccgattctctaggaaaagaaagaccagagtatcaggtggaacaacagaattctaggtactgccgggccgctcaacaagggaagagcaagagctccagtctctgtcccactgaggggttgtgaatcatgatcctctaataaccataccctggaaggctggaacaaatttcgttccaaaagggacataatcagagaaggccagttaagggggcagtgagaagggatggcgatggagttggccaagcaattgctcgtcgctgttctcagaagctatgcaccacctctctgggctacaatcattgccagtgtttttgttatcatctccgtctcactgtccctgtacttgctactcaatcatctgtcagcctacaaaaacccagaggaacagaagtttcttgtcggcgtcatcctcatggtgccatgctatgcagtcgagtcggtaagtatatatcattggtatatccgtcaataagtgtggacatcgaaattatgcgagatggttatgaggcatttgctatgtactgttttgggcgctatctagttgcttgcttaggtggtgaagataggacaattgaatttttgaaaagggaaggtggttcaggttctgctgtaccactcttaggccaagcatctgaacaacgatatgtaaaccatccatttccaatgaactacatgcttaaaccatggccgctaggcgaatggttttacttggtcatcaaatttgggctagttcaatatatgataataaaatcaatatgtgctattcttgcggtgattcttgaatcctttggagtgtactgtgaaggagagtttaagttgaactgtgggtactcttacacggctgtggttctcaatttcagtcagtcatgggccttatactgtctcgttcagttctatgctgtgataaaggatgagttagctcatataaagcctcttgcaaagtttctgacattcaagtctattgtgttcttaacatggtggcaaggtatagcaattgcactgctcttcaactggggttcgttgagaggccctattgctcaagaattgcagttcaagtcaagtatccaagactttattatctgcatagagatgggtgttgctgccgttgcccacctgtatgtcttccctgcgaagccatacgagctaattggtgattgttttgttggagatgtttcagttcttggagattatgcttctgtcgactgccctctagaccccgatgaagtcaaggatagtgagcgcccaaccaagtttaggctcccccagccagatgatcatgttaggtgttccactgccataaaagaaagcgtccgtgatgtcgtacttgggggcggtgaatacattgtgaatgacttgaagtttaccgtgaaccatgctgtggaacccatcaatgaaaagctgcacatgatatccgagaacatcaaaaagcgtgagaagggaaagaggaaaacgaatgatgatagctgcatcagttcaccaacatccttgaccagggtcatcagtgggattgatgatccgctcctgaacggaagcttgagtgacaacagcggtccaaagaaagcacggaggcagcgcaggaaatcaggctatgcaagcgcagagagcggtggggagagcagcgaccatggcctaggcgggtttgagatccgagggaacagatggattactagggagtgacagctaggagcaatctgtggagatactatgtaaatgtcacaggagttggcctgtggtgatgtgcgataaccgggccagtgggttctgagcgtaagacgaggtctctagcaatgatatgttgtagcgtgactaaatcgagatgagcaatcaggttgttgtctgttgattctttcggctgaccatttcggctgctgaggccttgatcctgtatttgagatgtcaggcctacttagagcaaatgctggaaggaagcaatgtgcctgttctgaggtccctccagcatcacttgtaatttgtaaagtactcaagtacagactagaactagtcatgcataccagaagaatagatagatgtttcagaagttgaggcctgagatgccgtgccactctatttgctctgtttcatgctttgccgttattatatcactattttcactgttcattctaaggccgttgtcacacgggtaccagaagagcagaacacctttttacgttccttttgctgctatggatggacttcgagagttccttgagaaagcactctcatctatctttccaattccttgtttccttgtggatcctgatcactgaagatggccatttgatttttcacttttcagttatatataaagtgaagacggttgtctcacgcaatatgtgaagtgcaagatgagctctacactgcaaggaaccccaagaaaaaaccacaggtaagtttgtctgattgacaacggc

SEQ ID NO: 53715 - DNA, 292 bp, Zea Mays
ctcaaccacagcagccatcttcgaaatatcgagaggggcggcgcgttggggatccttgtgcgccggtaccgccatggggtgattcatgaaaggtggcgtcgagtccccgatgggtggtcagggagagtcgctggtgctaaccacgcgccattggggtctttccagatgagaatattcaccgggggcacacaaattgctcgtcggagtggacgcttcgccttggatcagcggtaagctgtgggcagacgacatcacggcccggatagcttcgcgaggttacgagtcacttgaa

SEQ ID NO: 53716 - DNA, 1080 bp, Zea Mays
gtcaaaatgggaattcaagatgactaaaagaggggcggtctacgagccgctgccctggagcctgaggctgaagatcctcatcggtgcagctcgtggcctcgcgttccttcattcgtcagagaggcagatcatctacagggacttcaaggcttccaacatcttactggattcgcacttcaacgcgaagctctcggatttcggattggccaagcatggtccagacggcggggagtctcatgtgacaacaagagtcatggggacctatggctatgcagctccagagtacgtttctaccggccacctgtacgtgaagagcgacgtgtacggcttcggcgtcgtgctgctggagatgatctccggcctgagggcgctggacccgagccgcgagcgcgagaaggtgaacctggtgaactgggcgaggccgttgctgtccgaccggaggaagcttagccagctgatggacggcgggctggaggggcagtacaaccccaaagccgccctcctggccgcccagctgaccctcaggtgcctcaacggcgaccccaagagacggccgtccatgaaggaggtggtggaggcgctggagaagatcgagtcgtcggcgaagggcaggatggcgagggagccccggaacagctcgcgccgtggcctggtgcagtcccctaggggtgacagcgctaggaacaactccagctccaggggcaggtagacgcatggtctaatcttgaggatgattctgatgcatgtgtaaaggtagtagatgaccacgattcttgttgtcatgacgaagtttacgccgatcatgataatcaatgtagcgatgctgctcgagcatgactttgtagcatatatatatgcgtaaattcaaccattattcttccatggaagtcttgtctgagttgagctagattgcacttacaataccagcaatgccatgaagtgttgtctgagttgagctgcatcaggctgtattaagtactatatttatagatttcgtatcaacatttttttttgttctacatgtttcttaaacatttaaatttattgtaccttgttactatattatattaaacatcaatt

SEQ ID NO: 53717 - DNA, 1100 bp, Zea Mays
gggtgcgggccctcgctgcgcgggcagaatcgctgatatgcccttgggccacgccttccttcttatcccctgcgcctgccctcccctcctgcagcgcccgtcgcctccctttccccttccctccctccctctccccgcgggccgccagaggcaatttcgccctcgattcgaccccgattcgtccgcccgcgaccgggattccctccgccaagcgcggatctgaacgctgcgctccgtgtcgccgctcgaatccgccatgaagggggccaaatccaagggcgccgccaaggccgatgccaagctggcggtgaagagcaagggggcggagaagcccgccaagggcaggaaagggaaggccggcaaggaccccaacaagcctaagagggctcccagcgctttcttcgtgttcatggaggaatttcgcaaggagttcaaggagaagaaccctaagaacaagtctgtcgctgcggtggggaaagctgctggcgacaggtggaaatccctgagcgagtcggacaaggctccctatgtagccaaggctaacaagctcaagctcgagtacaacaaggccatcgctgcctacaacaagggcgagagcactgcagctaagaaggctcctgccaaggaggaagaggaggaagatgaagaggagtctgacaagtccaagtcggaggtcaatgacgaggatgatgaagagggtagtgaggaggatgaagatgatgacgagtgatggagctcctcgagacaatggaccgtgcttcatccaacaatggagcggctacacaaggccccgtggcgatcacaaaaaaggagcctatatccatggcaatgtgatcttgtgctcctactgatcaaggcagggccatgcgtgttctcctgcccacctaccagctgagcatgtgtgcagtcagcacccactgcaggcccaacgtttttacactcacccagatatgatcttggttttgatcagatctgccgacgaaaacaccaaattctgagtagagattagagaaggcagcagcatggcatggtagccttcgttttgtatttgtttcatgcttcgaacgccagcgcccttgcctactccagtactggggtga

SEQ ID NO: 53718 - DNA, 1055 bp, Zea Mays
gggtgcgggccctcgctgcgcgggcagaatcgctgatatgcccttgggccacgccttccttcttatcccctgcgcctgccctcccctcctgcagcgcccgtcgcctccctttccccttccctccctccctctccccgcgggccgccagaggcaatttcgccctcgattcgaccccgattcgtccgcccgcgaccgggattccctccgccaagcgcggatctgaacgctgcgctccgtgtcgccgctcgaatccgccatgaagggggccaaatccaagggcgccgccaaggccgatgccaagctggcggtgaagagcaagggggcggagaagcccgccaagggcaggaaagggaaggccggcaaggaccccaacaagcctaagagggctcccagcgctttcttcgtgttcatggaggaatttcgcaaggagttcaaggagaagaaccctaagaacaagtctgtcgctgcggacaaggctccctatgtagccaaggctaacaagctcaagctcgagtacaacaaggccatcgctgcctacaacaagggcgagagcactgcagctaagaaggctcctgccaaggaggaagaggaggaagatgaagaggagtctgacaagtccaagtcggaggtcaatgacgaggatgatgaagagggtagtgaggaggatgaagatgatgacgagtgatggagctcctcgagacaatggaccgtgcttcatccaacaatggagcggctacacaaggccccgtggcgatcacaaaaaaggagcctatatccatggcaatgtgatcttgtgctcctactgatcaaggcagggccatgcgtgttctcctgcccacctaccagctgagcatgtgtgcagtcagcacccactgcaggcccaacgtttttacactcacccagatatgatcttggttttgatcagatctgccgacgaaaacaccaaattctgagtagagattagagaaggcagcagcatggcatggtagccttcgttttgtatttgtttcatgcttcgaacgccagcgcccttgcctactccagtactggggtga

SEQ ID NO: 53719 - DNA, 1181 bp, Zea Mays
gggtgcgggccctcgctgcgcgggcagaatcgctgatatgcccttgggccacgccttccttcttatcccctgcgcctgccctcccctcctgcagcgcccgtcgcctccctttccccttccctccctccctctccccgcgggccgccagaggcaatttcgccctcgattcgaccccgattcgtccgcccgcgaccgggattccctccgccaagcgcggatctgaacgctgcgctccgtgtcgccgctcgaatccgccatgaagggggccaaatccaagggcgccgccaaggccgatgccaaggaggaatttcgcaaggagttcaaggagaagaaccctaagaacaagtctgtcgctgcggtggggaaagctgctggcgacaggtggaaatccctgagcgagtcggacaaggctccctatgtagccaaggctaacaagctcaagctcgagtacaacaaggccatcgctgcctacaacaagggcgagagcactgcagctaagaaggctcctgccaaggaggaagaggaggaagatgaagaggagtctgacaagtccaagtcggaggtcaatgacgaggatgatgaagagggtagtgaggaggatgaagatgatgacgagtgatggagctcctcgagacaatggaccgtgcttcatccaacaatggagcggctacacaaggccccgtggcgatcacaaaaaaggagcctatatccatgtactagaattattcagtttcactccacatcgtgatgttttatttttacttttgtcgtgctataacggatagcgctcctcgttggcgccactggcgggtggttctgcctctggtctggtgtgtttgtgtgtggtcacacttgccagccagcagaggcgcctgcttgtacctagattactgtttccattgtcgtcatcatcggctaacattgtcataatgtcagtttgggtaatgttagattaagtaattattgtgttctgtattcttgtttgttgcccttcttttgtgtgtttttgttattgttggtctgtttccattgttgttgctttggcattgtcagtgcccgccagccctgaaaattgccgtttgggtgggtttgcgtgtacttcgtattatgatgttgggctgcacattgtagctgggaatgtttgccaaaaaatggaatgggcatgcggtggttgttggtgg

SEQ ID NO: 53720 - DNA, 1221 bp, Zea Mays
gggtgcgggccctcgctgcgcgggcagaatcgctgatatgcccttgggccacgccttccttcttatcccctgcgcctgccctcccctcctgcagcgcccgtcgcctccctttccccttccctccctccctctccccgcgggccgccagaggcaatttcgccctcgattcgaccccgattcgtccgcccgcgaccgggattccctccgccaagcgcggatctgaacgctgcgctccgtgtcgccgctcgaatccgccatgaagggggccaaatccaagggcgccgccaaggccgatgccaagctggcggtgaagagcaagggggcggagaagcccgccaagggcaggaaagggaaggccggcaaggaccccaacaagcctaagagggctcccagcgctttcttcgtgttcatggaggaatttcgcaaggagttcaaggagaagaaccctaagaacaagtctgtcgctgcggtggggaaagctgctggcgacaggtggaaatccctgagcgagtcggacaaggctccctatgtagccaaggctaacaagctcaagctcgagtacaacaaggccatcgctgcctacaacaagggcgagagcactgcagctaagaaggctcctgccaaggaggaagaggaggaagatgaagaggagtctgacaagtccaagtcggaggtcaatgacgaggatgatgaagagggtagtgaggaggatgaagatgatgacgagtgatggagctcctcgagacaatggaccgtgcttcatccaacaatggagcggctacacaaggccccgtggcgatcacaaaaaaggagcctatatccatgtactagaattattcagtttcactccacatcgtgatgttttatttttacttttgtcgtgctataacggatagcgctcctcgttggcgcctgcttgtacctagattactgtttccattgtcgtcatcatcggctaacattgtcataatgtcagtttgggtaatgttagattaagtaattattgtgttctgtattcttgtttgttgcccttcttttgtgtgtttttgttattgttggtctgtttccattgttgttgctttggcattgtcagtgcccgccagccctgaaaattgccgtttgggtgggtttgcgtgtacttcgtattatgatgttgggctgcacattgtagctgggaatgtttgccaaaaaatggaatgggcatgcggtggttgttggtgg

SEQ ID NO: 53721 - DNA, 410 bp, Zea Mays
gggtgcgggccctcgctgcgcgggcagaatcgctgatatgcccttgggccacgccttccttcttatcccctgcgcctgccctcccctcctgcagcgcccgtcgcctccctttccccttccctccctccctctccccgcgggccgccagaggcaatttcgccctcgattcgaccccgattcgtccgcccgcgaccgggattccctccgccaagcgcggatctgaacgctgcgctccgtgtcgccgctcgaatccgccatgaagggggccaaatccaagggcgccgccaaggccgatgccaagctggcggtgaagagcaagggggcggagaagcccgccaagggcaggaaagggaaggccggcaaggaccccaacaagcctaagagggctcccagcgctttcttcgtgttca

SEQ ID NO: 53722 - DNA, 1997 bp, Zea Mays
attacatgtcttaagttgatgtcgtttgcgggatccggagcactgggagctcaaatctggacatttatgcatggaaagggacgcgttggattcacctgccttgtcgattgacaaaaggctgcggtcggatgctgtcgaatcacccctggtggatgatgcaacgcaacccaaggagggggcggacggttaccctgtcaaggttcggaagccttacacgatcacgaagcagcgagagaagtggacagaggaagagcatgggaagttcctggaggcactgaagctctatggtcggtcttggcgccagatacaagaacacattggcacaaagactgctgtccagattcggagccatgctcagaagtttttctccaaggtcgtgcgtgaacctggggccagtaattcaattgagatcccaccccctaggccaaagagaaaaccactgcacccataccctcgcaagtgtgccgactccaccgtgacaaatgctccaatgggcgaaccgaagaatgctcctgtttcatcaccatctggttctgaccaagagaatggttcgcctgtctcggtgttatctgcaatgcagtcggatgcttttggttcatcaatatcaaacccatcaactgggggcacgtctcctgcgtcatcagatgatgggaataatgtccctgagatagtgaatggggaggaaaatttgctcactcagcaaatagaagaccgatcccatcaggaatcaaagcaggacaacagtgatggtgagctgtctgaagaagattcatcacgagtccaagaaaccagtttgaagctttttgggaagacagttatcatcccagacccaaagaaagtctgttcctcggatgggggagctggagatgatacacaagaagtgatgcaaacatcctgggttggaggaggggtggcagcataccctgcccataacggatggtttcttccgttccattctttccctgctcatatgtatgagtcaggggatgctaggatttcccctcttcatatgtggtggccttactacggttttccggccggccatccaagagggtttggcacagggctgcttaacgaaggcgccattgagagtgatgccgacaatagcccatcggttgaaactaattctgatcgcacgggcaatgttcatgttcagacgacgacccctaccattcacaacaatgctgtcaaggagtcagttgggccagttgagatgccagagtcgggtccgagcattgagctgaaacccagcgcgaactcggcctttgtaagagtgaagccgagcagcagcgtcagcggagaccaatcactggtaagggggttcgtgccatacaaaagatgtaaggtcgaataacccaacccaacgacatacctgtctgctgctaatcttactggagattgattgatcctgaacagtgtagggactcgagtggcacacatcccttgttccagtgtgcctgccattttttgcctgcaaaattggctgctggtgtatgtgtaatattgtcgttttactgcctgcagcggaatgtaagatgccgcaggcttgttgctgtcacctaggcgtagactgaacagatgttgtgcagggatcgccgatctctgcacccttatgtttgttgtacgaggaaaaccggattctgttgaactctcgtgttcaaaaattcattgattcctgatggaaactgatttgtaaatgaacatggcaatgccgccggacaggttacagtgtatcctgtaagaccaattcttttggtccttgaacaatggaatgcagactaggttttggtcattcaaagcaagctttgggtgtgatgttattgtgttggatgcaaagcaagcgatctgctgctggtggtaacttcgtgagggcttgtgctgctgccgatgatgccgtgctatccctacctcctcttcctgttggtgttgctgccatcatgggttagtttgtaatgcctgttgaagtatacaagtggattgcttatctttttcttatc

SEQ ID NO: 53723 - DNA, 2024 bp, Zea Mays
ccacggccgacgtggcccgcctcccctcccctcccttcgcccccagaaatctcgccgctcccacccctctccttcctctcgccatttccatttccttgcccttgccagccagagcgagactccaccgcttcctctccgccgcgtcctcctcccctccctccgttcctcacggctctccggactcgccccgcggctggccgtgctgagtttcgttctctggccggcaaagaagcgatttttttgtgctttctggacggatcccggccggagaagggaccgaatttccacgacctcgaccgccggctgctcctctgctgggctctccgtgcgcaagaagagcctaccaaggtgaatccggagatttgagctccgggcccgcctcatggagtccatggcgcaggtcgtgcgtgaacctggggccagtaattcaattgagatcccaccccctaggccaaagagaaaaccactgcacccataccctcgcaagtgtgccgactccaccgtgacaaatgctccaatgggcgaaccgaagaatgctcctgtttcatcaccatctggttctgaccaagagaatggttcgcctgtctcggtgttatctgcaatgcagtcggatgcttttggttcatcaatatcaaacccatcaactgggggcacgtctcctgcgtcatcagatgatgggaataatgtccctgagatagtgaatggggaggaaaatttgctcactcagcaaatagaagaccgatcccatcaggaatcaaagcaggacaacagtgatggtgagctgtctgaagaagattcatcacgagtccaagaaaccagtttgaagctttttgggaagacagttatcatcccagacccaaagaaagtctgttcctcggatgggggagctggagatgatacacaagaagtgatgcaaacatcctgggttggaggaggggtggcagcataccctgcccataacggatggtttcttccgttccattctttccctgctcatatgtatgagtcaggggatgctaggatttcccctcttcatatgtggtggccttactacggttttccggccggccatccaagagggtttggcacagggctgcttaacgaaggcgccattgagagtgatgccgacaatagcccatcggttgaaactaattctgatcgcacgggcaatgttcatgttcagacgacgacccctaccattcacaacaatgctgtcaaggagtcagttgggccagttgagatgccagagtcgggtccgagcattgagctgaaacccagcgcgaactcggcctttgtaagagtgaagccgagcagcagcgtcagcggagaccaatcactggtaagggggttcgtgccatacaaaagatgtaaggtcgaataacccaacccaacgacatacctgtctgctgctaatcttactggagattgattgatcctgaacagtgtagggactcgagtggcacacatcccttgttccagtgtgcctgccattttttgcctgcaaaattggctgctggtgtatgtgtaatattgtcgttttactgcctgcagcggaatgtaagatgccgcaggcttgttgctgtcacctaggcgtagactgaacagatgttgtgcagggatcgccgatctctgcacccttatgtttgttgtacgaggaaaaccggattctgttgaactctcgtgttcaaaaattcattgattcctgatggaaactgatttgtaaatgaacatggcaatgccgccggacaggttacagtgtatcctgtaagaccaattcttttggtccttgaacaatggaatgcagactaggttttggtcattcaaagcaagctttgggtgtgatgttattgtgttggatgcaaagcaagcgatctgctgctggtggtaacttcgtgagggcttgtgctgctgccgatgatgccgtgctatccctacctcctcttcctgttggtgttgctgccatcatgggttagtttgtaatgcctgttgaagtatacaagtggattgcttatctttttcttatc

SEQ ID NO: 53724 - DNA, 2262 bp, Zea Mays
ccacggccgacgtggcccgcctcccctcccctcccttcgcccccagaaatctcgccgctcccacccctctccttcctctcgccatttccatttccttgcccttgccagccagagcgagactccaccgcttcctctccgccgcgtcctcctcccctccctccgttcctcacggctctccggactcgccccgcggctggccgtgctgagtttcgttctctggccggcaaagaagcgatttttttgtgctttctggacggatcccggccggagaagggaccgaatttccacgacctcgaccgccggctgctcctctgctgggctctccgtgcgcaagaagagcctaccaaggtgaatccggagatttgagctccgggcccgcctcatggagtccatggcgcaggaaagggacgcgttggattcacctgccttgtcgattgacaaaaggctgcggtcggatgctgtcgaatcacccctggtggatgatgcaacgcaacccaaggagggggcggacggttaccctgtcaaggttcggaagccttacacgatcacgaagcagcgagagaagtggacagaggaagagcatgggaagttcctggaggcactgaagctctatggtcggtcttggcgccagatacaaggtcgtgcgtgaacctggggccagtaattcaattgagatcccaccccctaggccaaagagaaaaccactgcacccataccctcgcaagtgtgccgactccaccgtgacaaatgctccaatgggcgaaccgaagaatgctcctgtttcatcaccatctggttctgaccaagagaatggttcgcctgtctcggtgttatctgcaatgcagtcggatgcttttggttcatcaatatcaaacccatcaactgggggcacgtctcctgcgtcatcagatgatgggaataatgtccctgagatagtgaatggggaggaaaatttgctcactcagcaaatagaagaccgatcccatcaggaatcaaagcaggacaacagtgatggtgagctgtctgaagaagattcatcacgagtccaagaaaccagtttgaagctttttgggaagacagttatcatcccagacccaaagaaagtctgttcctcggatgggggagctggagatgatacacaagaagtgatgcaaacatcctgggttggaggaggggtggcagcataccctgcccataacggatggtttcttccgttccattctttccctgctcatatgtatgagtcaggggatgctaggatttcccctcttcatatgtggtggccttactacggttttccggccggccatccaagagggtttggcacagggctgcttaacgaaggcgccattgagagtgatgccgacaatagcccatcggttgaaactaattctgatcgcacgggcaatgttcatgttcagacgacgacccctaccattcacaacaatgctgtcaaggagtcagttgggccagttgagatgccagagtcgggtccgagcattgagctgaaacccagcgcgaactcggcctttgtaagagtgaagccgagcagcagcgtcagcggagaccaatcactggtaagggggttcgtgccatacaaaagatgtaaggtcgaataacccaacccaacgacatacctgtctgctgctaatcttactggagattgattgatcctgaacagtgtagggactcgagtggcacacatcccttgttccagtgtgcctgccattttttgcctgcaaaattggctgctggtgtatgtgtaatattgtcgttttactgcctgcagcggaatgtaagatgccgcaggcttgttgctgtcacctaggcgtagactgaacagatgttgtgcagggatcgccgatctctgcacccttatgtttgttgtacgaggaaaaccggattctgttgaactctcgtgttcaaaaattcattgattcctgatggaaactgatttgtaaatgaacatggcaatgccgccggacaggttacagtgtatcctgtaagaccaattcttttggtccttgaacaatggaatgcagactaggttttggtcattcaaagcaagctttgggtgtgatgttattgtgttggatgcaaagcaagcgatctgctgctggtggtaacttcgtgagggcttgtgctgctgccgatgatgccgtgctatccctacctcctcttcctgttggtgttgctgccatcatgggttagtttgtaatgcctgttgaagtatacaagtggattgcttatctttttcttatc

SEQ ID NO: 53725 - DNA, 2869 bp, Zea Mays
gaaaaatttcctcgaaagggtgggctgcaagaatgaagaggtactccgtgaagatgaacagctggaagagaagctttgtctttgggtgtcatatagggggcagacattaacaagaactgtaagagggatgatgtactatcgaaaagctttggagcttcaggcttttcttgatatggccaacaatgatgatcttatgaaaggctacagagcaatggaagtaatgtctgaggactcaccattaaagactcaatgcaaggctatagccgacatgaagtttacatatgttgtctcatgccaactatatggaattcagaagcgttctaatgagccttgcgcacatgatattttgagactaatgacagagtatccatcacttagggtcgcctatattgatgaagttgaagcacccagcaaagatagaatcaagaagattgaaaaggtttactactcagtgttagtgaaggcttctgttacaaaacctaatgagcctggtcagagccttgatcaggtcatctacaagataaaactaccaggtaatgccattttaggtgaaggaaagccagaaaaccagaaccatgcaataatattcacccgaggcgaatgtctccaaactatagatatgaatcaggagcactatatggaggaggctttgaaaatgagaaatctgctgcaagagtttgagaagaaacatggagtgagacatccatcaatacttggagtcagagaacacatatttacgggcagtgtgtcatcccttgcttggttcatgtcaaatcaggaaactagttttgtgacaattggacaacgagtgcttgccaatccactgagtaaagcatccaaaattatcaatcttagtgaggacatctttgcaggattcaattccacattgcgcgaaggcaatgttactcaccatgaatacatgcaagttggcaaaggaagggatgtaggtctcaatcaaatatctctgtttgaggcaaagatagcaaatggcaatggcgaacaaacgctgagccgtgacatctaccggctaggtcatcgctttgatttcttcaggatgctgtcttgttactacacaacaattggtttctacttcagtacaatgattacagtatggactgtatatgttttcctctacggccggctatatcttgtacttagtggactcgatgaagcactggctactggaaagaggtttgtgcacaatacacctctccaggttgctcttgcgtcagagtcttttgtgcaacttggatttttgatggcgctgcccatgatgatggaaatcggtttggagagaggattcagaactgcattgagtgattttatactgatgcagcttcagttggcctctgttttcttcacattctcgttgggaacaaaaactcactactacggaaggacgttactccatggaggagcggaatacagagccactggacgtgggtttgtggtgttccatgccaaatttgctgagaactatcgactttattcccgtagccattttgtcaagggccttgagctgatgattctactagttgtgtatgaaatatttggtcagtcatatagaggggctataacttacatcttcatcaccgtatccatgtggttcatggtgggcacttggctctttgcaccattcctgttcaatccttctggatttgagtggcagaagattgtggatgactggactgattggcacaagtggatcagcaatcgtggaggtattggtgtggcaccagagaaaagctgggagtcatggtgggaaaaagagcaggagccccttcgttactctgggaagcgtggtactattgttgaaatactgcttgcattgcgtttctttatctatcaatatggactcgtgtatcatctgaatataacgaagaagataaccaaggataaccagagtgtgctggtttattgcttctcatgggttgtaattttcgttgttttactcgttatgaagaccgtatcagtggggaggaggaggttcagtgcagagttccagctagtgttccggctgatcaagggtctcatatttataacttttacagccatcgtggtaatcctaatagcaatccctggcatgacggttctggacatctttgtttgcatccttgccttcatgcccactggatggggtttgctcctgattgcccaagctatcaggcctgtgattcaaaagatcgggctgtgggggtcgatcaaggctcttgcccggggctacgagatcctaatggggcttctcctgttcacgcccattgctttccttgcctggttcccgttcgtgtccgagttccagaccaggatgctgttcaaccaggccttcagcagaggtctgcagatctcccgtatcctgggaggacacaagaaagaccgagggacgcggagcaaggagtagtagggctgctgattgaaggtccgtctatcgggagttatgtcgtcctggagcggtctatcaggttcagagaatattagggtccgtatgtatgtatgtgtgtgtcgcacctagcaccagtagtatgtatgtatgtatgcgtatgtaggttcagagaatattagggtccctatgtatatgtatgtatcaggattgctatggtcttttggattggaagatctgagatttgctggtgcaatggccagtatctgacatccaaatgttgaaactataattaggctctgctaatagttagctaacttacagctaacaattagtttattagctggcttacgactaagtagtcagattaaagttgggatgtcggtcgccccctttaggtttagttaggctcgttccaatgggtggcgagagcgttagtaaccaggattccggatcgatggatggaatcgaggaacgggaacgtggtacgcg

SEQ ID NO: 53726 - DNA, 2814 bp, Zea Mays
gaaaaatttcctcgaaagggtgggctgcaagaatgaagaggtactccgtgaagatgaacagctggaagagaagctttgtctttgggtgtcatatagggggcagacattaacaagaactgtaagagggatgatgtactatcgaaaagctttggagcttcaggcttttcttgatatggccaacaatgatgatcttatgaaaggctacagagcaatggaagtaatgtctgaggactcaccattaaagactcaatgcaaggctatagccgacatgaagtttacatatgttgtctcatgccaactatatggaattcagaagcgttctaatgagccttgcgcacatgatattttgagactaatgacagagtatccatcacttagggtcgcctatattgatgaagttgaagcacccagcaaagatagaatcaagaagattgaaaaggtttactactcagtgttagtgaaggcttctgttacaaaacctaatgagcctggtcagagccttgatcaggtcatctacaagataaaactaccaggtaatgccattttaggtgaaggaaagccagaaaaccagaaccatgcaataatattcacccgaggcgaatgtctccaaactatagatatgaatcaggagcactatatggaggaggctttgaaaatgagaaatctgctgcaagagtttgagaagaaacatggagtgagacatccatcaatacttggagtcagagaacacatatttacgggcaggaaactagttttgtgacaattggacaacgagtgcttgccaatccactgagggttcggtttcattatggccatcctgatgtcttcgatcgtcttttccacgttacgaggggcggtgtcagtaaagcatccaaaattatcaatcttagtgaggacatctttgcaggattcaattccacattgcgcgaaggcaatgttactcaccatgaatacatgcaagttggcaaaggaagggatgtaggtctcaatcaaatatctctgtttgaggcaaagatagcaaatggcaatggcgaacaaacgctgagccgtgacatctaccggctaggtcatcgctttgatttcttcaggatgctgtcttgttactacacaacaattggtttctacttcagtacaatgattacagtatggactgtatatgttttcctctacggccggctatatcttgtacttagtggactcgatgaagcactggctactggaaagaggtttgtgcacaatacacctctccaggttgctcttgcgtcagagtcttttgtgcaacttggatttttgatggcgctgcccatgatgatggaaatcggtttggagagaggattcagaactgcattgagtgattttatactgatgcagcttcagttggcctctgttttcttcacattctcgttgggaacaaaaactcactactacggaaggacgttactccatggaggagcggaatacagagccactggacgtgggtttgtggtgttccatgccaaatttgctgagaactatcgactttattcccgtagccattttgtcaagggccttgagctgatgattctactagttgtgtatgaaatatttggtcagtcatatagaggggctataacttacatcttcatcaccgtatccatgtggttcatggtgggcacttggctctttgcaccattcctgttcaatccttctggatttgagtggcagaagattgtggatgactggactgattggcacaagtggatcagcaatcgtggaggtattggtgtggcaccagagaaaagctgggagtcatggtgggaaaaagagcaggagccccttcgttactctgggaagcgtggtactattgttgaaatactgcttgcattgcgtttctttatctatcaatatggactcgtgtatcatctgaatataacgaagaagataaccaaggataaccagagtgtgctggtttattgcttctcatgggttgtaattttcgttgttttactcgttatgaagaccgtatcagtggggaggaggaggttcagtgcagagttccagctagtgttccggctgatcaagggtctcatatttataacttttacagccatcgtgattgcccaagctatcaggcctgtgattcaaaagatcgggctgtgggggtcgatcaaggctcttgcccggggctacgagatcctaatggggcttctcctgttcacgcccattgctttccttgcctggttcccgttcgtgtccgagttccagaccaggatgctgttcaaccaggccttcagcagaggtctgcagatctcccgtatcctgggaggacacaagaaagaccgagggacgcggagcaaggagtagtagggctgctgattgaaggtccgtctatcgggagttatgtcgtcctggagcggtctatcaggttcagagaatattagggtccgtatgtatgtatgtgtgtgtcgcacctagcaccagtagtatgtatgtatgtatgcgtatgtaggttcagagaatattagggtccctatgtatatgtatgtatcaggattgctatggtcttttggattggaagatctgagatttgctggtgcaatggccagtatctgacatccaaatgttgaaactataattaggctctgctaatagttagctaacttacagctaacaattagtttattagctggcttacgactaagtagtcagattaaagttgggatgtcggtcgccccctttaggtttagttaggctcgttccaatgggtggcgagagcgttagtaaccaggattccggatcgatggatggaatcgaggaacgggaacgtggtacgcg

SEQ ID NO: 53727 - DNA, 4499 bp, Zea Mays
atggggcggatcggcaccgccgtccgaggaggaagggctcgaatcagaccatctctgggacctagaacgttccgcatgggaagttgggttgcaaggagcagcgggtcccgacgccagaggggtggaagacgacggggtggccgtcggtttcggggtggttgctggcgtgaggctggtggaggggttggcgccgggaagggaagggacaggggcggaagacggagggaagaccgaagggcaggagacggaagggcggccatcttatctagatgcatcgaatggggagagacaccccctgacttttttttcttaagttggtgccgtgactcgaacccgggctggctcagcagaccgcttctttggcgtgtccggctgaccagttgcaccatcaaacctctggtacagccaaccaaagatataatgagagaacctatcaggacattccagtggcacgagtttttccctcatggaactaacaatattggtgttgttatatcactctgggctccaataatcctggtatatttcatggacacccaaatttggtatgcactgttctctactctgattggtggcatctacggggcttatcgtcgtcttggtgagatacgtacattaggaatgttgagatctcgctttgaatctttgcctgaggccttcaatgaacgcttgattccttctgatgcaaataagagtaaaggtcttcgtgctgctttttcgagtagacccaaggcttctggtgacgaaagtgagagagagaaaagagctgcaaggtttgctcaaatgtggaacgccattattacaagtttccgcgaagaggatctcatagacaatagggagaaggatctgctactggttccagactgtaaagaccgtgaacttgatatattccaatggccgcctttcctacttgctagcaagatcccaatagcactggatatggcagcagacagtggtggaaaagaccgtgatctgacgaagaggataaagtcagatccatacttttcctttgctatcagagaatgctatgcttcattcaagaacatcatcaataccttagtatttggtcagcgggagaaagatgtcctagtacagattttcacagttgttgataagcatatagaagaggaaactctgataacgggtctcaatatgaagaaccttcctgcactgagcaagaagtttgttgaattacttgagttactgcaaaaaaacaaggaggaagacttgggtcaggtagttattttgttccaagatatgctcgaggtggtcacgagggatataatggaggaacaggacctgctcgagacgttggattctttacatggtgccaatagtagaaaacatgaaggaattacaccgctagatcagcaagaccagttgtttgctaaagctattaagtttcctgtggtggaatcaaatgcatggactgaaaagataaagaggcttcatcttctgttaactgtgaaagagtctgctatggatgttcctattaatcttgatgctaggcggcggatatcgttcttcgcaaattctctatttatggatatgcccaatgctccaaaagttcggaacatgttgcccttctctatcttgactccttattacaaggaagatgttctgttttcattacaaaatctggaagagcgaaatgaggatggagtttccattcttttctacttgcaaaaaatttacccagatgaatggaaaaatttcctcgaaagggtgggctgcaagaatgaagaggtactccgtgaagatgaacagctggaagagaagctttgtctttgggtgtcatatagggggcagacattaacaagaactgtaagagggatgatgtactatcgaaaagctttggagcttcaggcttttcttgatatggccaacaatgatgatcttatgaaaggctacagagcaatggaagtaatgtctgaggactcaccattaaagactcaatgcaaggctatagccgacatgaagtttacatatgttgtctcatgccaactatatggaattcagaagcgttctaatgagccttgcgcacatgatattttgagactaatgacagagtatccatcacttagggtcgcctatattgatgaagttgaagcacccagcaaagatagaatcaagaagattgaaaaggtttactactcagtgttagtgaaggcttctgttacaaaacctaatgagcctggtcagagccttgatcaggtcatctacaagataaaactaccaggtaatgccattttaggtgaaggaaagccagaaaaccagaaccatgcaataatattcacccgaggcgaatgtctccaaactatagatatgaatcaggagcactatatggaggaggctttgaaaatgagaaatctgctgcaagagtttgagaagaaacatggagtgagacatccatcaatacttggagtcagagaacacatatttacgggcagtgtgtcatcccttgcttggttcatgtcaaatcaggaaactagttttgtgacaattggacaacgagtgcttgccaatccactgagggttcggtttcattatggccatcctgatgtcttcgatcgtcttttccacgttacgaggggcggtgtcagtaaagcatccaaaattatcaatcttagtgaggacatctttgcaggattcaattccacattgcgcgaaggcaatgttactcaccatgaatacatgcaagttggcaaaggaagggatgtaggtctcaatcaaatatctctgtttgaggcaaagatagcaaatggcaatggcgaacaaacgctgagccgtgacatctaccggctaggtcatcgctttgatttcttcaggatgctgtcttgttactacacaacaattggtttctacttcagtacaatgattacagtatggactgtatatgttttcctctacggccggctatatcttgtacttagtggactcgatgaagcactggctactggaaagagcttcagttggcctctgttttcttcacattctcgttgggaacaaaaactcactactacggaaggacgttactccatggaggagcggaatacagagccactggacgtgggtttgtggtgttccatgccaaatttgctgagaactatcgactttattcccgtagccattttgtcaagggccttgagctgatgattctactagttgtgtatgaaatatttggtcagtcatatagaggggctataacttacatcttcatcaccgtatccatgtggttcatggtgggcacttggctctttgcaccattcctgttcaatccttctggatttgagtggcagaagattgtggatgactggactgattggcacaagtggatcagcaatcgtggaggtattggtgtggcaccagagaaaagctgggagtcatggtgggaaaaagagcaggagccccttcgttactctgggaagcgtggtactattgttgaaatactgcttgcattgcgtttctttatctatcaatatggactcgtgtatcatctgaatataacgaagaagataaccaaggataaccagagtgtgctggtttattgcttctcatgggttgtaattttcgttgttttactcgttatgaagaccgtatcagtggggaggaggaggttcagtgcagagttccagctagtgttccggctgatcaagggtctcatatttataacttttacagccatcgtggtaatcctaatagcaatccctggcatgacggttctggacatctttgtttgcatccttgccttcatgcccactggatggggtttgctcctgattgcccaagctatcaggcctgtgattcaaaagatcgggctgtgggggtcgatcaaggctcttgcccggggctacgagatcctaatggggcttctcctgttcacgcccattgctttccttgcctggttcccgttcgtgtccgagttccagaccaggatgctgttcaaccaggccttcagcagaggtctgcagatctcccgtatcctgggaggacacaagaaagaccgagggacgcggagcaaggagtagtagggctgctgattgaaggtccgtctatcgggagttatgtcgtcctggagcggtctatcaggttcagagaatattagggtccgtatgtatgtatgtgtgtgtcgcacctagcaccagtagtatgtatgtatgtatgcgtatgtaggttcagagaatattagggtccctatgtatatgtatgtatcaggattgctatggtcttttggattggaagatctgagatttgctggtgcaatggccagtatctgacatccaaatgttgaaactataattaggctctgctaatagttagctaacttacagctaacaattagtttattagctggcttacgactaagtagtcagattaaagttgggatgtcggtcgccccctttaggtttagttaggctcgttccaatgggtggcgagagcgttagtaaccaggattccggatcgatggatggaatcgaggaacgggaacgtggtacgcg

SEQ ID NO: 53728 - DNA, 6149 bp, Zea Mays
ctcccctcccctcccctcccggccgccgccgccgccgccgcgtgttctctctcatctagggtttcatctccatctagtcgagcattcccgtgctggggtggggagtgggagactcgactcgatttgattcgactccatttcgtgctagcgcctagcgctgcagagcgagtgaggtgacgggaatggcggctccggggcggaggacggcggacgtgtcctcgtcctcgccctctccgtcccctgccgccccctccaccggcaggcgcctcctgcgcacgcagaccgtcgccaacctcggcgagtccatcttcgacagcgaggtcgtgccgtcctcgctcgtcgagatcgcgcccatcctccgcgtcgccaacgaggtcgaggttgaaaacccgcgcgtcgcctacctctgtcgcttctacgctttcgagaaggctcaccgcctcgacccgacttccagtggccgtggtgttcgtcagtttaagaccgcacttctgcagaggcttgagagggaaaatgaccccacactgaagggaagggtccacaagagcgatgctagtgagatgcaacgcttctaccgcgaatactacaggaagtacatccaggcactgcaaactgtcgttaataaggatgaccgtgcgcgcctcactaaggcataccaaacggctgctatcttgtttgaggttttgagggctgttaatgattcccagtccgttgaagtcgatcaagcgattttggatacacacatcaaggtcgaagaaaagaaaaagctgtttctaccttataacattctcccgctcgatcctgaaagtactggcgaagccattatgcgatatccagagattcaagctgctgtttatgctcttcgcaatactagaggtctgccatggccaaaggaccaagacaagaagcctgaagagaagaatactggcaaagaccttcttgattggcttcaggctatgtttgggtttcagaaagacaatgtgtccaaccaaagggaacatttgatactgttgcttgcaaatgttcatataaggaaaatacccaaggctgaccaacaaccgaagttggatgacaaagctctggatgatgtaatgaagaagctatttaagaattataagaagtggtgcaagtacctcggccgcaaaagcagtttatggttgccaaccatccagcaggaagtgcagcagcgtaagcttctttatatgggtctctacctgctgatttggggtgaggcggccaacttgagattcatgccagagtgtatttgttacatctaccatcatatggcttttgaactctatggcatgctggctggaaatgtgagcccaatgactggtgaaaatgttagaccagcatatggtggtgacgaagaagcctttttgacgaaagtcgtgactccaatatacaaagttatagagaaggaagctgaaaggagcaagaccatgaaatcaaagcattcacattggagaaactatgatgatctgaatgagtacttttggtcagttgattgtttccggctaggatggcctatgagagccgacgctgactttttcaaaactccaaaagatccttatctgaatcatttgaatggagagaacagatctgcaggcaatgtccattggatgggaaaagttaattttgtggagatacgttcattttggcacatattccgtagttttgacagaatgtggatcttcttaatattgtccttacaggccatgataattattgcttggaatggtggaacaccaagtgatatctttgatgctggcgtatttaagaaggttttgagcatatttatttctgcagcaattttgaagttgggtcaagatcaaacctctggtacagccaaccaaagatataatgagagaacctatcaggacattccagtggcacgagtttttccctcatggaactaacaatattggtgttgttatatcactctgggctccaataatcctggtatatttcatggacacccaaatttggtatgcactgttctctactctgattggtggcatctacggggcttatcgtcgtcttggtgagatacgtacattaggaatgttgagatctcgctttgaatctttgcctgaggccttcaatgaacgcttgattccttctgatgcaaataagagtaaaggtcttcgtgctgctttttcgagtagacccaaggcttctggtgacgaaagtgagagagagaaaagagctgcaaggtttgctcaaatgtggaacgccattattacaagtttccgcgaagaggatctcatagacaatagggagaaggatctgctactggttccagactgtaaagaccgtgaacttgatatattccaatggccgcctttcctacttgctagcaagatcccaatagcactggatatggcagcagacagtggtggaaaagaccgtgatctgacgaagaggataaagtcagatccatacttttcctttgctatcagagaatgctatgcttcattcaagaacatcatcaataccttagtatttggtcagcgggagaaagatgtcctagtacagattttcacagttgttgataagcatatagaagaggaaactctgataacgggtctcaatatgaagaaccttcctgcactgagcaagaagtttgttgaattacttgagttactgcaaaaaaacaaggaggaagacttgggtcaggtagttattttgttccaagatatgctcgaggtggtcacgagggatataatggaggaacaggacctgctcgagacgttggattctttacatggtgccaatagtagaaaacatgaaggaattacaccgctagatcagcaagaccagttgtttgctaaagctattaagtttcctgtggtggaatcaaatgcatggactgaaaagataaagaggcttcatcttctgttaactgtgaaagagtctgctatggatgttcctattaatcttgatgctaggcggcggatatcgttcttcgcaaattctctatttatggatatgcccaatgctccaaaagttcggaacatgttgcccttctctatcttgactccttattacaaggaagatgttctgttttcattacaaaatctggaagagcgaaatgaggatggagtttccattcttttctacttgcaaaaaatttacccagatgaatggaaaaatttcctcgaaagggtgggctgcaagaatgaagaggtactccgtgaagatgaacagctggaagagaagctttgtctttgggtgtcatatagggggcagacattaacaagaactgtaagagggatgatgtactatcgaaaagctttggagcttcaggcttttcttgatatggccaacaatgatgatcttatgaaaggctacagagcaatggaagtaatgtctgaggactcaccattaaagactcaatgcaaggctatagccgacatgaagtttacatatgttgtctcatgccaactatatggaattcagaagcgttctaatgagccttgcgcacatgatattttgagactaatgacagagtatccatcacttagggtcgcctatattgatgaagttgaagcacccagcaaagatagaatcaagaagattgaaaaggtttactactcagtgttagtgaaggcttctgttacaaaacctaatgagcctggtcagagccttgatcaggtcatctacaagataaaactaccaggtaatgccattttaggtgaaggaaagccagaaaaccagaaccatgcaataatattcacccgaggcgaatgtctccaaactatagatatgaatcaggctttgaaaatgagaaatctgctgcaagagtttgagaagaaacatggagtgagacatccatcaatacttggagtcagagaacacatatttacgggcagtgtgtcatcccttgcttggttcatgtcaaatcaggaaactagttttgtgacaattggacaacgagtgcttgccaatccactgagggttcggtttcattatggccatcctgatgtcttcgatcgtcttttccacgttacgaggggcggtgtcagtaaagcatccaaaattatcaatcttagtgaggacatctttgcaggattcaattccacattgcgcgaaggcaatgttactcaccatgaatacatgcaagttggcaaaggaagggatgtaggtctcaatcaaatatctctgtttgaggcaaagatagcaaatggcaatggcgaacaaacgctgagccgtgacatctaccggctaggtcatcgctttgatttcttcaggatgctgtcttgttactacacaacaattggtttctacttcagtacaatgattacagtatggactgtatatgttttcctctacggccggctatatcttgtacttagtggactcgatgaagcactggctactggaaagaggtttgtgcacaatacacctctccaggttgctcttgcgtcagagtcttttgtgcaacttggatttttgatggcgctgcccatgatgatggaaatcggtttggagagaggattcagaactgcattgagtgattttatactgatgcagcttcagttggcctctgttttcttcacattctcgttgggaacaaaaactcactactacggaaggacgttactccatggaggagcggaatacagagccactggacgtgggtttgtggtgttccatgccaaatttgctgagaactatcgactttattcccgtagccattttgtcaagggccttgagctgatgattctactagttgtgtatgaaatatttggtcagtcatatagaggggctataacttacatcttcatcaccgtatccatgtggttcatggtgggcacttggctctttgcaccattcctgttcaatccttctggatttgagtggcagaagattgtggatgactggactgattggcacaagtggatcagcaatcgtggaggtattggtgtggcaccagagaaaagctgggagtcatggtgggaaaaagagcaggagccccttcgttactctgggaagcgtggtactattgttgaaatactgcttgcattgcgtttctttatctatcaatatggactcgtgtatcatctgaatataacgaagaagataaccaaggataaccagagtgtgctggtttattgcttctcatgggttgtaattttcgttgttttactcgttatgaagaccgtatcagtggggaggaggaggttcagtgcagagttccagctagtgttccggctgatcaagggtctcatatttataacttttacagccatcgtggtaatcctaatagcaatccctggcatgacggttctggacatctttgtttgcatccttgccttcatgcccactggatggggtttgctcctggttagtagttgagcatgttttgtagtcctcctctccattgtccaatctactcaattattgttggccgctttgtgctgcagattgcccaagctatcaggcctgtgattcaaaagatcgggctgtgggggtcgatcaaggctcttgcccggggctacgagatcctaatggggcttctcctgttcacgcccattgctttccttgcctggttcccgttcgtgtccgagttccagaccaggatgctgttcaaccaggccttcagcagaggtctgcagatctcccgtatcctgggaggacacaagaaagaccgagggacgcggagcaaggagtagtagggctgctgattgaaggtccgtctatcgggagttatgtcgtcctggagcggtctatcaggttcagagaatattagggtccgtatgtatgtatgtgtgtgtcgcacctagcaccagtagtatgtatgtatgtatgcgtatgtaggttcagagaatattagggtccctatgtatatgtatgtatcaggattgctatggtcttttggattggaagatctgagatttgctggtgcaatggccagtatctgacatccaaatgttgaaactataattaggctctgctaatagttagctaacttacagctaacaattagtttattagctggcttacgactaagtagtcagattaaagttgggatgtcggtcgccccctttaggtttagttaggctcgttccaatgggtggcgagagcgttagtaaccaggattccggatcgatggatggaatcgaggaacgggaacgtggtacgcg

SEQ ID NO: 53729 - DNA, 6277 bp, Zea Mays
ctcccctcccctcccctcccggccgccgccgccgccgccgcgtgttctctctcatctagggtttcatctccatctagtcgagcattcccgtgctggggtggggagtgggagactcgactcgatttgattcgactccatttcgtgctagcgcctagcgctgcagagcgagtgaggtgacgggaatggcggctccggggcggaggacggcggacgtgtcctcgtcctcgccctctccgtcccctgccgccccctccaccggcaggcgcctcctgcgcacgcagaccgtcgccaacctcggcgagtccatcttcgacagcgaggtcgtgccgtcctcgctcgtcgagatcgcgcccatcctccgcgtcgccaacgaggtcgaggttgaaaacccgcgcgtcgcctacctctgtcgcttctacgctttcgagaaggctcaccgcctcgacccgacttccagtggccgtggtgttcgtcagtttaagaccgcacttctgcagaggcttgagagggaaaatgaccccacactgaagggaagggtccacaagagcgatgctagtgagatgcaacgcttctaccgcgaatactacaggaagtacatccaggcactgcaaactgtcgttaataaggatgaccgtgcgcgcctcactaaggcataccaaacggctgctatcttgtttgaggttttgagggctgttaatgattcccagtccgttgaagtcgatcaagcgattttggatacacacatcaaggtcgaagaaaagaaaaagctgtttctaccttataacattctcccgctcgatcctgaaagtactggcgaagccattatgcgatatccagagattcaagctgctgtttatgctcttcgcaatactagaggtctgccatggccaaaggaccaagacaagaagcctgaagagaagaatactggcaaagaccttcttgattggcttcaggctatgtttgggtttcagaaagacaatgtgtccaaccaaagggaacatttgatactgttgcttgcaaatgttcatataaggaaaatacccaaggctgaccaacaaccgaagttggatgacaaagctctggatgatgtaatgaagaagctatttaagaattataagaagtggtgcaagtacctcggccgcaaaagcagtttatggttgccaaccatccagcaggaagtgcagcagcgtaagcttctttatatgggtctctacctgctgatttggggtgaggcggccaacttgagattcatgccagagtgtatttgttacatctaccatcatatggcttttgaactctatggcatgctggctggaaatgtgagcccaatgactggtgaaaatgttagaccagcatatggtggtgacgaagaagcctttttgacgaaagtcgtgactccaatatacaaagttatagagaaggaagctgaaaggagcaagaccatgaaatcaaagcattcacattggagaaactatgatgatctgaatgagtacttttggtcagttgattgtttccggctaggatggcctatgagagccgacgctgactttttcaaaactccaaaagatccttatctgaatcatttgaatggagagaacagatctgcaggcaatgtccattggatgggaaaagttaattttgtggagatacgttcattttggcacatattccgtagttttgacagaatgtggatcttcttaatattgtccttacaggccatgataattattgcttggaatggtggaacaccaagtgatatctttgatgctggcgtatttaagaaggttttgagcatatttatttctgcagcaattttgaagttgggtcaagtgacttacgcgtacacttgggagaatcctactggtcttgcaagaacaataaaaagctggcttggggatggtcagaatcagccatctttgtatatactggcagtagtgatatatatggcaccaaacatacttgcttctatgctatttcttttcccatttatgagaagaatcctagagagttcaaatgttaaggtcataacgatcatgatgtggtggtctcagcctcggttatttgttggtagagggatgcacgaaggtgcattctccctcttcaagtataccatgttctggattattcttttagcaatgaagttgattgtaagcttctatattgagatcaaacctctggtacagccaaccaaagatataatgagagaacctatcaggacattccagtggcacgagtttttccctcatggaactaacaatattggtgttgttatatcactctgggctccaataatcctggtatatttcatggacacccaaatttggtatgcactgttctctactctgattggtggcatctacggggcttatcgtcgtcttggtgagatacgtacattaggaatgttgagatctcgctttgaatctttgcctgaggccttcaatgaacgcttgattccttctgatgcaaataagagtaaaggtcttcgtgctgctttttcgagtagacccaaggcttctggtgacgaaagtgagagagagaaaagagctgcaaggtttgctcaaatgtggaacgccattattacaagtttccgcgaagaggatctcatagacaatagggagaaggatctgctactggttccagactgtaaagaccgtgaacttgatatattccaatggccgcctttcctacttgctagcaagatcccaatagcactggatatggcagcagacagtggtggaaaagaccgtgatctgacgaagaggataaagtcagatccatacttttcctttgctatcagagaatgctatgcttcattcaagaacatcatcaataccttagtatttggtcagcgggagaaagatgtcctagtacagattttcacagttgttgataagcatatagaagaggaaactctgataacgggtctcaatatgaagaaccttcctgcactgagcaagaagtttgttgaattacttgagttactgcaaaaaaacaaggaggaagacttgggtcaggtagttattttgttccaagatatgctcgaggtggtcacgagggatataatggaggaacaggacctgctcgagacgttggattctttacatggtgccaatagtagaaaacatgaaggaattacaccgctagatcagcaagaccagttgtttgctaaagctattaagtttcctgtggtggaatcaaatgcatggactgaaaagataaagaggcttcatcttctgttaactgtgaaagagtctgctatggatgttcctattaatcttgatgctaggcggcggatatcgttcttcgcaaattctctatttatggatatgcccaatgctccaaaagttcggaacatgttgcccttctctatcttgactccttattacaaggaagatgttctgttttcattacaaaatctggaagagcgaaatgaggatggagtttccattcttttctacttgcaaaaaatttacccagatgaatggaaaaatttcctcgaaagggtgggctgcaagaatgaagaggtactccgtgaagatgaacagctggaagagaagctttgtctttgggtgtcatatagggggcagacattaacaagaactgtaagagggatgatgtactatcgaaaagctttggagcttcaggcttttcttgatatggccaacaatgatgatcttatgaaaggctacagagcaatggaagtaatgtctgaggactcaccattaaagactcaatgcaaggctatagccgacatgaagtttacatatgttgtctcatgccaactatatggaattcagaagcgttctaatgagccttgcgcacatgatattttgagactaatgacagagtatccatcacttagggtcgcctatattgatgaagttgaagcacccagcaaagatagaatcaagaagattgaaaaggtttactactcagtgttagtgaaggcttctgttacaaaacctaatgagcctggtcagagccttgatcaggtcatctacaagataaaactaccaggtaatgccattttaggtgaaggaaagccagaaaaccagaaccatgcaataatattcacccgaggcgaatgtctccaaactatagatatgaatcaggagcactatatggaggaggctttgaaaatgagaaatctgctgcaagagtttgagaagaaacatggagtgagacatccatcaatacttggagtcagagaacacatatttacgggcagtgtgtcatcccttgcttggttcatgtcaaatcaggaaactagttttgtgacaattggacaacgagtgcttgccaatccactgagggttcggtttcattatggccatcctgatgtcttcgatcgtcttttccacgttacgaggggcggtgtcagtaaagcatccaaaattatcaatcttagtgaggacatctttgcaggattcaattccacattgcgcgaaggcaatgttactcaccatgaatacatgcaagttggcaaaggaagggatgtaggtctcaatcaaatatctctgtttgaggcaaagatagcaaatggcaatggcgaacaaacgctgagccgtgacatctaccggctaggtcatcgctttgatttcttcaggatgctgtcttgttactacacaacaattggtttctacttcagtacaatgattacagtatggactgtatatgttttcctctacggccggctatatcttgtacttagtggactcgatgaagcactggctactggaaagagcttcagttggcctctgttttcttcacattctcgttgggaacaaaaactcactactacggaaggacgttactccatggaggagcggaatacagagccactggacgtgggtttgtggtgttccatgccaaatttgctgagaactatcgactttattcccgtagccattttgtcaagggccttgagctgatgattctactagttgtgtatgaaatatttggtcagtcatatagaggggctataacttacatcttcatcaccgtatccatgtggttcatggtgggcacttggctctttgcaccattcctgttcaatccttctggatttgagtggcagaagattgtggatgactggactgattggcacaagtggatcagcaatcgtggaggtattggtgtggcaccagagaaaagctgggagtcatggtgggaaaaagagcaggagccccttcgttactctgggaagcgtggtactattgttgaaatactgcttgcattgcgtttctttatctatcaatatggactcgtgtatcatctgaatataacgaagaagataaccaaggataaccagagtgtgctggtttattgcttctcatgggttgtaattttcgttgttttactcgttatgaagaccgtatcagtggggaggaggaggttcagtgcagagttccagctagtgttccggctgatcaagggtctcatatttataacttttacagccatcgtggtaatcctaatagcaatccctggcatgacggttctggacatctttgtttgcatccttgccttcatgcccactggatggggtttgctcctgattgcccaagctatcaggcctgtgattcaaaagatcgggctgtgggggtcgatcaaggctcttgcccggggctacgagatcctaatggggcttctcctgttcacgcccattgctttccttgcctggttcccgttcgtgtccgagttccagaccaggatgctgttcaaccaggccttcagcagaggtctgcagatctcccgtatcctgggaggacacaagaaagaccgagggacgcggagcaaggagtagtagggctgctgattgaaggtccgtctatcgggagttatgtcgtcctggagcggtctatcaggttcagagaatattagggtccgtatgtatgtatgtgtgtgtcgcacctagcaccagtagtatgtatgtatgtatgcgtatgtaggttcagagaatattagggtccctatgtatatgtatgtatcaggattgctatggtcttttggattggaagatctgagatttgctggtgcaatggccagtatctgacatccaaatgttgaaactataattaggctctgctaatagttagctaacttacagctaacaattagtttattagctggcttacgactaagtagtcagattaaagttgggatgtcggtcgccccctttaggtttagttaggctcgttccaatgggtggcgagagcgttagtaaccaggattccggatcgatggatggaatcgaggaacgggaacgtggtacgcg

SEQ ID NO: 53730 - DNA, 6600 bp, Zea Mays
ccctcccctcccctcccctcccctcccggccgccgccgccgccgccgcgtgttctctctcatctagggtttcatctccatctagtcgagcattcccgtgctggggtggggagtgggagactcgactcgatttgattcgactccatttcgtgctagcgcctagcgctgcagagcgagtgaggtgacgggaatggcggctccggggcggaggacggcggacgtgtcctcgtcctcgccctctccgtcccctgccgccccctccaccggcaggcgcctcctgcgcacgcagaccgtcgccaacctcggcgagtccatcttcgacagcgaggtcgtgccgtcctcgctcgtcgagatcgcgcccatcctccgcgtcgccaacgaggtcgaggttgaaaacccgcgcgtcgcctacctctgtcgcttctacgctttcgagaaggctcaccgcctcgacccgacttccagtggccgtggtgttcgtcagtttaagaccgcacttctgcagaggcttgagagggaaaatgaccccacactgaagggaagggtccacaagagcgatgctagtgagatgcaacgcttctaccgcgaatactacaggaagtacatccaggcactgcaaactgtcgttaataaggatgaccgtgcgcgcctcactaaggcataccaaacggctgctatcttgtttgaggttttgagggctgttaatgattcccagtccgttgaagtcgatcaagcgattttggatacacacatcaaggtcgaagaaaagaaaaagctgtttctaccttataacattctcccgctcgatcctgaaagtactggcgaagccattatgcgatatccagagattcaagctgctgtttatgctcttcgcaatactagaggtctgccatggccaaaggaccaagacaagaagcctgaagagaagaatactggcaaagaccttcttgattggcttcaggctatgtttgggtttcagaaagacaatgtgtccaaccaaagggaacatttgatactgttgcttgcaaatgttcatataaggaaaatacccaaggctgaccaacaaccgaagttggatgacaaagctctggatgatgtaatgaagaagctatttaagaattataagaagtggtgcaagtacctcggccgcaaaagcagtttatggttgccaaccatccagcaggaagtgcagcagcgtaagcttctttatatgggtctctacctgctgatttggggtgaggcggccaacttgagattcatgccagagtgtatttgttacatctaccatcatatggcttttgaactctatggcatgctggctggaaatgtgagcccaatgactggtgaaaatgttagaccagcatatggtggtgacgaagaagcctttttgacgaaagtcgtgactccaatatacaaagttatagagaaggaagctgaaaggagcaagaccatgaaatcaaagcattcacattggagaaactatgatgatctgaatgagtacttttggtcagttgattgtttccggctaggatggcctatgagagccgacgctgactttttcaaaactccaaaagatccttatctgaatcatttgaatggagagaacagatctgcaggcaatgtccattggatgggaaaagttaattttgtggagatacgttcattttggcacatattccgtagttttgacagaatgtggatcttcttaatattgtccttacaggccatgataattattgcttggaatggtggaacaccaagtgatatctttgatgctggcgtatttaagaaggttttgagcatatttatttctgcagcaattttgaagttgggtcaagcaatcctagatctcgtatttggctggaaagcaaaaagaagcatgtcatttgcagtcaagctacgatatgtcttgaaattaatatctgctgctgcatgggttgtgattttaccagtgacttacgcgtacacttgggagaatcctactggtcttgcaagaacaataaaaagctggcttggggatggtcagaatcagccatctttgtatatactggcagtagtgatatatatggcaccaaacatacttgcttctatgctatttcttttcccatttatgagaagaatcctagagagttcaaatgttaaggtcataacgatcatgatgtggtggtctcagcctcggttatttgttggtagagggatgcacgaaggtgcattctccctcttcaagtataccatgttctggattattcttttagcaatgaagttgattgtaagcttctatattgagatcaaacctctggtacagccaaccaaagatataatgagagaacctatcaggacattccagtggcacgagtttttccctcatggaactaacaatattggtgttgttatatcactctgggctccaataatcctggtatatttcatggacacccaaatttggtatgcactgttctctactctgattggtggcatctacggggcttatcgtcgtcttgatacgtacattaggaatgttgagatctcgctttgaatctttgcctgaggccttcaatgaacgcttgattccttctgatgcaaataagagtaaaggtcttcgtgctgctttttcgagtagacccaaggcttctggtgacgaaagtgagagagagaaaagagctgcaaggtttgctcaaatgtggaacgccattattacaagtttccgcgaagaggatctcatagacaatagggagaaggatctgctactggttccagactgtaaagaccgtgaacttgatatattccaatggccgcctttcctacttgctagcaagatcccaatagcactggatatggcagcagacagtggtggaaaagaccgtgatctgacgaagaggataaagtcagatccatacttttcctttgctatcagagaatgctatgcttcattcaagaacatcatcaataccttagtatttggtcagcgggagaaagatgtcctagtacagattttcacagttgttgataagcatatagaagaggaaactctgataacgggtctcaatatgaagaaccttcctgcactgagcaagaagtttgttgaattacttgagttactgcaaaaaaacaaggaggaagacttgggtcaggtagttattttgttccaagatatgctcgaggtggtcacgagggatataatggaggaacaggacctgctcgagacgttggattctttacatggtgccaatagtagaaaacatgaaggaattacaccgctagatcagcaagaccagttgtttgctaaagctattaagtttcctgtggtggaatcaaatgcatggactgaaaagataaagaggcttcatcttctgttaactgtgaaagagtctgctatggatgttcctattaatcttgatgctaggcggcggatatcgttcttcgcaaattctctatttatggatatgcccaatgctccaaaagttcggaacatgttgcccttctctatcttgactccttattacaaggaagatgttctgttttcattacaaaatctggaagagcgaaatgaggatggagtttccattcttttctacttgcaaaaaatttacccagatgaatggaaaaatttcctcgaaagggtgggctgcaagaatgaagaggtactccgtgaagatgaacagctggaagagaagctttgtctttgggtgtcatatagggggcagacattaacaagaactgtaagagggatgatgtactatcgaaaagctttggagcttcaggcttttcttgatatggccaacaatgatgatcttatgaaaggctacagagcaatggaagtaatgtctgaggactcaccattaaagactcaatgcaaggctatagccgacatgaagtttacatatgttgtctcatgccaactatatggaattcagaagcgttctaatgagccttgcgcacatgatattttgagactaatgacagagtatccatcacttagggtcgcctatattgatgaagttgaagcacccagcaaagatagaatcaagaagattgaaaaggtttactactcagtgttagtgaaggcttctgttacaaaacctaatgagcctggtcagagccttgatcaggtcatctacaagataaaactaccaggtaatgccattttaggtgaaggaaagccagaaaaccagaaccatgcaataatattcacccgaggcgaatgtctccaaactatagatatgaatcaggctttgaaaatgagaaatctgctgcaagagtttgagaagaaacatggagtgagacatccatcaatacttggagtcagagaacacatatttacgggcagtgtgtcatcccttgcttggttcatgtcaaatcaggaaactagttttgtgacaattggacaacgagtgcttgccaatccactgagggttcggtttcattatggccatcctgatgtcttcgatcgtcttttccacgttacgaggggcggtgtcagtaaagcatccaaaattatcaatcttagtgaggacatctttgcaggattcaattccacattgcgcgaaggcaatgttactcaccatgaatacatgcaagttggcaaaggaagggatgtaggtctcaatcaaatatctctgtttgaggcaaagatagcaaatggcaatggcgaacaaacgctgagccgtgacatctaccggctaggtcatcgctttgatttcttcaggatgctgtcttgttactacacaacaattggtttctacttcagtacaatgattacagtatggactgtatatgttttcctctacggccggctatatcttgtacttagtggactcgatgaagcactggctactggaaagaggtttgtgcacaatacacctctccaggttgctcttgcgtcagagtcttttgtgcaacttggatttttgatggcgctgcccatgatgatggaaatcggtttggagagaggattcagaactgcattgagtgattttatactgatgcagcttcagttggcctctgttttcttcacattctcgttgggaacaaaaactcactactacggaaggacgttactccatggaggagcggaatacagagccactggacgtgggtttgtggtgttccatgccaaatttgctgagaactatcgactttattcccgtagccattttgtcaagggccttgagctgatgattctactagttgtgtatgaaatatttggtcagtcatatagaggggctataacttacatcttcatcaccgtatccatgtggttcatggtgggcacttggctctttgcaccattcctgttcaatccttctggatttgagtggcagaagattgtggatgactggactgattggcacaagtggatcagcaatcgtggaggtattggtgtggcaccagagaaaagctgggagtcatggtgggaaaaagagcaggagccccttcgttactctgggaagcgtggtactattgttgaaatactgcttgcattgcgtttctttatctatcaatatggactcgtgtatcatctgaatataacgaagaagataaccaaggataaccagagtgtgctggtttattgcttctcatgggttgtaattttcgttgttttactcgttatgaagaccgtatcagtggggaggaggaggttcagtgcagagttccagctagtgttccggctgatcaagggtctcatatttataacttttacagccatcgtggtaatcctaatagcaatccctggcatgacggttctggacatctttgtttgcatccttgccttcatgcccactggatggggtttgctcctggttagtagttgagcatgttttgtagtcctcctctccattgtccaatctactcaattattgttggccgctttgtgctgcagattgcccaagctatcaggcctgtgattcaaaagatcgggctgtgggggtcgatcaaggctcttgcccggggctacgagatcctaatggggcttctcctgttcacgcccattgctttccttgcctggttcccgttcgtgtccgagttccagaccaggatgctgttcaaccaggccttcagcagaggtctgcagatctcccgtatcctgggaggacacaagaaagaccgagggacgcggagcaaggagtagtagggctgctgattgaaggtccgtctatcgggagttatgtcgtcctggagcggtctatcaggttcagagaatattagggtccgtatgtatgtatgtgtgtgtcgcacctagcaccagtagtatgtatgtatgtatgcgtatgtaggttcagagaatattagggtccctatgtatatgtatgtatcaggattgctatggtcttttggattggaagatctgagatttgctggtgcaatggccagtatctgacatccaaatgttgaaactataattaggctctgctaatagttagctaacttacagctaacaattagtttattagctggcttacgactaagtagtcagattaaagttgggatgtcggtcgccccctttaggtttagttaggctcgttccaatgggtggcgagagcgttagtaaccaggattccggatcgatggatggaatcgaggaacgggaacgtggtacgcg

SEQ ID NO: 53731 - DNA, 6539 bp, Zea Mays
ctcaactagggtcccaaactaaaagggtaacaaagcctagcaaaacctttccgtccgttactgctatagcgttcatcatcccattccttccccaccaccacctcctgcttctacactactggactgctgctgctgctctccccctcccctcccctcccctcccctcccggccgccgccgccgccgccgcgtgttctctctcatctagggtttcatctccatctagtcgagcattcccgtgctggggtggggagtgggagactcgactcgatttgattcgactccatttcgtgctagcgcctagcgctgcagagcgagtgaggtgacgggaatggcggctccggggcggaggacggcggacgtgtcctcgtcctcgccctctccgtcccctgccgccccctccaccggcaggcgcctcctgcgcacgcagaccgtcgccaacctcggcgagtccatcttcgacagcgaggtcgtgccgtcctcgctcgtcgagatcgcgcccatcctccgcgtcgccaacgaggtcgaggttgaaaacccgcgcgtcgcctacctctgtcgcttctacgctttcgagaaggctcaccgcctcgacccgacttccagtggccgtggtgttcgtcagtttaagaccgcacttctgcagaggcttgagagggaaaatgaccccacactgaagggaagggtccacaagagcgatgctagtgagatgcaacgcttctaccgcgaatactacaggaagtacatccaggcactgcaaactgtcgttaataaggatgaccgtgcgcgcctcactaaggcataccaaacggctgctatcttgtttgaggttttgagggctgttaatgattcccagtccgttgaagtcgatcaagcgattttggatacacacatcaaggtcgaagaaaagaaaaagctgtttctaccttataacattctcccgctcgatcctgaaagtactggcgaagccattatgcgatatccagagattcaagctgctgtttatgctcttcgcaatactagaggtctgccatggccaaaggaccaagacaagaagcctgaagagaagaatactggcaaagaccttcttgattggcttcaggctatgtttgggtttcagaaagacaatgtgtccaaccaaagggaacatttgatactgttgcttgcaaatgttcatataaggaaaatacccaaggctgaccaacaaccgaagttggatgacaaagctctggatgatgtaatgaagaagctatttaagaattataagaagtggtgcaagtacctcggccgcaaaagcagtttatggttgccaaccatccagcaggaagtgcagcagcgtaagcttctttatatgggtctctacctgctgatttggggtgaggcggccaacttgagattcatgccagagtgtatttgttacatctaccatcatatggcttttgaactctatggcatgctggctggaaatgtgagcccaatgactggtgaaaatgttagaccagcatatggtggtgacgaagaagcctttttgacgaaagtcgtgactccaatatacaaagttatagagaaggaagctgaaaggagcaagaccatgaaatcaaagcattcacattggagaaactatgatgatctgaatgagtacttttggtcagttgattgtttccggctaggatggcctatgagagccgacgctgactttttcaaaactccaaaagatccttatctgaatcatttgaatggagagaacagatctgcaggcaatgtccattggatgggaaaagttaattttgtggagatacgttcattttggcacatattccgtagttttgacagaatgtggatcttcttaatattgtccttacaggccatgataattattgcttggaatggtggaacaccaagtgatatctttgatgctggcgtatttaagaaggttttgagcatatttatttctgcagcaattttgaagttgggtcaagcaatcctagatctcgtatttggctggaaagcaaaaagaagcatgtcatttgcagtcaagctacgatatgtcttgaaattaatatctgctgctgcatgggttgtgattttaccagtgacttacgcgtacacttgggagaatcctactggtcttgcaagaacaataaaaagctggcttggggatggtcagaatcagccatctttgtatatactggcagtagtgatatatatggcaccaaacatacttgcttctatgctatttcttttcccatttatgagaagaatcctagagagttcaaatgttaaggtcataacgatcatgatgtggtggtctcagcctcggttatttgttggtagagggatgcacgaaggtgcattctccctcttcaagtataccatgttctggattattcttttagcaatgaagttgattgtaagcttctatattgagatcaaacctctggtacagccaaccaaagatataatgagagaacctatcaggacattccagtggcacgagtttttccctcatggaactaacaatattggtgttgttatatcactctgggctccaataatcctggtatatttcatggacacccaaatttggtatgcactgttctctactctgattggtggcatctacggggcttatcgtcgtcttggtgagatacgtacattaggaatgttgagatctcgctttgaatctttgcctgaggccttcaatgaacgcttgattccttctgatgcaaataagagtaaaggtcttcgtgctgctttttcgagtagacccaaggcttctggtgacgaaagtgagagagagaaaagagctgcaaggtttgctcaaatgtggaacgccattattacaagtttccgcgaagaggatctcatagacaatagggagaaggatctgctactggttccagactgtaaagaccgtgaacttgatatattccaatggccgcctttcctacttgctagcaagatcccaatagcactggatatggcagcagacagtggtggaaaagaccgtgatctgacgaagaggataaagtcagatccatacttttcctttgctatcagagaatgctatgcttcattcaagaacatcatcaataccttagtatttggtcagcgggagaaagatgtcctagtacagattttcacagttgttgataagcatatagaagaggaaactctgataacgggtctcaatatgaagaaccttcctgcactgagcaagaagtttgttgaattacttgagttactgcaaaaaaacaaggaggaagacttgggtcaggtagttattttgttccaagatatgctcgaggtggtcacgagggatataatggaggaacaggacctgctcgagacgttggattctttacatggtgccaatagtagaaaacatgaaggaattacaccgctagatcagcaagaccagttgtttgctaaagctattaagtttcctgtggtggaatcaaatgcatggactgaaaagataaagaggcttcatcttctgttaactgtgaaagagtctgctatggatgttcctattaatcttgatgctaggcggcggatatcgttcttcgcaaattctctatttatggatatgcccaatgctccaaaagttcggaacatgttgcccttctctatcttgactccttattacaaggaagatgttctgttttcattacaaaatctggaagagcgaaatgaggatggagtttccattcttttctacttgcaaaaaatttacccagatgaatggaaaaatttcctcgaaagggtgggctgcaagaatgaagaggtactccgtgaagatgaacagctggaagagaagctttgtctttgggtgtcatatagggggcagacattaacaagaactgtaagagggatgatgtactatcgaaaagctttggagcttcaggcttttcttgatatggccaacaatgatgatcttatgaaaggctacagagcaatggaagtaatgtctgaggactcaccattaaagactcaatgcaaggctatagccgacatgaagtttacatatgttgtctcatgccaactatatggaattcagaagcgttctaatgagccttgcgcacatgatattttgagactaatgacagagtatccatcacttagggtcgcctatattgatgaagttgaagcacccagcaaagatagaatcaagaagattgaaaaggtttactactcagtgttagtgaaggcttctgttacaaaacctaatgagcctggtcagagccttgatcaggtcatctacaagataaaactaccaggtaatgccattttaggtgaaggaaagccagaaaaccagaaccatgcaataatattcacccgaggcgaatgtctccaaactatagatatgaatcaggagcactatatggaggaggctttgaaaatgagaaatctgctgcaagagtttgagaagaaacatggagtgagacatccatcaatacttggagtcagagaacacatatttacgggcagtgtgtcatcccttgcttggttcatgtcaaatcaggaaactagttttgtgacaattggacaacgagtgcttgccaatccactgagggttcggtttcattatggccatcctgatgtcttcgatcgtcttttccacgttacgaggggcggtgtcagtaaagcatccaaaattatcaatcttagtgaggacatctttgcaggattcaattccacattgcgcgaaggcaatgttactcaccatgaatacatgcaagttggcaaaggaagggatgtaggtctcaatcaaatatctctgtttgaggcaaagatagcaaatggcaatggcgaacaaacgctgagccgtgacatctaccggctaggtcatcgctttgatttcttcaggatgctgtcttgttactacacaacaattggtttctacttcagtacaatgattacagtatggactgtatatgttttcctctacggccggctatatcttgtacttagtggactcgatgaagcactggctactggaaagagcttcagttggcctctgttttcttcacattctcgttgggaacaaaaactcactactacggaaggacgttactccatggaggagcggaatacagagccactggacgtgggtttgtggtgttccatgccaaatttgctgagaactatcgactttattcccgtagccattttgtcaagggccttgagctgatgattctactagttgtgtatgaaatatttggtcagtcatatagaggggctataacttacatcttcatcaccgtatccatgtggttcatggtgggcacttggctctttgcaccattcctgttcaatccttctggatttgagtggcagaagattgtggatgactggactgattggcacaagtggatcagcaatcgtggaggtattggtgtggcaccagagaaaagctgggagtcatggtgggaaaaagagcaggagccccttcgttactctgggaagcgtggtactattgttgaaatactgcttgcattgcgtttctttatctatcaatatggactcgtgtatcatctgaatataacgaagaagataaccaaggataaccagagtgtgctggtttattgcttctcatgggttgtaattttcgttgttttactcgttatgaagaccgtatcagtggggaggaggaggttcagtgcagagttccagctagtgttccggctgatcaagggtctcatatttataacttttacagccatcgtggtaatcctaatagcaatccctggcatgacggttctggacatctttgtttgcatccttgccttcatgcccactggatggggtttgctcctgattgcccaagctatcaggcctgtgattcaaaagatcgggctgtgggggtcgatcaaggctcttgcccggggctacgagatcctaatggggcttctcctgttcacgcccattgctttccttgcctggttcccgttcgtgtccgagttccagaccaggatgctgttcaaccaggccttcagcagaggtctgcagatctcccgtatcctgggaggacacaagaaagaccgagggacgcggagcaaggagtagtagggctgctgattgaaggtccgtctatcgggagttatgtcgtcctggagcggtctatcaggttcagagaatattagggtccgtatgtatgtatgtgtgtgtcgcacctagcaccagtagtatgtatgtatgtatgcgtatgtaggttcagagaatattagggtccctatgtatatgtatgtatcaggattgctatggtcttttggattggaagatctgagatttgctggtgcaatggccagtatctgacatccaaatgttgaaactataattaggctctgctaatagttagctaacttacagctaacaattagtttattagctggcttacgactaagtagtcagattaaagttgggatgtcggtcgccccctttaggtttagttaggctcgttccaatgggtggcgagagcgttagtaaccaggattccggatcgatggatggaatcgaggaacgggaacgtggtacgcg

SEQ ID NO: 53732 - DNA, 6711 bp, Zea Mays
tcactgtcttcctcgccggccgtcgctctccgatcctcccgggctcttctctaaaattgggtgctgctctcctccgccttccatggcgtccgccggttgagccacctgacgcgcgctccaccaaccgggcggcttctgttttttgtctggactggaatcatcgttggtctcatcgcatggtgtcaaaggaagctgagccgttccctgacagcgacagatccaaaggctaggctttcgcagcttcgtcctccctcccttccttttcccccttgtatttggaagggaagggaaaggaagggaagggaggtcgggtcctctccccctttcgacagcgtcagaaacaggggagggggaggaaggggaggaggaaggaaggtggtagccggcgacgtggtggcattcgccacctttagcctgggctcaatcgcctccctcttcctctcttcctccgtcctgcttgccccaaccttcgttctacagtacaggggccttatacctcagggcaagcaggggcacctccatggccgcggtgctcgactccttcgtcaaacggtgcacagcatcactggaagattttgcagaccaggaggcctgcgccgccctcggcatcgtggacgatgtcaggggcctcctggccacgctgttgcgcatcgacgccatcatctcccacgaggagcggaggagggtccttagcgccaaaactgatgcgtgggtggtgcaggtgaaagatgccatgtacgagatcgacgacgtcctcgatgtctgcatgattgagggcgcaaagatcctcgctgctggcggcccacccacgcccaaggtccgatgcttcttctgcttcaagctttcagggccccggaagttccgacatgagatcggcttcaccattagggacattgatctcaggctcagggaagtagaggaggaaatgcctaggcttcctgctggatcagctcactctgatgatgcaaaaagggattggttcagtcgtgacgtctgtaagaactgctcagacgcgatgaagccccaggcagttgggtcgcaggtccaaaaggctgtgggtggccttgtgccaaggatgcttagagagggcaagaagaaggtggatgtcttcgccatcgttggtgcggtggggattggcaagactacacttgctagggagatctacaatgatgacaggatgactgaaaatttccccatttgtgtgtgggttgacatgtccaagaatttatcggagctagatttccttaaaacgatcatcaggggtgctggtgccaatgttggggttacagaaaacaaggaggaactcctcatcctcctcgcttctgccctttccaaaaggttcctccttgtcctggatgacttggagagcccgagcatatgggacaatctgctcaaagattcattgggagatggtgttgtcagaggaagaatactgatcacaactcggaacgaggaagtggcaacaagcatgaaggcaactatccaccatgttgacaaaatggaccctgagagtgcctgggcattattgtgcaatcaagttgatgcagaatgcaattcggaagagcttgcaacattaaaggatgttgggattaagattgcagagaaatgtgatggccatcctctagcaatcaaggtcattgcaggtatcctaaggtcaagaggcaacagcaaggctgaatgggagatggttctgaacaatgattcttggtccatgtgcccaatccttccagaagtaccacaagccgtgtatgttagttatgtcgatctttcttctcaactgaaggagtgtttccttcattgctctctgtatccagaagaattccctattcagcgctttgctcttgtgcggcgttggattgctgaaggaattgtaaatgccagagacaaaaaactgcttgaagaatcagctcaagagtattatgtagaattgataagcagaaacttactacagcctgatcctgaaagtgttgagcgatgctggataacacaccatcttctccgctctctagcccgcgctttgatagcagatgagagtatcttaatttatggccagcagaaactgaacacctcattgtcaaagccccggcatctcacattgtgtagcatggaaaacagcttggatggtccaatttcgctgaagcagcagatgggtttaaggtcgctgatgctcttcaaaagcccaaatgtcagagcaatagatcttctcatggagtcagcttcatgcttgcgtgtattagatttgagcaagacagcagtggaggccatcccgaaatccattggtaacttggtacatttaaggtacctcaatcttgatggggctcaggtcagagacataccttcttccattggatttctcataaacttgcagaccttgagccttcaaggttgccaaagcttgcagagacttcctcggtccatcagggcattgctagagcttagatgcctttgtctctatggaacttccctaagctatgtaccaaagggtgttggtaaattgaagcatctcaatcatctagatggtctaatcattggtcatgacaacaatgcgcctgagggttgtgacttagatgaccttaaagcattgtcagaactaaggcaccttcatatagagagtttggatagggctacttccggtgcgtctgcactcgcaaacaagccattcctagaggatctgtacctctctgagcaagcaccagcaatagaaaatcaggaggatctggaggacaaagatgaaacagaaaaagaagagaaggaaggacaggaaagaagcaatggccaatgcagaggagatgagtcaaccaaagctagtgaaaagatatggaatgagctcaccccaccccagagcatcaagaagctggtaatcaagaactacaaaggcgtaaagtttccaaaatggataaaaggtcccaagctaggagactccttccccagccttgtgtttttggatcttgaaaactgcatgtcatgtactaaactgccttcacttggcctcctgagtcaactccagtccctgcaaatctcaaatgcagactcagtcatcaccatcggttcagaattccttgggaccactgtactttcatcagccactccattccccaagcttgaggttttaaagctcagaaacatgaagaaacttgaagagtggtctttaactgtggaggagagccaggtagtattaccttgtttgaagtcactgcagatacagtggtgtcctaaactgaaagctctaccagaaggcctgaagcatgtagcgctgtgtgaacttcatgtggagggtgcacatagcctaactgaaatcaaggacctgccaaaactatctgacgagctccatctcaaagataataaggtgctacagaggatctccaacctgcccatgcttcgttccctcattatcgatgactgctcaaagttgaagcatgtggcaggtcttgatgcgctgcagcacctcagacttgtctttcctccgtccaccgagacattttatttcgaagagctagtaattttctggagcgttgccttcccacggtggctggagctactgattcagaagtgcaaaggcctgcgacggtttgagttgcagtgtggtctgtcattgctcaggagctgcctcgacggtggcaagaactggcatctcgtgcagcagatccccgaggtgcgcatcataagctgcgatggcaagagatactttcggtataacaagagccgccgcatctacgaaactaatgcacagtcagaagaatgaagccatttctgaaaaccttggcacgacactggtttgttttgggtcagccacacgtttcagttgtcgctgtccctactttgttccgggagtattgagagcttgtgttctgttcacgattgattcagccaccatggcctccaagctgagtttcaagagggcagacagcatcgcggaaagcatgcccgatgcgctgaggcagagccggtaccagatgaagaaatgcttccataggtatgtttccaagggaaggaggctcttgaagaaccagcagctcatagaggagctggacaaatcactggatgacaaagtcgagagggaaaagcttgttgaaggcttcctgggttacattatttgttccacgcaggaagcagtggtgctaccgccctatgtcgcatttgctgtcaggatgaatcctggcatctgggagtatgtcaaagttcattctgatgacctgtcggtcgaaggaatcacaccctctgagtacctcaagttcaaggagacattatatgacgagaactgggccaaggatgacaactcactggaagtcgatttcggtgctcttgacctctcaacaccccatctgacactgccatcgtccataggaaacgggctccagtttgtgtccaaattcatgtcctccaagctgggcgacaagcctgaaattagcatgaagccgttgctggactacttgctttcgctaaactaccgtggcgagaagctgatggttaacgacaccatcgatactgtgaacaagcttcagacagcgctgctacttgcggaggtatttgttagcgggttgccaagatacaccccattcctgaagtttgagcaaaggtttcaagagtgggggttggagaaggggtggggtgacaatgctgaaaggtgcaaagagacgctgaattgcctctctgaagtgctacaggcgccagaccctatcaacatggagaagttcttcagcagagttccatccatattcaacatagttgtcttctccatccacggctactttggccaagagaaggttcttggcttgccagacaccggtggccaggtggtctacatcctggaccaagtcagggcccttgaagaggagttgctgcaaagaatcaagctgcagggtctgaacgtgacaccaaagattcttgtgctgactaggctgataccagatgccaagggtacaaaatgcaatgtggagctcgagccagttgaaaatacaaaacattcccacatacttcgtgtgccattcaagactgaaaacggcaaggagttgcgccagtgggtgtcccggtttgacatctacccttacctagagagatatgcccaggattcttgtgccaaaattcttgacattttggagggcaagccggacctgatcatcggcaactacactgatggcaacttagtggcgtccctcatgtcaagcaaactaggggtcactcaggggacaatcgcgcacgctctagagaagacaaagtatgaagattcagatgtgaagtggagagatctggatcagaagtaccatttctcctgccaattcactgcagatatgattgccatgaacactagtgactttatcatcactagcacataccaagaaatcgctggaagcaaggagaagcctgggcagtacgagcaccactacgcattcacaatgccggggctctgtcgctacgccacgggcatcaatgtcttcgatccaaagttcaacatcgccgcacccggtgcagaccagtccatctacttccccttcacgcagaagcagaagcggctgacagatttgcacccacagattgaggagctgctctacagcaagcaggacaccggtgaacacagagggtatctggcggacagaaacaagcctatcatcttctcgatggcaaggctggacaaggtgaagaatatcaccgggctagtggagtggtacggccagaacaagaagctgagggacctggtaaaccttgtcgtcgtcgcgggcctgctggaagcgtcgcagtccaaggaccgggaggagattgaagagatcaacaggatgcacagcctgatcgacaagtatcagctgaaaggacagattcgctggatcaaggcacagactgaccgtgtccgcaacggtgagctgtaccgttgcattgcagacaccaggggtgcatttgttcagcctgcactctatgaagcgttcgggctgacggtcattgaggcgatgaactgcgggctgacaacctttgcgacgaaccagggagggccagcggagatcatcgtggacggtgtctccggtttccacataaacccaacgaatggcagggaggcaagcaacaagatcgccgagttcttccagaagtgcaaggaagacccaagctactggaacaaggtgtccactgctgggctccagcgcatctacgagtgctacacatggaagatctatgcaactaaagtcctgaacatgggctcgacgtatggcttctggaagactctgaacaaggaggagagagtggccaagcagcgctacctgcagatgttctacaacctccagttcaggaacctggcaaagactgtcccaaggctgtttgaacatcctcctccgcaagccccagcaggcgcagggcctagtacgatgacggtaacgaggccgaaagaaagaaagacacagactaggatccagaggatcatgaccagcttgatggggcagaagcctgctacttctgaataataataatacattagagccagggagacgagatgggtgtgcatgcgtgatctcctcaagccaaggtcctggcggctgcacatatattcattcattccattgagaccggaccagatcagtgtttattgtgaaatttgttgtggtgttgcatgtgtggttttcatctgtgtactgttgattggagagctggatgatgtaaagagagtgaaagtgcacatggttacaattgataataataatttatgacaaggattgaggaatgttgtgt

SEQ ID NO: 53733 - DNA, 7020 bp, Zea Mays
tcactgtcttcctcgccggccgtcgctctccgatcctcccgggctcttctctaaaattgggtgctgctctcctccgccttccatggcgtccgccggttgagccacctgacgcgcggtgcccttatcgaagccaatctcagccgtttatccacttcttcctcagttcctctccttgccaaaaataacgcatcctccgtcccgttccagctccaccaaccgggcggcttctgttttttgtctggactggaatcatcgttggtctcatcgcatggtgtcaaaggaagctgagccgttccctgacagcgacagatccaaaggctaggctttcgcagcttcgtcctccctcccttccttttcccccttgtatttggaagggaagggaaaggaagggaagggaggtcgggtcctctccccctttcgacagcgtcagaaacaggggagggggaggaaggggaggaggaaggaaggtggtagccggcgacgtggtggcattcgccacctttagcctgggctcaatcgcctccctcttcctctcttcctccgtcctgcttgccccaaccttcgttctacagtacaggggccttatacctcagggcaagcaggggcacctccatggccgcggtgctcgactccttcgtcaaacggtgcacagcatcactggaagattttgcagaccaggaggcctgcgccgccctcggcatcgtggacgatgtcaggggcctcctggccacgctgttgcgcatcgacgccatcatctcccacgaggagcggaggagggtccttagcgccaaaactgatgcgtgggtggtgcaggtgaaagatgccatgtacgagatcgacgacgtcctcgatgtctgcatgattgagggcgcaaagatcctcgctgctggcggcccacccacgcccaaggtccgatgcttcttctgcttcaagctttcagggccccggaagttccgacatgagatcggcttcaccattagggacattgatctcaggctcagggaagtagaggaggaaatgcctaggcttcctgctggatcagctcactctgatgatgcaaaaagggattggttcagtcgtgacgtctgtaagaactgctcagacgcgatgaagccccaggcagttgggtcgcaggtccaaaaggctgtgggtggccttgtgccaaggatgcttagagagggcaagaagaaggtggatgtcttcgccatcgttggtgcggtggggattggcaagactacacttgctagggagatctacaatgatgacaggatgactgaaaatttccccatttgtgtgtgggttgacatgtccaagaatttatcggagctagatttccttaaaacgatcatcaggggtgctggtgccaatgttggggttacagaaaacaaggaggaactcctcatcctcctcgcttctgccctttccaaaaggttcctccttgtcctggatgacttggagagcccgagcatatgggacaatctgctcaaagattcattgggagatggtgttgtcagaggaagaatactgatcacaactcggaacgaggaagtggcaacaagcatgaaggcaactatccaccatgttgacaaaatggaccctgagagtgcctgggcattattgtgcaatcaagttgatgcagaatgcaattcggaagagcttgcaacattaaaggatgttgggattaagattgcagagaaatgtgatggccatcctctagcaatcaaggtcattgcaggtatcctaaggtcaagaggcaacagcaaggctgaatgggagatggttctgaacaatgattcttggtccatgtgcccaatccttccagaagtaccacaagccgtgtatgttagttatgtcgatctttcttctcaactgaaggagtgtttccttcattgctctctgtatccagaagaattccctattcagcgctttgctcttgtgcggcgttggattgctgaaggaattgtaaatgccagagacaaaaaactgcttgaagaatcagctcaagagtattatgtagaattgataagcagaaacttactacagcctgatcctgaaagtgttgagcgatgctggataacacaccatcttctccgctctctagcccgcgctttgatagcagatgagagtatcttaatttatggccagcagaaactgaacacctcattgtcaaagccccggcatctcacattgtgtagcatggaaaacagcttggatggtccaatttcgctgaagcagcagatgggtttaaggtcgctgatgctcttcaaaagcccaaatgtcagagcaatagatcttctcatggagtcagcttcatgcttgcgtgtattagatttgagcaagacagcagtggaggccatcccgaaatccattggtaacttggtacatttaaggtacctcaatcttgatggggctcaggtcagagacataccttcttccattggatttctcataaacttgcagaccttgagccttcaaggttgccaaagcttgcagagacttcctcggtccatcagggcattgctagagcttagatgcctttgtctctatggaacttccctaagctatgtaccaaagggtgttggtaaattgaagcatctcaatcatctagatggtctaatcattggtcatgacaacaatgcgcctgagggttgtgacttagatgaccttaaagcattgtcagaactaaggcaccttcatatagagagtttggatagggctacttccggtgcgtctgcactcgcaaacaagccattcctagaggatctgtacctctctgagcaagcaccagcaatagaaaatcaggaggatctggaggacaaagatgaaacagaaaaagaagagaaggaaggacaggaaagaagcaatggccaatgcagaggagatgagtcaaccaaagctagtgaaaagatatggaatgagctcaccccaccccagagcatcaagaagctggtaatcaagaactacaaaggcgtaaagtttccaaaatggataaaaggtcccaagctaggagactccttccccagccttgtgtttttggatcttgaaaactgcatgtcatgtactaaactgccttcacttggcctcctgagtcaactccagtccctgcaaatctcaaatgcagactcagtcatcaccatcggttcagaattccttgggaccactgtactttcatcagccactccattccccaagcttgaggttttaaagctcagaaacatgaagaaacttgaagagtggtctttaactgtggaggagagccaggtagtattaccttgtttgaagtcactgcagatacagtggtgtcctaaactgaaagctctaccagaaggcctgaagcatgtagcgctgtgtgaacttcatgtggagggtgcacatagcctaactgaaatcaaggacctgccaaaactatctgacgagctccatctcaaagataataaggtcttgatgcgctgcagcacctcagacttgtctttcctccgtccaccgagacattttatttcgaagagctagtaattttctggagcgttgccttcccacggtggctggagctactgattcagaagtgcaaaggcctgcgacggtttgagttgcagtgtggtctgtcattgctcaggagctgcctcgacggtggcaagaactggcatctcgtgcagcagatccccgaggtgcgcatcataagctgcgatggcaagagatactttcggtataacaagagccgccgcatctacgaaactaatgcacagtcagaagaatgaagccatttctgaaaaccttggcacgacactggtttgttttgggtcagccacacgtttcagttgtcgctgtccctactttgttccgggagtattgagagcttgtgttctgttcacgattgattcaggtcagggatgtgttcgttggttttcatgcctttcttgccttggatgtttcttcagcataagttctcccaacccaagcaaatcaatgtgctttctcccctgcgcgccatctcccatttaattttccagctggcgtccacacaaagaaaactctgccagtaggccaaagttttgtttcatcacgctcccttccttctataaattgttgcccatggacattcagacccagccagtcacagcattcttcttcctccgcacataaaccataacattcttctccaccttgtttctttccaagccaccatggcctccaagctgagtttcaagagggcagacagcatcgcggaaagcatgcccgatgcgctgaggcagagccggtaccagatgaagaaatgcttccataggtatgtttccaagggaaggaggctcttgaagaaccagcagctcatagaggagctggacaaatcactggatgacaaagtcgagagggaaaagcttgttgaaggcttcctgggttacattatttgttccacgcaggaagcagtggtgctaccgccctatgtcgcatttgctgtcaggatgaatcctggcatctgggagtatgtcaaagttcattctgatgacctgtcggtcgaaggaatcacaccctctgagtacctcaagttcaaggagacattatatgacgagaactgggccaaggatgacaactcactggaagtcgatttcggtgctcttgacctctcaacaccccatctgacactgccatcgtccataggaaacgggctccagtttgtgtccaaattcatgtcctccaagctgggcgacaagcctgaaattagcatgaagccgttgctggactacttgctttcgctaaactaccgtggcgagaagctgatggttaacgacaccatcgatactgtgaacaagcttcagacagcgctgctacttgcggaggtatttgttagcgggttgccaagatacaccccattcctgaagtttgagcaaaggtttcaagagtgggggttggagaaggggtggggtgacaatgctgaaaggtgcaaagagacgctgaattgcctctctgaagtgctacaggcgccagaccctatcaacatggagaagttcttcagcagagttccatccatattcaacatagttgtcttctccatccacggctactttggccaagagaaggttcttggcttgccagacaccggtggccaggtggtctacatcctggaccaagtcagggcccttgaagaggagttgctgcaaagaatcaagctgcagggtctgaacgtgacaccaaagattcttgtgctgactaggctgataccagatgccaagggtacaaaatgcaatgtggagctcgagccagttgaaaatacaaaacattcccacatacttcgtgtgccattcaagactgaaaacggcaaggagttgcgccagtgggtgtcccggtttgacatctacccttacctagagagatatgcccaggattcttgtgccaaaattcttgacattttggagggcaagccggacctgatcatcggcaactacactgatggcaacttagtggcgtccctcatgtcaagcaaactaggggtcactcaggggacaatcgcgcacgctctagagaagacaaagtatgaagattcagatgtgaagtggagagatctggatcagaagtaccatttctcctgccaattcactgcagatatgattgccatgaacactagtgactttatcatcactagcacataccaagaaatcgctggaagcaaggagaagcctgggcagtacgagcaccactacgcattcacaatgccggggctctgtcgctacgccacgggcatcaatgtcttcgatccaaagttcaacatcgccgcacccggtgcagaccagtccatctacttccccttcacgcagaagcagaagcggctgacagatttgcacccacagattgaggagctgctctacagcaagcaggacaccggtgaacacagagggtatctggcggacagaaacaagcctatcatcttctcgatggcaaggctggacaaggtgaagaatatcaccgggctagtggagtggtacggccagaacaagaagctgagggacctggtaaaccttgtcgtcgtcgcgggcctgctggaagcgtcgcagtccaaggaccgggaggagattgaagagatcaacaggatgcacagcctgatcgacaagtatcagctgaaaggacagattcgctggatcaaggcacagactgaccgtgtccgcaacggtgagctgtaccgttgcattgcagacaccaggggtgcatttgttcagcctgcactctatgaagcgttcgggctgacggtcattgaggcgatgaactgcgggctgacaacctttgcgacgaaccagggagggccagcggagatcatcgtggacggtgtctccggtttccacataaacccaacgaatggcagggaggcaagcaacaagatcgccgagttcttccagaagtgcaaggaagacccaagctactggaacaaggtgtccactgctgggctccagcgcatctacgagtgctacacatggaagatctatgcaactaaagtcctgaacatgggctcgacgtatggcttctggaagactctgaacaaggaggagagagtggccaagcagcgctacctgcagatgttctacaacctccagttcaggaacctggcaaagactgtcccaaggctgtttgaacatcctcctccgcaagccccagcaggcgcagggcctagtacgatgacggtaacgaggccgaaagaaagaaagacacagactaggatccagaggatcatgaccagcttgatggggcagaagcctgctacttctgaataataataatacattagagccagggagacgagatgggtgtgcatgcgtgatctcctcaagccaaggtcctggcggctgcacatatattcattcattccattgagaccggaccagatcagtgtttattgtgaaatttgttgtggtgttgcatgtgtggttttcatctgtgtactgttgattggagagctggatgatgtaaagagagtgaaagtgcacatggttacaattgataataataatttatgacaaggattgaggaatgttgtgt

SEQ ID NO: 53734 - DNA, 3429 bp, Zea Mays
cttgctcttcactgtcttcctcgccggccgtcgctctccgatcctcccgggctcttctctaaaattgggtgctgctctcctccgccttccatggcgtccgccggttgagccacctgacgcgcggtgcccttatcgaagccaatctcagccgtttatccacttcttcctcagttcctctccttgccaaaaataacgcatcctccgtcccgttccagctccaccaaccgggcggcttctgttttttgtctggactggaatcatcgttggtctcatcgcatggtgtcaaaggaagctgagccgttccctgacagcgacagatccaaaggctaggctttcgcagcttcgtcctccctcccttccttttcccccttgtatttggaagggaagggaaaggaagggaagggaggtcgggtcctctccccctttcgacagcgtcagaaacaggggagggggaggaaggggaggaggaaggaaggtggtagccggcgacgtggtggcattcgccacctttagcctgggctcaatcgcctccctcttcctctcttcctccgtcctgcttgccccaaccttcgttctacagtacagccaccatggcctccaagctgagtttcaagagggcagacagcatcgcggaaagcatgcccgatgcgctgaggcagagccggtaccagatgaagaaatgcttccataggtatgtttccaagggaaggaggctcttgaagaaccagcagctcatagaggagctggacaaatcactggatgacaaagtcgagagggaaaagcttgttgaaggcttcctgggttacattatttgttccacgcaggaagcagtggtgctaccgccctatgtcgcatttgctgtcaggatgaatcctggcatctgggagtatgtcaaagttcattctgatgacctgtcggtcgaaggaatcacaccctctgagtacctcaagttcaaggagacattatatgacgagaactgggccaaggatgacaactcactggaagtcgatttcggtgctcttgacctctcaacaccccatctgacactgccatcgtccataggaaacgggctccagtttgtgtccaaattcatgtcctccaagctgggcgacaagcctgaaattagcatgaagccgttgctggactacttgctttcgctaaactaccgtggcgagaagctgatggttaacgacaccatcgatactgtgaacaagcttcagacagcgctgctacttgcggaggtatttgttagcgggttgccaagatacaccccattcctgaagtttgagcaaaggtttcaagagtgggggttggagaaggggtggggtgacaatgctgaaaggtgcaaagagacgctgaattgcctctctgaagtgctacaggcgccagaccctatcaacatggagaagttcttcagcagagttccatccatattcaacatagttgtcttctccatccacggctactttggccaagagaaggttcttggcttgccagacaccggtggccaggtggtctacatcctggaccaagtcagggcccttgaagaggagttgctgcaaagaatcaagctgcagggtctgaacgtgacaccaaagattcttgtgctgactaggctgataccagatgccaagggtacaaaatgcaatgtggagctcgagccagttgaaaatacaaaacattcccacatacttcgtgtgccattcaagactgaaaacggcaaggagttgcgccagtgggtgtcccggtttgacatctacccttacctagagagatatgcccaggattcttgtgccaaaattcttgacattttggagggcaagccggacctgatcatcggcaactacactgatggcaacttagtggcgtccctcatgtcaagcaaactaggggtcactcaggggacaatcgcgcacgctctagagaagacaaagtatgaagattcagatgtgaagtggagagatctggatcagaagtaccatttctcctgccaattcactgcagatatgattgccatgaacactagtgactttatcatcactagcacataccaagaaatcgctggaagcaaggagaagcctgggcagtacgagcaccactacgcattcacaatgccggggctctgtcgctacgccacgggcatcaatgtcttcgatccaaagttcaacatcgccgcacccggtgcagaccagtccatctacttccccttcacgcagaagcagaagcggctgacagatttgcacccacagattgaggagctgctctacagcaagcaggacaccggtgaacacagagggtatctggcggacagaaacaagcctatcatcttctcgatggcaaggctggacaaggtgaagaatatcaccgggctagtggagtggtacggccagaacaagaagctgagggacctggtaaaccttgtcgtcgtcgcgggcctgctggaagcgtcgcagtccaaggaccgggaggagattgaagagatcaacaggatgcacagcctgatcgacaagtatcagctgaaaggacagattcgctggatcaaggcacagactgaccgtgtccgcaacggtgagctgtaccgttgcattgcagacaccaggggtgcatttgttcagcctgcactctatgaagcgttcgggctgacggtcattgaggcgatgaactgcgggctgacaacctttgcgacgaaccagggagggccagcggagatcatcgtggacggtgtctccggtttccacataaacccaacgaatggcagggaggcaagcaacaagatcgccgagttcttccagaagtgcaaggaagacccaagctactggaacaaggtgtccactgctgggctccagcgcatctacgagtgctacacatggaagatctatgcaactaaagtcctgaacatgggctcgacgtatggcttctggaagactctgaacaaggaggagagagtggccaagcagcgctacctgcagatgttctacaacctccagttcaggaacctggcaaagactgtcccaaggctgtttgaacatcctcctccgcaagccccagcaggcgcagggcctagtacgatgacggtaacgaggccgaaagaaagaaagacacagactaggatccagaggatcatgaccagcttgatggggcagaagcctgctacttctgaataataataatacattagagccagggagacgagatgggtgtgcatgcgtgatctcctcaagccaaggtcctggcggctgcacatatattcattcattccattgagaccggaccagatcagtgtttattgtgaaatttgttgtggtgttgcatgtgtggttttcatctgtgtactgttgattggagagctggatgatgtaaagagagtgaaagtgcacatggttacaattgataataataatttatgacaaggattgaggaatgttgtgt

SEQ ID NO: 53735 - DNA, 4042 bp, Zea Mays
tcactgtcttcctcgccggccgtcgctctccgatcctcccgggctcttctctaaaattgggtgctgctctcctccgccttccatggcgtccgccggttgagccacctgacgcgcgctccaccaaccgggcggcttctgttttttgtctggactggaatcatcgttggtctcatcgcatggtgtcaaaggaagctgagccgttccctgacagcgacagatccaaaggctaggctttcgcagcttcgtcctccctcccttccttttcccccttgtatttggaagggaagggaaaggaagggaagggaggtcgggtcctctccccctttcgacagcgtcagaaacaggggagggggaggaaggggaggaggaaggaaggtggtagccggcgacgtggtggcattcgccacctttagcctgggctcaatcgcctccctcttcctctcttcctccgtcctgcttgccccaaccttcgttctacagtacaggggccttatacctcagggcaagcaggggcacctccatggccgcggtgctcgactccttcgtcaaacggtgcacagcatcactggaagattttgcagaccaggaggcctgcgccgccctcggcatcgtggacgatgtcaggggcctcctggccacgctgttgcgcatcgacgccatcatctcccacgaggagcggaggagggtccttagcgccaaaactgatgcgtgggtggtgcaggtgaaagatgccatgtacgagatcgacgacgtcctcgatgtctgcatgattgagggcgcaaagatcctcgctgctggcggcccacccacgcccaaggtccgatgcttcttctgcttcaagctttcagggccccggaagttccgacatgagatcggcttcaccattagggacattgatctcaggctcagggaagtagaggaggaaatgcctaggcttcctgctggatcagctcactctgatgatgcaaaaagggattggttcagtcgtgacgtctgtaagaactgctcagacgcgatgaagccccaggcagttgggtcgcaggtccaaaaggctgtgggtggccttgtgccaaggatgcttagagagggcaagaagaaggtggatgtcttcgccatcgttggtgcggtggggattggcaagactacacttgctagggagatctacaatgatgacaggatgactgaaaatttccccatttgtgtgtgggttgacatgtccaagaatttatcggagctagatttccttaaaacgatcatcaggggtgctggtgccaatgttggggttacagaaaacaaggaggaactcctcatcctcctcgcttctgccctttccaaaaggttcctccttgtcctggatgacttggagagcccgagcatatgggacaatctgctcaaagattcattgggagatggtgttgtcagaggaagaatactgatcacaactcggaacgaggaagtggcaacaagcatgaaggcaactatccaccatgttgacaaaatggaccctgagagtgcctgggcattattgtgcaatcaagttgatgcagaatgcaattcggaagagcttgcaacattaaaggatgttgggattaagattgcagagaaatgtgatggccatcctctagcaatcaaggtcattgcaggtatcctaaggtcaagaggcaacagcaaggctgaatgggagatggttctgaacaatgattcttggtccatgtgcccaatccttccagaagtaccacaagccgtgtatgttagttatgtcgatctttcttctcaactgaaggagtgtttccttcattgctctctgtatccagaagaattccctattcagcgctttgctcttgtgcggcgttggattgctgaaggaattgtaaatgccagagacaaaaaactgcttgaagaatcagctcaagagtattatgtagaattgataagcagaaacttactacagcctgatcctgaaagtgttgagcgatgctggataacacaccatcttctccgctctctagcccgcgctttgatagcagatgagagtatcttaatttatggccagcagaaactgaacacctcattgtcaaagccccggcatctcacattgtgtagcatggaaaacagcttggatggtccaatttcgctgaagcagcagatgggtttaaggtcgctgatgctcttcaaaagcccaaatgtcagagcaatagatcttctcatggagtcagcttcatgcttgcgtgtattagatttgagcaagacagcagtggaggccatcccgaaatccattggtaacttggtacatttaaggtacctcaatcttgatggggctcaggtcagagacataccttcttccattggatttctcataaacttgcagaccttgagccttcaaggttgccaaagcttgcagagacttcctcggtccatcagggcattgctagagcttagatgcctttgtctctatggaacttccctaagctatgtaccaaagggtgttggtaaattgaagcatctcaatcatctagatggtctaatcattggtcatgacaacaatgcgcctgagggttgtgacttagatgaccttaaagcattgtcagaactaaggcaccttcatatagagagtttggatagggctacttccggtgcgtctgcactcgcaaacaagccattcctagaggatctgtacctctctgagcaagcaccagcaatagaaaatcaggaggatctggaggacaaagatgaaacagaaaaagaagagaaggaaggacaggaaagaagcaatggccaatgcagaggagatgagtcaaccaaagctagtgaaaagatatggaatgagctcaccccaccccagagcatcaagaagctggtaatcaagaactacaaaggcgtaaagtttccaaaatggataaaaggtcccaagctaggagactccttccccagccttgtgtttttggatcttgaaaactgcatgtcatgtactaaactgccttcacttggcctcctgagtcaactccagtccctgcaaatctcaaatgcagactcagtcatcaccatcggttcagaattccttgggaccactgtactttcatcagccactccattccccaagcttgaggttttaaagctcagaaacatgaagaaacttgaagagtggtctttaactgtggaggagagccaggtagtattaccttgtttgaagtcactgcagatacagtggtgtcctaaactgaaagctctaccagaaggcctgaagcatgtagcgctgtgtgaacttcatgtggagggtgcacatagcctaactgaaatcaaggacctgccaaaactatctgacgagctccatctcaaagataataaggtcttgatgcgctgcagcacctcagacttgtctttcctccgtccaccgagacattttatttcgaagagctagtaattttctggagcgttgccttcccacggtggctggagctactgattcagaagtgcaaaggcctgcgacggtttgagttgcagtgtggtctgtcattgctcaggagctgcctcgacggtggcaagaactggcatctcgtgcagcagatccccgaggtgcgcatcataagctgcgatggcaagagatactttcggtataacaagagccgccgcatctacgaaactaatgcacagtcagaagaatgaagccatttctgaaaaccttggcacgacactggtttgttttgggtcagccacacgtttcagttgtcgctgtccctactttgttccgggagtattgagagcttgtgttctgttcacgattgattcaggtgttttcctttgttttgcgtgttttttttcttcttctttttatcgctgagccgatatatatgcactggttctcctctgaatatgggtgtccttcaccaggactcaatatgtgtaattcttttctgtttcctggtcatgattgtctgtaaattgtaaacattgggtttgatggatatcgacactggagtgtaaagtgttggcggttaaatacacggccctctttcctggctcagcaatgaaacttctgttctac

SEQ ID NO: 53736 - DNA, 1754 bp, Zea Mays
cactcatgttctttaataaattatttgctaggactacatgaatggatcatatactagctcgttaagcctccatgatgtcagtgtcgacgatggacaatcagctcttgataacagcagtagaacctctagtccttttgatatcctgactcctcaagatgttatccctatcgaaacggcaaggtctagattcttggacctcgttgttgaaagctttatctgtgagcatgttactgagttggtggaatgctctagctctgactgcagccaggtggatggcaaatcaagcaagagaaagcagcaggaggttcgatacgagggtgacccaagggttgctttgccattgatgtatatagcaaacctgtacgaaaccttgataagtgatgtcaatgtgcgtcttgcggcactgattgggttccgtgagaaaactataggtctagctcttgaagcttcaggtggcttgtacaggaaactgatccagaggttcccaaagagaggccactgcagcttcaagaggagggagttagcgacttctcatgcaaccaggacaaagtttcctgaacttgtggtacaagaagaaaaacgagttcgttttgttgttattaacggattggcgattgtagagaggccagaaaatatgagaatggaagatgcggaatggttcaaaaggttgactggtcgaagtgaagttgctatttgttcaagagattacaaattctattcaccccggcataagatcaggcgttccccacaggcagcatttgacatccctgatacaagtgctttggcagaggatgagaactcttcattggtttgttcttcaggatttcgctcaccaaacgagatacaaaatcagcatcagtcaacatcaaagagacctatcgaacatctagaaaatcaaccctttttacaccttttccatcaagcagaagatgatagcatgcagcaagttcaacattgtgctcagttcccacccattcatcaatgtacgagcactccacatctatcagataacccccaacaccagcaacaggcttatttatctcaacatatatcttgcttgcaagttgggcaaggtcatcttggaggacgcatgcatattattccaaccagccctgcgaagttctgtgatgagtgtggctccccatatttgagggcgacatcgaagttctgctcagagtgtggtaccaagaggctaggaatgtgaggtgacttgatcaatgtgtatatgaatctgatgatgtagcaattgtagtcttatgtttgtaaaagggtctctagcgtaatggttaaggcagcccggcgaagttctgtgatgagtgtggctccccatatttgagggcaacatcaaagttctgctcagagtgaggtaccaagaggctaggaatgcgcggtgacttgatcaatgtgtatatgaatctgatgatgtagcaattgtagtcttatttgtaaaagggttatttgtaaaagggtctctagcgtaatggttaagttttcttttaagttttctgagtagcaactctggttgggccgttttagagtgggcggtgatatcttactagtgatgggggccagggtttggaaattttctcgagaccatgttttggtctcctttttaatataatactggaatgacggtcttttggaatgacggtctttctcttcccgaggagttttttttatgcctttaaagttgtgtgagaagtgtattcttgagatgatgactcagcagagagtatgcagccacctttactaga

SEQ ID NO: 53737 - DNA, 1703 bp, Zea Mays
tcctcctcctgtgcgaaactgggcaccccagccctaattcaacctatttgcctatctttgctaggactacatgaatggatcatatactagctcgttaagcctccatgatgtcagtgtcgacgatggacaatcagctcttgataacagcagtagaacctctagtccttttgatatcctgactcctcaagatgttatccctatcgaaacggcaagccaggtggatggcaaatcaagcaagagaaagcagcaggaggttcgatacgagggtgacccaagggttgctttgccattgatgtatatagcaaacctgtacgaaaccttgataagtgatgtcaatgtgcgtcttgcggcactgattgggttccgtgagaaaactataggtctagctcttgaagcttcaggtggcttgtacaggaaactgatccagaggttcccaaagagaggccactgcagcttcaagaggagggagttagcgacttctcatgcaaccaggacaaagtttcctgaacttgtggtacaagaagaaaaacgagttcgttttgttgttattaacggattggcgattgtagagaggccagaaaatatgagaatggaagatgcggaatggttcaaaaggttgactggtcgaagtgaagttgctatttgttcaagagattacaaattctattcaccccggcataagatcaggcgttccccacaggcagcatttgacatccctgatacaagtgctttggcagaggatgagaactcttcattggtttgttcttcaggatttcgctcaccaaacgagatacaaaatcagcatcagtcaacatcaaagagacctatcgaacatctagaaaatcaaccctttttacaccttttccatcaagcagaagatgatagcatgcagcaagttcaacattgtgctcagttcccacccattcatcaatgtacgagcactccacatctatcagataacccccaacaccagcaacaggcttatttatctcaacatatatcttgcttgcaagttgggcaaggtcatcttggaggacgcatgcatattattccaaccagccctgcgaagttctgtgatgagtgtggctccccatatttgagggcgacatcgaagttctgctcagagtgtggtaccaagaggctaggaatgtgaggtgacttgatcaatgtgtatatgaatctgatgatgtagcaattgtagtcttatgtttgtaaaagggtctctagcgtaatggttaaggcagcccggcgaagttctgtgatgagtgtggctccccatatttgagggcaacatcaaagttctgctcagagtgaggtaccaagaggctaggaatgcgcggtgacttgatcaatgtgtatatgaatctgatgatgtagcaattgtagtcttatttgtaaaagggttatttgtaaaagggtctctagcgtaatggttaagttttcttttaagttttctgagtagcaactctggttgggccgttttagagtgggcggtgatatcttactagtgatgggggccagggtttggaaattttctcgagaccatgttttggtctcctttttaatataatactggaatgacggtcttttggaatgacggtctttctcttcccgaggagttttttttatgcctttaaagttgtgtgagaagtgtattcttgagatgatgactcagcagagagtatgcagccacctttactaga

SEQ ID NO: 53738 - DNA, 1593 bp, Zea Mays
ctcgcgggagctgtacgccgccgctccactcccaggctcccagctgcccttggcgaccgtcgccgccggccgccctactccgagctgttcaggacgctttgctggcgagcacccaccacaccagttgctaggactacatgaatggatcatatactagctcgttaagcctccatgatgtcagtgtcgacgatggacaatcagctcttgataacagcagtagaacctctagtccttttgatatcctgactcctcaagatgttatccctatcgaaacggcaaggtctagattcttggacctcgttgttgaaagctttatctgtgagcatgttactgagttggtggaatgctctagctctgactgcagccaggtggatggcaaatcaagcaagagaaagcagcaggaggttcgatacgagggtgacccaagggttgctttgccattgatgtatatagcaaacctgtacgaaaccttgataagtgatgtcaatgtgcgtcttgcggcactgattgggttccgtgagaaaactataggtctagctcttgaagcttcaggtggcttgtacaggaaactgatccagaggttcccaaagagaggccactgcagcttcaagaggagggagttagcgacttctcatgcaaccaggacaaagtttcctgaacttgtggtacaagaagaaaaacgagttcgttttgttgttattaacggattggcgattgtagagaggccagaaaatatgagaatggaagatgcggaatggttcaaaaggttgactggtcgaagtgaagttgctatttgttcaagagattacaaattctattcaccccggcataagatcaggcgttccccacaggcagcatttgacatccctgatacaagtgctttggcagaggatgagaactcttcattggtttgttcttcaggatttcgctcaccaaacgagccaaccagccctgcgaagttctgtgatgagtgtggctccccatatttgagggcgacatcgaagttctgctcagagtgtggtaccaagaggctaggaatgtgaggtgacttgatcaatgtgtatatgaatctgatgatgtagcaattgtagtcttatgtttgtaaaagggtctctagcgtaatggttaaggcagcccggcgaagttctgtgatgagtgtggctccccatatttgagggcaacatcaaagttctgctcagagtgaggtaccaagaggctaggaatgcgcggtgacttgatcaatgtgtatatgaatctgatgatgtagcaattgtagtcttatttgtaaaagggttatttgtaaaagggtctctagcgtaatggttaagttttcttttaagttttctgagtagcaactctggttgggccgttttagagtgggcggtgatatcttactagtgatgggggccagggtttggaaattttctcgagaccatgttttggtctcctttttaatataatactggaatgacggtcttttggaatgacggtctttctcttcccgaggagttttttttatgcctttaaagttgtgtgagaagtgtattcttgagatgatgactcagcagagagtatgcagccacctttactaga

SEQ ID NO: 53739 - DNA, 1869 bp, Zea Mays
ctcgcgggagctgtacgccgccgctccactcccaggctcccagctgcccttggcgaccgtcgccgccggccgccctactccgagctgttcaggacgctttgctggcgagcacccaccacaccagttgctaggactacatgaatggatcatatactagctcgttaagcctccatgatgtcagtgtcgacgatggacaatcagctcttgataacagcagtagaacctctagtccttttgatatcctgactcctcaagatgttatccctatcgaaacggcaaggtctagattcttggacctcgttgttgaaagctttatctgtgagcatgttactgagttggtggaatgctctagctctgactgcagccaggtggatggcaaatcaagcaagagaaagcagcaggaggttcgatacgagggtgacccaagggttgctttgccattgatgtatatagcaaacctgtacgaaaccttgataagtgatgtcaatgtgcgtcttgcggcactgattgggttccgtgagaaaactataggtctagctcttgaagcttcaggtggcttgtacaggaaactgatccagaggttcccaaagagaggccactgcagcttcaagaggagggagttagcgacttctcatgcaaccaggacaaagtttcctgaacttgtggtacaagaagaaaaacgagttcgttttgttgttattaacggattggcgattgtagagaggccagaaaatatgagaatggaagatgcggaatggttcaaaaggttgactggtcgaagtgaagttgctatttgttcaagagattacaaattctattcaccccggcataagatcaggcgttccccacaggcagcatttgacatccctgatacaagtgctttggcagaggatgagaactcttcattggtttgttcttcaggatttcgctcaccaaacgagcttgctctgttccagatacaaaatcagcatcagtcaacatcaaagagacctatcgaacatctagaaaatcaaccctttttacaccttttccatcaagcagaagatgatagcatgcagcaagttcaacattgtgctcagttcccacccattcatcaatgtacgagcactccacatctatcagataacccccaacaccagcaacaggcttatttatctcaacatatatcttgcttgcaagttgggcaaggtcatcttggaggacgcatgcatattattccaaccagccctgcgaagttctgtgatgagtgtggctccccatatttgagggcgacatcgaagttctgctcagagtgtggtaccaagaggctaggaatgtgaggtgacttgatcaatgtgtatatgaatctgatgatgtagcaattgtagtcttatgtttgtaaaagggtctctagcgtaatggttaaggcagcccggcgaagttctgtgatgagtgtggctccccatatttgagggcaacatcaaagttctgctcagagtgaggtaccaagaggctaggaatgcgcggtgacttgatcaatgtgtatatgaatctgatgatgtagcaattgtagtcttatttgtaaaagggttatttgtaaaagggtctctagcgtaatggttaagttttcttttaagttttctgagtagcaactctggttgggccgttttagagtgggcggtgatatcttactagtgatgggggccagggtttggaaattttctcgagaccatgttttggtctcctttttaatataatactggaatgacggtcttttggaatgacggtctttctcttcccgaggagttttttttatgcctttaaagttgtgtgagaagtgtattcttgagatgatgactcagcagagagtatgcagccacctttactaga

SEQ ID NO: 53740 - DNA, 1727 bp, Zea Mays
ctcgcgggagctgtacgccgccgctccactcccaggctcccagctgcccttggcgaccgtcgccgccggccgccctactccgagctgttcaggacgctttgctggcgagcacccaccacaccagttgctaggactacatgaatggatcatatactagctcgttaagcctccatgatgtcagtgtcgacgatggacaatcagctcttgataacagcagtagaacctctagtccttttgatatcctgactcctcaagatgttatccctatcgaaacggcaaggtctagattcttggacctcgttgttgaaagctttatctgtgagcatgttactgagttggtggaatgctctagctctgactgcagccaggtggatggcaaatcaagcaagagaaagcagcaggaggtctagctcttgaagcttcaggtggcttgtacaggaaactgatccagaggttcccaaagagaggccactgcagcttcaagaggagggagttagcgacttctcatgcaaccaggacaaagtttcctgaacttgtggtacaagaagaaaaacgagttcgttttgttgttattaacggattggcgattgtagagaggccagaaaatatgagaatggaagatgcggaatggttcaaaaggttgactggtcgaagtgaagttgctatttgttcaagagattacaaattctattcaccccggcataagatcaggcgttccccacaggcagcatttgacatccctgatacaagtgctttggcagaggatgagaactcttcattggtttgttcttcaggatttcgctcaccaaacgagatacaaaatcagcatcagtcaacatcaaagagacctatcgaacatctagaaaatcaaccctttttacaccttttccatcaagcagaagatgatagcatgcagcaagttcaacattgtgctcagttcccacccattcatcaatgtacgagcactccacatctatcagataacccccaacaccagcaacaggcttatttatctcaacatatatcttgcttgcaagttgggcaaggtcatcttggaggacgcatgcatattattccaaccagccctgcgaagttctgtgatgagtgtggctccccatatttgagggcgacatcgaagttctgctcagagtgtggtaccaagaggctaggaatgtgaggtgacttgatcaatgtgtatatgaatctgatgatgtagcaattgtagtcttatgtttgtaaaagggtctctagcgtaatggttaaggcagcccggcgaagttctgtgatgagtgtggctccccatatttgagggcaacatcaaagttctgctcagagtgaggtaccaagaggctaggaatgcgcggtgacttgatcaatgtgtatatgaatctgatgatgtagcaattgtagtcttatttgtaaaagggttatttgtaaaagggtctctagcgtaatggttaagttttcttttaagttttctgagtagcaactctggttgggccgttttagagtgggcggtgatatcttactagtgatgggggccagggtttggaaattttctcgagaccatgttttggtctcctttttaatataatactggaatgacggtcttttggaatgacggtctttctcttcccgaggagttttttttatgcctttaaagttgtgtgagaagtgtattcttgagatgatgactcagcagagagtatgcagccacctttactaga

SEQ ID NO: 53741 - DNA, 1844 bp, Zea Mays
ctcgcgggagctgtacgccgccgctccactcccaggctcccagctgcccttggcgaccgtcgccgccggccgccctactccgagctgttcaggacgctttgctggcgagcacccaccacaccagttgctaggactacatgaatggatcatatactagctcgttaagcctccatgatgtcagtgtcgacgatggacaatcagctcttgataacagcagtagaacctctagtccttttgatatcctgactcctcaagatgttatccctatcgaaacggcaaggtctagattcttggacctcgttgttgaaagctttatctgtgagcatgttactgagttggtggaatgctctagctctgactgcagccaggtggatggcaaatcaagcaagagaaagcagcaggaggttcgatacgagggtgacccaagggttgctttgccattgatgtatatagcaaacctgtacgaaaccttgataagtgatgtcaatgtgcgtcttgcggcactgattgggttccgtgagaaaactataggtctagctcttgaagcttcaggtggcttgtacaggaaactgatccagaggttcccaaagagagcttcaagaggagggagttagcgacttctcatgcaaccaggacaaagtttcctgaacttgtggtacaagaagaaaaacgagttcgttttgttgttattaacggattggcgattgtagagaggccagaaaatatgagaatggaagatgcggaatggttcaaaaggttgactggtcgaagtgaagttgctatttgttcaagagattacaaattctattcaccccggcataagatcaggcgttccccacaggcagcatttgacatccctgatacaagtgctttggcagaggatgagaactcttcattggtttgttcttcaggatttcgctcaccaaacgagatacaaaatcagcatcagtcaacatcaaagagacctatcgaacatctagaaaatcaaccctttttacaccttttccatcaagcagaagatgatagcatgcagcaagttcaacattgtgctcagttcccacccattcatcaatgtacgagcactccacatctatcagataacccccaacaccagcaacaggcttatttatctcaacatatatcttgcttgcaagttgggcaaggtcatcttggaggacgcatgcatattattccaaccagccctgcgaagttctgtgatgagtgtggctccccatatttgagggcgacatcgaagttctgctcagagtgtggtaccaagaggctaggaatgtgaggtgacttgatcaatgtgtatatgaatctgatgatgtagcaattgtagtcttatgtttgtaaaagggtctctagcgtaatggttaaggcagcccggcgaagttctgtgatgagtgtggctccccatatttgagggcaacatcaaagttctgctcagagtgaggtaccaagaggctaggaatgcgcggtgacttgatcaatgtgtatatgaatctgatgatgtagcaattgtagtcttatttgtaaaagggttatttgtaaaagggtctctagcgtaatggttaagttttcttttaagttttctgagtagcaactctggttgggccgttttagagtgggcggtgatatcttactagtgatgggggccagggtttggaaattttctcgagaccatgttttggtctcctttttaatataatactggaatgacggtcttttggaatgacggtctttctcttcccgaggagttttttttatgcctttaaagttgtgtgagaagtgtattcttgagatgatgactcagcagagagtatgcagccacctttactaga

SEQ ID NO: 53742 - DNA, 1656 bp, Zea Mays
cccgactcgcgggagctgtacgccgccgctccactcccaggctcccagctgcccttggcgaccgtcgccgccggccgccctactccgagctgttcaggacgctttgctggcgagcacccaccacaccagatgttatccctatcgaaacggcaagctctgactgcagccaggtggatggcaaatcaagcaagagaaagcagcaggaggttcgatacgagggtgacccaagggttgctttgccattgatgtatatagcaaacctgtacgaaaccttgataagtgatgtcaatgtgcgtcttgcggcactgattgggttccgtgagaaaactataggtctagctcttgaagcttcaggtggcttgtacaggaaactgatccagaggttcccaaagagaggccactgcagcttcaagaggagggagttagcgacttctcatgcaaccaggacaaagtttcctgaacttgtggtacaagaagaaaaacgagttcgttttgttgttattaacggattggcgattgtagagaggccagaaaatatgagaatggaagatgcggaatggttcaaaaggttgactggtcgaagtgaagttgctatttgttcaagagattacaaattctattcaccccggcataagatcaggcgttccccacaggcagcatttgacatccctgatacaagtgctttggcagaggatgagaactcttcattggtttgttcttcaggatttcgctcaccaaacgagatacaaaatcagcatcagtcaacatcaaagagacctatcgaacatctagaaaatcaaccctttttacaccttttccatcaagcagaagatgatagcatgcagcaagttcaacattgtgctcagttcccacccattcatcaatgtacgagcactccacatctatcagataacccccaacaccagcaacaggcttatttatctcaacatatatcttgcttgcaagttgggcaaggtcatcttggaggacgcatgcatattattccaaccagccctgcgaagttctgtgatgagtgtggctccccatatttgagggcgacatcgaagttctgctcagagtgtggtaccaagaggctaggaatgtgaggtgacttgatcaatgtgtatatgaatctgatgatgtagcaattgtagtcttatgtttgtaaaagggtctctagcgtaatggttaaggcagcccggcgaagttctgtgatgagtgtggctccccatatttgagggcaacatcaaagttctgctcagagtgaggtaccaagaggctaggaatgcgcggtgacttgatcaatgtgtatatgaatctgatgatgtagcaattgtagtcttatttgtaaaagggttatttgtaaaagggtctctagcgtaatggttaagttttcttttaagttttctgagtagcaactctggttgggccgttttagagtgggcggtgatatcttactagtgatgggggccagggtttggaaattttctcgagaccatgttttggtctcctttttaatataatactggaatgacggtcttttggaatgacggtctttctcttcccgaggagttttttttatgcctttaaagttgtgtgagaagtgtattcttgagatgatgactcagcagagagtatgcagccacctttactaga

SEQ ID NO: 53743 - DNA, 1554 bp, Zea Mays
cttggcccgactcgcgggagctgtacgccgccgctccactcccaggctcccagctgcccttggcgaccgtcgccgccggccgccctactccgagctgttcaggacgctttgctggcgagcacccaccacaccagttgctaggactacatgaatggatcatatactagctcgttaagcctccatgatgtcagtgtcgacgatggacaatcagctcttgataacagcagtagaacctctagtccttttgatatcctgactcctcaagatgttatccctatcgaaacggcaagctctgactgcagccaggtggatggcaaatcaagcaagagaaagcagcaggaggttcgatacgagggtgacccaagggttgctttgccattgatgtctagctcttgaagcttcaggtggcttgtacaggaaactgatccagaggttcccaaagagaggccactgcagcttcaagaggagggagttagcgacttctcatgcaaccaggacaaagtttcctgaacttgtggtacaagaagaaaaacgagttcgttttgttgttattaacggattggcgattgtagagaggccagaaaatatgagaatggaagatgcggaatggttcaaaaggttgactggtcgaagtgaagttgctatttgttcaagagattacaaattctattcaccccggcataagatcaggcgttccccacaggcagcatttgacatccctgatacaagtgctttggcagaggatgagaactcttcattggtttgttcttcaggatttcgctcaccaaacgagatacaaaatcagcatcagtcaacatcaaagagacctatcgaacatctagaaaatcaaccctttttacaccttttccatcaagcagaagatgatagcatgcagcaagttcaacattgtgctcagttcccacccattcatcaatgtacgagcactccacatctatcagataacccccaacaccagcaacaggcttatttatctcaacatatatcttgcttgcaagttgggcaaggtcatcttggaggacgcatgcatattattccaaccagccctgcgaagttctgtgatgagtgtggctccccatatttgaggttctgtgatgagtgtggctccccatatttgagggcaacatcaaagttctgctcagagtgaggtaccaagaggctaggaatgcgcggtgacttgatcaatgtgtatatgaatctgatgatgtagcaattgtagtcttatttgtaaaagggttatttgtaaaagggtctctagcgtaatggttaagttttcttttaagttttctgagtagcaactctggttgggccgttttagagtgggcggtgatatcttactagtgatgggggccagggtttggaaattttctcgagaccatgttttggtctcctttttaatataatactggaatgacggtcttttggaatgacggtctttctcttcccgaggagttttttttatgcctttaaagttgtgtgagaagtgtattcttgagatgatgactcagcagagagtatgcagccacctttactaga

SEQ ID NO: 53744 - DNA, 1778 bp, Zea Mays
ctcgccttggcccgactcgcgggagctgtacgccgccgctccactcccaggctcccagctgcccttggcgaccgtcgccgccggccgccctactccgagctgttcaggacgctttgctggcgagcacccaccacaccaggactacatgaatggatcatatactagctcgttaagcctccatgatgtcagtgtcgacgatggacaatcagctcttgataacagcagtagaacctctagtccttttgatatcctgactcctcaagatgttatccctatcgaaacggcaagccaggtggatggcaaatcaagcaagagaaagcagcaggaggttcgatacgagggtgacccaagggttgctttgccattgatgtatatagcaaacctgtacgaaaccttgataagtgatgtcaatgtgcgtcttgcggcactgattgggttccgtgagaaaactataggtctagctcttgaagcttcaggtggcttgtacaggaaactgatccagaggttcccaaagagaggccactgcagcttcaagaggagggagttagcgacttctcatgcaaccaggacaaagtttcctgaacttgtggtacaagaagaaaaacgagttcgttttgttgttattaacggattggcgattgtagagaggccagaaaatatgagaatggaagatgcggaatggttcaaaaggttgactggtcgaagtgaagttgctatttgttcaagagattacaaattctattcaccccggcataagatcaggcgttccccacaggcagcatttgacatccctgatacaagtgctttggcagaggatgagaactcttcattggtttgttcttcaggatttcgctcaccaaacgagatacaaaatcagcatcagtcaacatcaaagagacctatcgaacatctagaaaatcaaccctttttacaccttttccatcaagcagaagatgatagcatgcagcaagttcaacattgtgctcagttcccacccattcatcaatgtacgagcactccacatctatcagataacccccaacaccagcaacaggcttatttatctcaacatatatcttgcttgcaagttgggcaaggtcatcttggaggacgcatgcatattattccaaccagccctgcgaagttctgtgatgagtgtggctccccatatttgagggcgacatcgaagttctgctcagagtgtggtaccaagaggctaggaatgtgaggtgacttgatcaatgtgtatatgaatctgatgatgtagcaattgtagtcttatgtttgtaaaagggtctctagcgtaatggttaaggcagcccggcgaagttctgtgatgagtgtggctccccatatttgagggcaacatcaaagttctgctcagagtgaggtaccaagaggctaggaatgcgcggtgacttgatcaatgtgtatatgaatctgatgatgtagcaattgtagtcttatttgtaaaagggttatttgtaaaagggtctctagcgtaatggttaagttttcttttaagttttctgagtagcaactctggttgggccgttttagagtgggcggtgatatcttactagtgatgggggccagggtttggaaattttctcgagaccatgttttggtctcctttttaatataatactggaatgacggtcttttggaatgacggtctttctcttcccgaggagttttttttatgcctttaaagttgtgtgagaagtgtattcttgagatgatgactcagcagagagtatgcagccacctttactaga

SEQ ID NO: 53745 - DNA, 1498 bp, Zea Mays
gaaaccaagcatttaggtcttacgacgcgcccaaagctcacgccggacctgctcctctccgacggcggcatcggcttcgtgctccgctactttccctgcaaagatgcttgttgggtggtaaaagcggtgctggtgctgcaattgatctgtcatccctaattgttgttgatggaaaggtctgctgggatctgtacattgatgggcttgtggtcagttctgatggtaatttgctagatgcgctagctgttgcgataaaggttgctttgagtgatacaggtataccaaaagttaatgtttctgttagtgctgcatctgatgaggaacctgaagttgatgtaagtgatgaggaatttctgcagttcgacacatccggtgtgcctgttattattacattaaccaaggttcaaaaggttgactggtcgaagtgaagttgctatttgttcaagagattacaaattctattcaccccggcataagatcaggcgttccccacaggcagcatttgacatccctgatacaagtgctttggcagaggatgagaactcttcattggtttgttcttcaggatttcgctcaccaaacgagatacaaaatcagcatcagtcaacatcaaagagacctatcgaacatctagaaaatcaaccctttttacaccttttccatcaagcagaagatgatagcatgcagcaagttcaacattgtgctcagttcccacccattcatcaatgtacgagcactccacatctatcagataacccccaacaccagcaacaggcttatttatctcaacatatatcttgcttgcaagttgggcaaggtcatcttggaggacgcatgcatattattccaaccagccctgcgaagttctgtgatgagtgtggctccccatatttgagggcgacatcgaagttctgctcagagtgtggtaccaagaggctaggaatgtgaggtgacttgatcaatgtgtatatgaatctgatgatgtagcaattgtagtcttatgtttgtaaaagggtctctagcgtaatggttaaggcagcccggcgaagttctgtgatgagtgtggctccccatatttgagggcaacatcaaagttctgctcagagtgaggtaccaagaggctaggaatgcgcggtgacttgatcaatgtgtatatgaatctgatgatgtagcaattgtagtcttatttgtaaaagggttatttgtaaaagggtctctagcgtaatggttaagttttcttttaagttttctgagtagcaactctggttgggccgttttagagtgggcggtgatatcttactagtgatgggggccagggtttggaaattttctcgagaccatgttttggtctcctttttaatataatactggaatgacggtcttttggaatgacggtctttctcttcccgaggagttttttttatgcctttaaagttgtgtgagaagtgtattcttgagatgatgactcagcagagagtatgcagccacctttactaga

SEQ ID NO: 53746 - DNA, 3363 bp, Zea Mays
ccaacttgtatgtgacgatatttccatgtaatgctagtgataaaaataaataattatcttttcaaaagatcactaattatataagtatgtttattttaatatacacatagtaatttattacatccaataatatgtataaatgacaatgttttagatttataataaagaacacacattttaattataatttaagtgaggataaaaattctcgttaggatttgttcggtttggaatggattaagggagcacctctaccaatctcaatcaattcatttcaaactttaaggatttacaaacatacgtttatggagatctttcatcatgggatatgaaactatttattgacggagaatttttcgttgccttccttcctgtaatgagaagtgaaaaaataaaaaatagacgaacgaaaaacaactggctcgagagcgagagggactgtacgctggaccgccggcatcaggatgagagcaaccgaagcgcactgcccagtcccagctgcctaggtctgccgcctgtcttgaccccacccactggccacttcccctcctgtccgttcccaaatcccgtcccctccacccgcactccattggcgccgctcccctcccctcgccgccgccggagatctgatccgatccgatccgatccgtttgtgcttgtgctgcagcaggagtgagaagtaaaaaaatatggctgccctgccactggccaccgccgaagtatgcgacgctaaccctcacctgatcatgaacggcgagctccgcgcgctccagccaatcttccagatctacggacggcgccaggtcttcgccggccccatcgtcacgctcaaggtctacgaggacaacgtcctggtccgcgagttcctcgaggagaaaggccacggtagggtcctcgtggtcgacggcggcggcagcatgcgctgcgccatccttggcggcaaccccgtccagcaggcgcagaacaacgggtgggctggtatcctggtcaacggctgcatcagggacgtggatgagatcaacggctgcgacatcggtgtccgggctctcagctcgcaccctatgaaggccaacaagaaggggatgggcgagaagcacgtccccgtcaacatcgctggaaccaggatttgcgacggcgagtggctctacgccgatcccgatggcattcttgtctccaggacggaactcaccgtgtagacagacacctggttgtatgtgtgtgtgtataaggaatcgggcgctcttgctgttaagcccgagcttgcaataatggattcttgctggatcacacatttatacttagaataatcgaatgcttgcttccttggttacaagatgttcttggacaattcttttttttgttccttgtcaattttctattccggcgacgaagttgattaaactatagatccccttgttggtgtagttctgaagctgagtgttctgtgtcttggccctgtgcctttgttcaagtctgtatttcatcttttgaaaagaagcttagacgcatactattaattaatctgattaatcttatgtccctttgatatttggatgttgatattggaggacatagaattttataaagctgattctaatttccaatttcatgctccaatatctgcatctctgaacggagtattagcgaattcagctcaacatatgccaataatgccattgccctcaaggttcaagagcaaaagcaggttgatttggcacttatttaaagtatacacatagtggcaaatttagaagaaatttagggcaccggtttgcaattctgtgaagttatttattagttttagcaggatggccattgtgccatgactgtttctgttgggtaggtggcagactataaaatttcccaacgctgcgttcacccctgccgctctcttctcccgctctctcgcctcctgtagctaggccaggtctcagtgctcattctcactcccttcaaattaccggtgacgagtatccactaatgtccaggacgatggtgggcctctctgaaggggagaaacacttcatccgcgcggcattgcacaggactttcgcactgatggacgtaggcggctgcagttccggtccctttccgtcgaaaccggagtcattccacagcgaatggctcagcgcgtgttaggttgggggccactgaaataatcgctagtgtcaaggctgaactaggaaaaccaagcattcttcaccctgacaaaggaaaagttgacatttttgtcgactgtagtccaaccgctgagcctctgtttgagggtagaggctctgaagaattgtctgctgagctctctgtttccctgcaaagatgcttgttgggtggtaaaagtggtgctggtgctgcaattgatctgtcatccctaattgttgttgatggaaaggtctgctgggatctgtacattgatgggcttgtggtcagttctgatggtaatttgctagatgcgctagctgttgcgataaaggttgctttgagtgatacaggtataccaaaagttaatgtttctgttagtgctgcatctgatgaggaacctgaagttgatgtaagtgatgaggaatttctgcagtttgacacatccggtgtgcctattattattacattaaccaaggtgggtcggcactacatcgttgatgccacctcagaggaagaatcccagatgagttctgcagtgtcggtgtcagtcaacaggcatggccagatatgcgggcttaccaagaggggaggggcagggctggatccaagcgtcatcttcgacatgatatctgtcgccaagcatgtgagccagcagttcatctccctcttggattcagagattgccgccgccgaagctgaagaagaggctcagtgattgatgaaaaggaaaaaggactggttgcgtaaatgctcgtgtgttccaacttcaaccaaatgctgtagaaatcttcaggaatttggttccatttttatgttattattagtagtagtaaacaccgaggatttggatcctgggaacgaacgacgtcgtgttggctttggctgggctcagaggaacgaatactgaatcttgggtctgatgatctgatcctcttgtgcccccaatccgatgataaatttggcccctctcacaccaaaccaaacactatggatttcctccatccgttttcaaacaatttcgcacgcaattttgaatctgatttccacatactagtgcattgtgtgtggcatgaataggtgaatagcaataatcttccatcggcatgtgaaatgcttatgacttcatcgatgggtcgagctgagtacaacatagcatgaatgaagaaacccactctttgaattatgatttacaaagtcattttgctctctatatttacaaagcat

SEQ ID NO: 53747 - DNA, 1449 bp, Zea Mays
ctcctttttgtcctttcgatctgtatttggcgctatctcgcctcccaactcccgccaaaaaccctccatttccctttttttccccttgcccaggaccaggagcaagatccatccatccatccccgattccccaaccctaagcagccatggccgcgccgccgcccacgggctgcttcaagtgtggccgccccggccactggtcccgcgactgcccctcctccgcctccaccaaccctcctgccgccgccgacgcgcccaccaaccctagccacctctccggcgccgcctcccgcttcaacgccaagcccaggccccccgcggcggcggtggatggcgaggacggcaaggggaagaagaagaaggagagggccacgcgccccaagctcacgccggacctgctcctctccgacggcggcatcggcttcgtgctccgctacttccccaaggcgttcaagccccgcgcccgcccaggccacgaggtggacgacctcgctaacctcatcaagctctacgcggactggcactcccgcctgatcccctactactccttcgaacagttcgtgcgcaaactcgagaaattgggtgccggcaaccgcgtcagagatgtgtttccgaactcagggatagggtcgccagaggcggtgatcctacgcttctgcacgaaccgccagtccacgaagacatgccattgccaggcggaggtgaacatggtactgaagacccagttctcggcaccgatgctccgctgtcggacaaccatggcactggccccgtggtgcaggaagacgcagatccaccgatggagagcaacgacgtggtggatcccatggaagaggatctgcttaacgaaatctacgaaaacacagctgatatcccggctggtgagggagccagcaaggagtctccggagcagtcggctccaaaagaagccaactcgctggcgcaggaaccccaggacggcgacgtccccaagccggcgaaggttgagctcactgaggcgcagaaggcacgcatggaggccaacaggctcaaggccttggagagagcggcggcacgggctcgtgcctcgcagcagcccacctagatacgcaagatgctgctgtcttcacttcacttcaatagttggttggttggttgagatgatgcatcattctgtggtgtgtcattgacaaggacacgtagttcgctggtgtctgattgaatctgggtctgctctagtcgatttggtccctagtagtatgtaacaggagaagataagagtttgttggatgtgcttgaaagcttcgtcctgttctcgcttccccaaccattctagagtcagaattccatgtcattcaagctgatcttctcattcatcgttttgctgcatagtgcgtcttggtccaattgtcttcatttaggttctagtttgagaaccctatttttttaatggatttttatttttacaag

SEQ ID NO: 53748 - DNA, 1300 bp, Zea Mays
gtgatttcaaacaggccctaagttgccagagacaacatcctctgctagcttgttggttaaaatgataatcagtacaacaaggactatgtggaatgtggtattatattgaatttagctacattggggaccggtgagatggatagttctggatgtgctggttcttataatgacgcaggagggagattaagctccagttgtgctccttatttgaatgatgaatcaaatacgcctgattcttcggaatttgatggatccactttcactgagcatggcttgggagaagaaagcaatagctaccagaagttaacatgtgactgtgtttataactccagttatgcaaccacagatcttgtctttactatgaggatcaacgacaacagtgggaactatagcgtcgatgttgaagctgggttaaccatcaaagacaaaaaaatagacatgaccattcaaaaccagggactttcacagtgggttctaataggcacaagaacaatggaaaaagatagttcagcagtgtgacagaaagtagaaagaaatgacaagatgatatctaaagcaggacattcgagcaattcacccaatcatgagaatggtgtacaggaagatctaacaagaattcgggcaaaacataaagtgtgcaaacaggagtcctcaaatggggcagttgaactggaacctaccaaagaagaagatgcgttgaattcatggcatacattttctgtacctgtctacaagaggcacaagcaccttttctacgccagcaaagaagctcttcttcgaaacaaggttctcaaagaatctggaggccagcctgcatgatctccatccagcctcttggtgctccttttttgggggtgatattatcatttaacatgtacctgtatctgaatctgcaagaccttgtggggtgacttgtgttgaaaacggatctctctctctctctctctctctctctctctctcgtatttcaggtattgtgttgcatggaaaatttcaggccgcattcttgacatgtcatgtcatttcccttgggcactggattcatgagagcagctcagcacacggagctgctgttttgccagtcataggcctgcaatcttacaatgccaaggtaaagtacctgacataccacatgatacatagatcatagatgccagctcaattagtgtcgaagaaaatcaaaaggtgtctggggttagtggatggtgcaggtgttttttggcaccaggtgaaagttttggactgttgttctgtgtcctgggcgggcatgtgtggattgctgggtcaatgctgcggtgag

SEQ ID NO: 53749 - DNA, 4115 bp, Zea Mays
cacctccactcagcttgtcctgtgccgtgccgtcttcccttcttcccccaactcgctcgctttctcgtccccgcgcggaagcggagcacccaacccaacacgcctccctcccctcccctccagatccagcctccctttcggcctcctcttcctctgctgagttcctcttcctccgtggaatccgcacccgccgcccgcccccaattcggccgggatccttcgattcgcttcttcctccctcgtctatagttggtaagaaaccctaacctaacttaacctagctttatcatgccctcctcgcctcgccgcccccggttctatctcaatccccatgcctcacgcacgttcttgattcattcaattttccattccctagatgtaccgccatgtatattttttcttttaaaaaaacatccaaacgaaacgcccctctctcttttttcggtgccgcacaaatcacatgtttgcatctacccttctttcttccctccgtgcatttcgttcaattccatttcgccgtctcaatctcatttcatttatacgcaaaacttatatagggtcaccggtcacagatgcaatactggaaatctcaacgctggggagtcggtcatcactgttgaaggccatgatatcactctgccagggcaccacaggaagttttggcaaactgaatccatgagttttggtcagcttgggacccaaggaaggacaataaggtttggtccgagagtgaagtagcagagtggtgccaaaaaaatttttgcccaacacaccatgcttgaggatttcttcactcttactgagatgaaggaagggatatcaacggttgcaaggatcacagagctcatatctgagatgcgcaagctggaaaactccgtggacatcaacacatttgacgtgataaggcagtgctccacggctgccaacacactagcatccaccaaaaacgaagagtgtcttcagcattttgttcagctaaatggtgtttccattctcaaccattggcttcaggatgctcaaaattgtggtggggacgtcagcaatccagctgctgaggatctcatagttgcgatattgactgcattggactgtcttccgatcagcaatgagcaatcagtctcctgtggggttatgcctactgttggtcacctgctggctcacagaattgccgtgatcaaccaaaaggcaagagcactctgtcacaagtggggcggtgtaccaaaacatggtacaaatggagagcattttcatacagaggagtcaagccacactgaccagcttaagtctccagatgccggccacaagacagaaactaagagaaagtgtgtagtggacgaaggagagcctgatgaagaatcaaaacctgaggtgacaactcactcagatgcacctttgtccgacccttctctgactaatgataatgcagatgcaacagagcaaccagcagggctaacttcaccaaatccatcaaacggaaatgcaacattaggggatgtgaacaacttggtcaggtctcctacatctgcaggtcatgtgggtttagaagatgggcagtccacccccaatgaaatttcttccaatgatgctgaactgcccattaatggcatactccggtcaaactctactaatgcaaaaagtggtactggacaagatgctccagtggaatcaactccagtggccatgtctgtagaccataataaacctggaaagttgtttcctggtagtaaaatgggtctggaggatagtattatttcagttagctcaagtatcaaggagtctcagccatttgcagctggtagatcacatttggagaaggatacaactgaaactttgaaccatcttgcagttgtaacccgtgatttgcaagatttgtccgaggaaagtacaagcaaagaagatgaacctacatcatcatctagtacagatgatatggacatgagcggtgattatatattgcaaagatgcatgtcgagctttgggggctcctccaaggcagcagacacaaaatccactgcattggaaggggagaaatcaacacgaatggcagactttgatgatacagatgcactagaagttgcacgtctggtagctattgaggtggagcgggaagtcattgactacagagaacccttttgtagttctcctgatactaattccaggaatgctgacagtcctgacctggaaggaccacggcagcctgtagccattgccagtgaactgaatgataataaatcttccagtacagaggctaagtcaggaagctcctcatctcataaggaggatggatcaggcatcacagatggcagcggtccgttgagtagaaaacatacacacagtgtcgatctggggaacttagaccttaatgaaaatcagtgtgccgaggaaactgactttaatccgaagtcgatccttagtaattctgtcaatttgtcaatgcctatagctgtggctgcatcaagaggctcatctgtgtttccagctcggctccactttgaaggtggacttgggtggaaaggctctgctgcaaccagcgcctttcgaccagctccacctcggaggactcctgatgcagagaagtcactttcagcttcttcacataaaacaagcaacatattatttgatttaaatgtagctgacaacggcagtgctacttctggtgaaccactttcgacagcaatcctgccagcttcttctgaactaccttccgaggttgcttccaaagcagttgatgtgagcggaggactgaaacttgaccttaatttctcatgtggtgatgaggaagatgctatcactgcaagcaatgtgccgtcattgtggaatcaccaacaatttaatggcaactggagtcagccttctttctcatcttcaaagcaacctgcagccagaaactttgacttgaatgacaacatgtcgatcgctgatgtttctgtgcgaggaatggacgggtcttctgtcaagactccttcaaggccaagggatatgtcggaccattctgccgtcacaattatgggtaagaggatagttgtaggacagagagatgatggacagcaataccagcataactttctgggaccaagtgctgaatcaagagtttttgcaagacccactcaatcttttgcacatactcctgattatagtgttctcagttatccatctcaacctgccatgccttttaccccagcgttctttgccccagggggcagtccatacttggtggatgcaaaaggtgcaccagtcataccaccgctgtcaggtctaagcctcggcatttctcatccatctttcaacaccagagcaacacagccctcatctaatgaactgagttacttccatcctagcgtggatttcagttatggagtgtcatctgaaggcgcacgtagggaagcagggagctactggcccatgtcctaccagggtcagacaatgtttgtggatgaacgcatgaggaatgtatcacaggatggtacttctgggttggtgctgaagcgaaaagagccagagtcaggttgggatttgtacccacgtcgttgagcgtgagcctgaaggtttgttgcagtcgcaatcgattttgtcccactctcttaaaaaggatatgttcaatgctccgtttatggcggcaccttggacattgtattttagggtatttctttggcacgggcccagttctactaggtctgaagacatacacggagaactgaataagagatcagctacaggtagatttgacagatgttgacatggcaaggacattgttagctgctggaaaccacctcgtgtagatctggttctttgtgaatgtattagctttgttttagttgacataatatagccaaattgctctctagggagctaaattatgtaaatcatcatcgtataactcatagatgaaatgcatccctttttatctatctttatttttccagtgttggtgcaagttgtactgtgatcaactatattgtatatatgtcattgtttgaagctgcgcatccaggttttgtactttgttcttttttatttgtcgtggtttagtttaactagcgaatcatgttgcatgcagattgcaggtttagagagtcgactgttagcatgtcggaaccagatgctttatttggata

SEQ ID NO: 53750 - DNA, 4375 bp, Zea Mays
ccgcacacaagtcctcacgatatttagattcttatgcagctagttatacacgaattcaaattctatatttaaaaggagtaccaaacaggtccaatgtgtgtaataaaaagaaaaaaaaagattccagtagcagcagtaaagcccattcgtatgtggccctgctccggaccgaaagataaagcccatttgaaatccagctcggcctgctgtcagttcaggagcaggacgagtcggggtcggcgcggcggcaggccgcaggccggcagcaggctctcgcttcgctctctcgttgtctgtcgagaggaagaagacgaggcgagggacggcagcagtagcagctccagcatcttctagcttcttcattcatgggattcggtctctactaggattaggggtgcttcatttcatccgatccccaacgacttgacctgattctgatctcgacgacgatgcggaagcgggatctgggcatcctgctgctcgccgccttcgccatcttcttctccctccaccacgaaggcgacttctccttccgggagtcctggtaccacctcaccgacgaggacttccccatcaagtacgaggccgaccgcctgcccccgccgctcgtcgccgatctcaacggcgacggcaagcccgaggtcctcctccccacccacgacgccaagatccaggttctccagccgccccacgcccgccacctcaacgatgactccgccttccaggaggcccgtgtcatggccgacatctctctcctccccgacaacgtccgcctcgcctcggggaggcgccccatcgccatggccgtcggcaacgtcgaccgctcctacagacctggcgaggtcaggaagcaggtgctcgtcgtcgtcacctccggatggtcagtcatgtgcttcgaccataacctcaagaagctgtgggagcacaacctccaggacgatttccctcatgccgcccaccaccgcgaggtcgcaatctccataaccaattatactctcaagcatggagatgcaggcctcgtcatcgttggaggaaggatggagatgcagcatcattcagcagatctcttcgatgaatttatgataccagaacacaacatggatgatcgccgtcgaagcgccagtgagaaacagggctctgaggctggcaatgcagacctgcgccattttgccctttatgccttcgctggacgtagtggcgaccgtagatggagccggaagaatgagaacatccagtcacagccatcagatgcttctgtgatgttaccacagcataattacaaactcgacgttcatgccctcaatagtcatcaacctggtcagttcgaatgtcgtgaattcagagaatcaatccttggcatcatgcctcatcattgggataggagagaggatactaccctacaacttgcacattttaggaagcataaaaggaaacaagttaagagaacgcctggaaaggctgttattaatagcgtgaacaagcccattgaacacaatccacctgggaaggatgcttccaatagaatagctagagctcttgggaaggctgcagatatggctaactcaaataaagccaggaaggcacagaggatgcagtatgttccgacaatcactaatcatactcaagtttggtgggttcctaatgttgttgttgtacatgaaaaggaagggatagaggttgtccatctagcttctggacgtacaatatgcaagcttcatttaaatgaaggaggccttcatgcagatattaatggagatggagttctggatcatgtccaggttgttggtggaaatggtattaaagagcagactgtcaagttttgggaggacattgatacagctggtttagaggtcgcgactcctatcctggtccagacagacgatgggcataaacacaggagaggaagccatggtgatatcatctttttgacaagccggggagaggtgacatcgtactctcctgggctgctcggccatgatgcggtgtggagatggcaagtatcatcaggggcgacatggtccaaccttccatctccatcgggaatgatggagaacatagtggtgcctaccttgaaggccttctccctacgtgcctatgacccgaaagaggtgatcatcgccggtggtgaccaggaagcggtggtgctctctccttctggtggcatactggccatgatcgagctcccagcgccccccactcacgctcacctcctggaggatttctccggggacggtctcaccgacatgattgtggtaacttccggtggaatatatggattcgtgcagacaaggcagcctggggctcttttcttcagcacgctggtggggtgcctgatagttgtgatcggcgtggtattcgtgtctctgcacctcagttcgtccaatgccgccaaacccagggcttcctcgtctgaatacagatgatgttttgatatgcaagggccaagaggtatccgataaaactggaaagcaaggaatctggtatttgcagggggagcaaggtatgctatgtttatgcagacacctcttgggagaaggaatcatggtgtaaagcactccgtcttgcttctactacggacaaggacaaactcaaatcccatgaaatgctgacccaagagttccgcagttacatgtcctctctgaaagctggatacccttcctttctgggaccctcgacactctccagtcaggaacatgtgcttgtggacaacactgtgaagaatgatggaccttcaaaactccgaggttttctcaaacgattggtgggaaagaaggcatctgccaaggcttctcaggagagcaaaacaggtccggcgccatctaaacaagatacaagccaacccagtactcctagctccactatgagtttcaacagccagctaccagcttcccccagtgcaaaggtggatgaaaagcttgccgatgacggtacactttgttggaacctcctaatctcccggttgttttttgatgctaaaatgaatgatgagatgaacaaagccatcagagcacgtattcagcgaacattgtcgaacaccagaactccagcctacattggtgagatcacgcttactgacctcaaccttggcaagctcccaccatctctgcacagaatgagagtcctcccactggatttggacgaatcgtgggctttcgaagttgacttcgagtgttctagtggaatactgctgcatatcgaaacaagacttgaggttcaggcgccagagctggaaaaggacattatgaagactgatattagaggcaatcctaatggggacgcgagttcagatttccttgatagtattgagcaatatggtaaccaattcgggccttcagaagtttcggattttgcagcagaggtcaacgatgaagcagataccttaaggaaatcaaagagcgctgggtgggcatcaacatatatgtcaaggtggagaagtatcttgaattcaatagcggaccaggtttcacagttcgtggaacgatgcggatacatctaaagcctcctccgggtgatcgagtttggtatgggtttacgtccatgccggagatagagtgggagttggaatcatcggttggggataggaagataagcagcagttacatcgcctcgcttatcggcaacaggatcaagatacggatgactgggtgccccgcagaattgcaccttttatatggctgaaccgtgagcccgctgataggcgtgctgcagacacaactagagagatgatgccaggggaagcttccacatccaaggccattgcaaagaacaagtcgagtccgctgccgtctacaaaaagaatcaccaacggttcctggaacaagacaaagatacgtgttgatgggcaagagcaagagcaggcagaagcatcaacgagctcgcagtcttggctggtttcagcaaatggtgatgcaacaagggaacagctgaggatgccactgctgagcagcagcggagacgagagagcaggccctgtggaggagcagcaagcatcaccttctgctgctgaggaggagggagatgcgaagaagaggaagaggcgtgcacgggtgatggatctaggaaggaggatgggcgacaagctggaagagaagggcaagcgtttcgtcgggaagatgcgggagaacgcgaggaacaaccgcttgctattgccggacttggagcaggccaccacccctcctgctcctgctcctagttaggcattttaaggatgttactcgacaaaatgaaaattaatcagttgcagcgcctagcaacagctcctaattaggagcacttgtattatgtaaaagaaagaaagaaaaagcttatgagatatgattgtaccacacagatggatgtatgcatctctcatctcacccactgaattaacacaaca

SEQ ID NO: 53751 - DNA, 5945 bp, Zea Mays
ccgcacacaagtcctcacgatatttagattcttatgcagctagttatacacgaattcaaattctatatttaaaaggagtaccaaacaggtccaatgtgtgtaataaaaagaaaaaaaaagattccagtagcagcagtaaagcccattcgtatgtggccctgctccggaccgaaagataaagcccatttgaaatccagctcggcctgctgtcagttcaggagcaggacgagtcggggtcggcgcggcggcaggccgcaggccggcagcaggctctcgcttcgctctctcgttgtctgtcgagaggaagaagacgaggcgagggacggcagcagtagcagctccagcatcttctagcttcttcattcatgggattcggtctctactaggattaggggtgcttcatttcatccgatccccaacgacttgacctgattctgatctcgacgacgatgcggaagcgggatctgggcatcctgctgctcgccgccttcgccatcttcttctccctccaccacgaaggcgacttctccttccgggagtcctggtaccacctcaccgacgaggacttccccatcaagtacgaggccgaccgcctgcccccgccgctcgtcgccgatctcaacggcgacggcaagcccgaggtcctcctccccacccacgacgccaagatccaggttctccagccgccccacgcccgccacctcaacgatgactccgccttccaggaggcccgtgtcatggccgacatctctctcctccccgacaacgtccgcctcgcctcggggaggcgccccatcgccatggccgtcggcaacgtcgaccgctcctacagacctggcgaggtcaggaagcaggtgctcgtcgtcgtcacctccggatggtcagtcatgtgcttcgaccataacctcaagaagctgtgggagcacaacctccaggacgatttccctcatgccgcccaccaccgcgaggtcgcaatctccataaccaattatactctcaagcatggagatgcaggcctcgtcatcgttggaggaaggatggagatgcagcatcattcagcagatctcttcgatgaatttatgataccagaacacaacatggatgatcgccgtcgaagcgccagtgagaaacagggctctgaggctggcaatgcagacctgcgccattttgccctttatgccttcgctggacgtagtggcgaccgtagatggagccggaagaatgagaacatccagtcacagccatcagatgcttctgtgatgttaccacagcataattacaaactcgacgttcatgccctcaatagtcatcaacctggtcagttcgaatgtcgtgaattcagagaatcaatccttggcatcatgcctcatcattgggagagaggatactaccctacaacttgcacattttaggaagcataaaaggaaacaagttaagagaacgcctggaaaggctgttattaatagcgtgaacaagcccattgaacacaatccacctgggaaggatgcttccaatagaatagctagagctcttgggaaggctgcagatatggctaactcaaataaagccaggaaggcacagaggatgcagtatgttccgacaatcactaatcatactcaagtttggtgggttcctaatgttgttgttgtacatgaaaaggaagggatagaggttgtccatctagcttctggacgtacaatatgcaagcttcatttaaatgaaggaggccttcatgcagatattaatggagatggagttctggatcatgtccaggttgttggtggaaatggtattaaagagcagactgtcgtgagtggatcaatggaagtgctgaaaccctgttgggcagtcgctacatccggtgtgccagtgcgggagcaactttttaacgtctctatctgccattacaaccattttaatctgttccatcatggtgacttctcgagaagttttgggaggacattgatacagctggtttagaggtcgcgactcctatcctggtccagacagacgatgggcataaacacaggagaggaagccatggtgatatcatctttttgacaagccggggagaggtgacatcgtactctcctgggctgctcggccatgatgcggtgtggagatggcaagtatcatcaggggcgacatggtccaaccttccatctccatcgggaatgatggagaacatagtggtgcctaccttgaaggccttctccctacgtgcctatgacccgaaagaggtgatcatcgccggtggtgaccaggaagcggtggtgctctctccttctggtggcatactggccatgatcgagctcccagcgccccccactcacgctcacctcctggaggatttctccggggacggtctcaccgacatgattgtggtaacttccggtggaatatatggattcgtgcagacaaggcagcctggggctcttttcttcagcacgctggtggggtgcctgatagttgtgatcggcgtggtattcgtgtctctgcacctcagttcgtccaatgccgccaaacccagggcttcctcgtctgaatacagatgatgttttgatatgcaaggtcaagagacttttggtactcctatgttctagtagtctatatatttaaccaaatgagaattcgtgttattgtatgataagaattgttcctactagtatatctcatgatatactgatagtgcaatctcgttttttgttgtctaccttggtgttcctagcccccacaaccatttgtacgttggttttttttttaagtttgtttggtcagcaggtcaggcaacaatccagtccatctaatttgagtacatgatggtcaagattgtttcctggtcgacaagttgcctgcccggctataaacaaaatatgatgtcctagcatgcaaagctcgtcttgtctacagtagaatgtgtaaaatagaagatgcagacaagtttgaaatagaaaatgagatataaaatagaagacgtagacaagtttgaaatatagaatgagataggagatctgttgaagatagtttgaagttgaagatagtttgaagatagtcttattgtgttgtcacaattctaccaaagagagggaaagaaaaaaaaatgacaccacacgtcaggctcagctcacagaggccaccgccgccgtgttcctctgtcccgcgggcccccaccccacccgcgtcttcaacttcctgcctgccgctcttctccttgtttgttcccttccgtctaatttggctgcgggtgcaggtggaggccgaggccgaggccaacgccgcctgcgcctggcctgccgtgaggtggaggcggaggcggaggccgaagccaacgccgcccgcgcctggcctgccgttccgcgtcatcttcttccttcgcgtaacgacgccggccaggccaataaataaacaatttccaattccgttcctggaggacgtctgcacggggaccttcccagcgggcgacggccggctgcatccatggcggtggccttcctgctgctgggattgggtttcctccttggcctcctctccctggcgatcgcggaggggctgacgctcctttgggccatccgaagcctcacgcgccgcacatcggcctcacgcagcacgccgccgccatcactccccatccacccgacgccggcgcggtctgtgtctcgccacagcctcaaccgacagggcttcttatggatgctggagcaacccaaggatagcagcatcaatggcgctagcccagggatcagagacaggaagctcctcgtcgaggttttccctgtaaaaatgtctgctacgcttcaaggacattccctcaccttgtctggacccgatgatgcctcgcagctaaccattgacctgctcggttgcacagttgctgctgtttctgcatccaatctgccctcacgtaaatgggccaagaggtatccgataaaactggaaagcaaggaatctggtatttgcagggggagcaaggtatgctatgtttatgcagacacctcttgggagaaggaatcatggtgtaaagcactccgtcttgcttctactacggacaaggacaaactcaaatcccatgaaatgctgacccaagagttccgcagttacatgtcctctctgaaagctggatacccttcctttctgggaccctcgacactctccagtcaggaacatgtgcttgtggacaacactgtgaagaatgatggaccttcaaaactccgaggttttctcaaacgattggtgggaaagaaggcatctgccaaggcttctcaggagagcaaaacaggtccggcgccatctaaacaagatacaagccaacccagtactcctagctccactatgagtttcaacagccagctaccagcttcccccagtgcaaaggtggatgaaaagcttgccgatgacggtacactttgttggaacctcctaatctcccggttgttttttgatgctaaaatgaatgatgagatgaacaaagccatcagagcacgtattcagcgaacattgtcgaacaccagaactccagcctacattggtgagatcacgcttactgacctcaaccttggcaagctcccaccatctctgcacagaatgagagtcctcccactggatttggacgaatcgtgggctttcgaagttgacttcgagtgttctagtggaatactgctgcatatcgaaacaagacttgaggttcaggcgccagagctggaaaaggacattatgaagactgatattagaggcaatcctaatggggacgcgagttcagatttccttgatagtattgagcaatatggtaaccaattcgggccttcagaagtttcggattttgcagcagaggtcaacgatgaagcagataccttaaggaaatcaaagagcgctgggtgggcatcaacatatatgtcaaggtggagaagtatcttgaattcaatagcggaccaggtttcacaggtgccgctatcattggcgattaaaatttcttcagttcgtggaacgatgcggatacatctaaagcctcctccgggtgatcgagtttggtatgggtttacgtccatgccggagatagagtgggagttggaatcatcggttggggataggaagataagcagcagttacatcgcctcgcttatcggcaacaggatcaaggcttcggttcgtcagatcttggtgatgcccaactgtgaaagctttcctatttcctggatgatagcagatacggatgactgggtgccccgcagaattgcaccttttatatggctgaaccgtgagcccgctgataggcgtgctgcagacacaactagagagatgatgccaggggaagcttccacatccaaggccattgcaaagaacaagtcgagtccgctgccgtctacaaaaagaatcaccaacggttcctggaacaagacaaagatacgtgttgatgggcaagagcaagagcaggcagaagcatcaacgagctcgcagtcttggctggtttcagcaaatggtgatgcaacaagggaacagctgaggatgccactgctgagcagcagcggagacgagagagcaggccctgtggaggagcagcaagcatcaccttctgctgctgaggaggagggagatgcgaagaagaggaagaggcgtgcacgggtgatggatctaggaaggaggatgggcgacaagctggaagagaagggcaagcgtttcgtcgggaagatgcgggagaacgcgaggaacaaccgcttgctattgccggacttggagcaggccaccacccctcctgctcctgctcctagttaggcattttaaggatgttactcgacaaaatgaaaattaatcagttgcagcgcctagcaacagctcctaattaggagcacttgtattatgtaaaagaaagaaagaaaaagcttatgagatatgattgtaccacacagatggatgtatgcatctctcatctcacccactgaattaacacaaca

SEQ ID NO: 53752 - DNA, 5914 bp, Zea Mays
ccgcacacaagtcctcacgatatttagattcttatgcagctagttatacacgaattcaaattctatatttaaaaggagtaccaaacaggtccaatgtgtgtaataaaaagaaaaaaaaagattccagtagcagcagtaaagcccattcgtatgtggccctgctccggaccgaaagataaagcccatttgaaatccagctcggcctgctgtcagttcaggagcaggacgagtcggggtcggcgcggcggcaggccgcaggccggcagcaggctctcgcttcgctctctcgttgtctgtcgagaggaagaagacgaggcgagggacggcagcagtagcagctccagcatcttctagcttcttcattcatgggattcggtctctactaggattaggggtgcttcatttcatccgatccccaacgacttgacctgattctgatctcgacgacgatgcggaagcgggatctgggcatcctgctgctcgccgccttcgccatcttcttctccctccaccacgaaggcgacttctccttccgggagtcctggtaccacctcaccgacgaggacttccccatcaagtacgaggccgaccgcctgcccccgccgctcgtcgccgatctcaacggcgacggcaagcccgaggtcctcctccccacccacgacgccaagatccaggttctccagccgccccacgcccgccacctcaacgatgactccgccttccaggaggcccgtgtcatggccgacatctctctcctccccgacaacgtccgcctcgcctcggggaggcgccccatcgccatggccgtcggcaacgtcgaccgctcctacagacctggcgaggtcaggaagcaggtgctcgtcgtcgtcacctccggatggtcagtcatgtgcttcgaccataacctcaagaagctgtgggagcacaacctccaggacgatttccctcatgccgcccaccaccgcgaggtcgcaatctccataaccaattatactctcaagcatggagatgcaggcctcgtcatcgttggaggaaggatggagatgcagcatcattcagcagatctcttcgatgaatttatgataccagaacacaacatggatgatcgccgtcgaagcgccagtgagaaacagggctctgaggctggcaatgcagacctgcgccattttgccctttatgccttcgctggacgtagtggcgaccgtagatggagccggaagaatgagaacatccagtcacagccatcagatgcttctgtgatgttaccacagcataattacaaactcgacgttcatgccctcaatagtcatcaacctggtcagttcgaatgtcgtgaattcagagaatcaatccttggcatcatgcctcatcattgggataggagagaggatactaccctacaacttgcacattttaggaagcataaaaggaaacaagttaagagaacgcctggaaaggctgttattaatagcgtgaacaagcccattgaacacaatccacctgggaaggatgcttccaatagaatagctagagctcttgggaaggctgcagatatggctaactcaaataaagccaggaaggcacagaggatgcagtatgttccgacaatcactaatcatactcaagtttggtgggttcctaatgttgttgttgtacatgaaaaggaagggatagagcttcatttaaatgaaggaggccttcatgcagatattaatggagatggagttctggatcatgtccaggttgttggtggaaatggtattaaagagcagactgtcgtgagtggatcaatggaagtgctgaaaccctgttgggcagtcgctacatccggtgtgccagtgcgggagcaactttttaacgtctctatctgccattacaaccattttaatctgttccatcatggtgacttctcgagaagttttgggaggacattgatacagctggtttagaggtcgcgactcctatcctggtccagacagacgatgggcataaacacaggagaggaagccatggtgatatcatctttttgacaagccggggagaggtgacatcgtactctcctgggctgctcggccatgatgcggtgtggagatggcaagtatcatcaggggcgacatggtccaaccttccatctccatcgggaatgatggagaacatagtggtgcctaccttgaaggccttctccctacgtgcctatgacccgaaagaggtgatcatcgccggtggtgaccaggaagcggtggtgctctctccttctggtggcatactggccatgatcgagctcccagcgccccccactcacgctcacctcctggaggatttctccggggacggtctcaccgacatgattgtggtaacttccggtggaatatatggattcgtgcagacaaggcagcctggggctcttttcttcagcacgctggtggggtgcctgatagttgtgatcggcgtggtattcgtgtctctgcacctcagttcgtccaatgccgccaaacccagggcttcctcgtctgaatacagatgatgttttgatatgcaaggtcaagagacttttggtactcctatgttctagtagtctatatatttaaccaaatgagaattcgtgttattgtatgataagaattgttcctactagtatatctcatgatatactgatagtgcaatctcgttttttgttgtctaccttggtgttcctagcccccacaaccatttgtacgttggttttttttttaagtttgtttggtcagcaggtcaggcaacaatccagtccatctaatttgagtacatgatggtcaagattgtttcctggtcgacaagttgcctgcccggctataaacaaaatatgatgtcctagcatgcaaagctcgtcttgtctacagtagaatgtgtaaaatagaagatgcagacaagtttgaaatagaaaatgagatataaaatagaagacgtagacaagtttgaaatatagaatgagataggagatctgttgaagatagtttgaagttgaagatagtttgaagatagtcttattgtgttgtcacaattctaccaaagagagggaaagaaaaaaaaatgacaccacacgtcaggctcagctcacagaggccaccgccgccgtgttcctctgtcccgcgggcccccaccccacccgcgtcttcaacttcctgcctgccgctcttctccttgtttgttcccttccgtctaatttggctgcgggtgcaggtggaggccgaggccgaggccaacgccgcctgcgcctggcctgccgtgaggtggaggcggaggcggaggccgaagccaacgccgcccgcgcctggcctgccgttccgcgtcatcttcttccttcgcgtaacgacgccggccaggccaataaataaacaatttccaattccgttcctggaggacgtctgcacggggaccttcccagcgggcgacggccggctgcatccatggcggtggccttcctgctgctgggattgggtttcctccttggcctcctctccctggcgatcgcggaggggctgacgctcctttgggccatccgaagcctcacgcgccgcacatcggcctcacgcagcacgccgccgccatcactccccatccacccgacgccggcgcggtctgtgtctcgccacagcctcaaccgacagggcttcttatggatgctggagcaacccaaggatagcagcatcaatggcgctagcccagggatcagagacaggaagctcctcgtcgaggttttccctgtaaaaatgtctgctacgcttcaaggacattccctcaccttgtctggacccgatgatgcctcgcagctaaccattgacctgctcggttgcacagttgctgctgtttctgcatccaatctgccctcacgtaaatgggccaagaggtatccgataaaactggaaagcaaggaatctggtatttgcagggggagcaaggtatgctatgtttatgcagacacctcttgggagaaggaatcatggtgtaaagcactccgtcttgcttctactacggacaaggacaaactcaaatcccatgaaatgctgacccaagagttccgcagttacatgtcctctctgaaagctggatacccttcctttctgggaccctcgacactctccagtcaggaacatgtgcttgtggacaacactgtgaagaatgatggaccttcaaaactccgaggttttctcaaacgattggtgggaaagaaggcatctgccaaggcttctcaggagagcaaaacaggtccggcgccatctaaacaagatacaagccaacccagtactcctagctccactatgagtttcaacagccagctaccagcttcccccagtgcaaaggtggatgaaaagcttgccgatgacggtacactttgttggaacctcctaatctcccggttgttttttgatgctaaaatgaatgatgagatgaacaaagccatcagagcacgtattcagcgaacattgtcgaacaccagaactccagcctacattggtgagatcacgcttactgacctcaaccttggcaagctcccaccatctctgcacagaatgagagtcctcccactggatttggacgaatcgtgggctttcgaagttgacttcgagtgttctagtggaatactgctgcatatcgaaacaagacttgaggttcaggcgccagagctggaaaaggacattatgaagactgatattagaggcaatcctaatggggacgcgagttcagatttccttgatagtattgagcaatatggtaaccaattcgggccttcagaagtttcggattttgcagcagaggtcaacgatgaagcagataccttaaggaaatcaaagagcgctgggtgggcatcaacatatatgtcaaggtggagaagtatcttgaattcaatagcggaccaggtttcacaggtgccgctatcattggcgattaaaatttcttcagttcgtggaacgatgcggatacatctaaagcctcctccgggtgatcgagtttggtatgggtttacgtccatgccggagatagagtgggagttggaatcatcggttggggataggaagataagcagcagttacatcgcctcgcttatcggcaacaggatcaaggcttcggttcgtcagatcttggtgatgcccaactgtgaaagctttcctatttcctggatgatagcagatacggatgactgggtgccccgcagaattgcaccttttatatggctgaaccgtgagcccgctgataggcgtgctgcagacacaactagagagatgatgccaggggaagcttccacatccaaggccattgcaaagaacaagtcgagtccgctgccgtctacaaaaagaatcaccaacggttcctggaacaagacaaagatacgtgttgatgggcaagagcaagagcaggcagaagcatcaacgagctcgcagtcttggctggtttcagcaaatggtgatgcaacaagggaacagctgaggatgccactgctgagcagcagcggagacgagagagcaggccctgtggaggagcagcaagcatcaccttctgctgctgaggaggagggagatgcgaagaagaggaagaggcgtgcacgggtgatggatctaggaaggaggatgggcgacaagctggaagagaagggcaagcgtttcgtcgggaagatgcgggagaacgcgaggaacaaccgcttgctattgccggacttggagcaggccaccacccctcctgctcctgctcctagttaggcattttaaggatgttactcgacaaaatgaaaattaatcagttgcagcgcctagcaacagctcctaattaggagcacttgtattatgtaaaagaaagaaagaaaaagcttatgagatatgattgtaccacacagatggatgtatgcatctctcatctcacccactgaattaacacaaca

SEQ ID NO: 53753 - DNA, 5798 bp, Zea Mays
ccgcacacaagtcctcacgatatttagattcttatgcagctagttatacacgaattcaaattctatatttaaaaggagtaccaaacaggtccaatgtgtgtaataaaaagaaaaaaaaagattccagtagcagcagtaaagcccattcgtatgtggccctgctccggaccgaaagataaagcccatttgaaatccagctcggcctgctgtcagttcaggagcaggacgagtcggggtcggcgcggcggcaggccgcaggccggcagcaggctctcgcttcgctctctcgttgtctgtcgagaggaagaagacgaggcgagggacggcagcagtagcagctccagcatcttctagcttcttcattcatgggattcggtctctactaggattaggggtgcttcatttcatccgatccccaacgacttgacctgattctgatctcgacgacgatgcggaagcgggatctgggcatcctgctgctcgccgccttcgccatcttcttctccctccaccacgaaggcgacttctccttccgggagtcctggtaccacctcaccgacgaggacttccccatcaagtacgaggccgaccgcctgcccccgccgctcgtcgccgatctcaacggcgacggcaagcccgaggtcctcctccccacccacgacgccaagatccaggttctccagccgccccacgcccgccacctcaacgatgactccgccttccaggaggcccgtgtcatggccgacatctctctcctccccgacaacgtccgcctcgcctcggggaggcgccccatcgccatggccgtcggcaacgtcgaccgctcctacagacctggcgaggtcaggaagcaggtgctcgtcgtcgtcacctccggatggtcagtcatgtgcttcgaccataacctcaagaagctgtgggagcacaacctccaggacgatttccctcatgccgcccaccaccgcgaggtcgcaatctccataaccaattatactctcaagcatggagatgcaggcctcgtcatcgttggaggaaggatggagatgcagcatcattcagcagatctcttcgatgaatttatgataccagaacacaacatggatgatcgccgtcgaagcgccagtgagaaacagggctctgaggctggcaatgcagacctgcgccattttgccctttatgccttcgctggacgtagtggcgaccgtagatggagccggaagaatgagaacatccagtcacagccatcagatgcttctgtgatgttaccacagcataattacaaactcgacgttcatgccctcaatagtcatcaacctggtcagttcgaatgtcgtgaattcagagaatcaatccttggcatcatgcctcatcattgggataggagagaggatactaccctacaacttgcacattttaggaagcataaaaggaaacaagttaagagaacgcctggaaaggctgttattaatagcgtgaacaagcccattgaacacaatccacctgggaaggatgcttccaatagaatagctagagctcttgggaaggctgcagatatggctaactcaaataaagccaggaaggcacagaggatgcagtatgttccgacaatcactaatcatactcaagtttggtgggttcctaatgttgttgttgtacatgaaaaggaagggatagaggttgtccatctagcttctggacgtacaatatgcaagcttcatttaaatgaaggaggccttcatgcagatattaatggagatggagttctggatcatgtccaggttgttggtggaaatggtattaaagagcagactgtcaagttttgggaggacattgatacagctggtttagaggtcgcgactcctatcctggtccagacagacgatgggcataaacacaggagaggaagccatggtgatatcatctttttgacaagccggggagaggtgacatcgtactctcctgggctgctcggccatgatgcggtgtggagatggcaagtatcatcaggggcgacatggtccaaccttccatctccatcgggaatgatggagaacatagtggtgcctaccttgaaggccttctccctacgtgcctatgacccgaaagaggtgatcatcgccggtggtgaccaggaagcggtggtgctctctccttctggtggcatactggccatgatcgagctcccagcgccccccactcacgctcacctcctggaggatttctccggggacggtctcaccgacatgattgtggtaacttccggtggaatatatggattcgtgcagacaaggcagcctggggctcttttcttcagcacgctggtggggtgcctgatagttgtgatcggcgtggtattcgtgtctctgcacctcagttcgtccaatgccgccaaacccagggcttcctcgtctgaatacagatgatgttttgatatgcaaggtcaagagacttttggtactcctatgttctagtagtctatatatttaaccaaatgagaattcgtgttattgtatgataagaattgttcctactagtatatctcatgatatactgatagtgcaatctcgttttttgttgtctaccttggtgttcctagcccccacaaccatttgtacgttggttttttttttaagtttgtttggtcagcaggtcaggcaacaatccagtccatctaatttgagtacatgatggtcaagattgtttcctggtcgacaagttgcctgcccggctataaacaaaatatgatgtcctagcatgcaaagctcgtcttgtctacagtagaatgtgtaaaatagaagatgcagacaagtttgaaatagaaaatgagatataaaatagaagacgtagacaagtttgaaatatagaatgagataggagatctgttgaagatagtttgaagttgaagatagtttgaagatagtcttattgtgttgtcacaattctaccaaagagagggaaagaaaaaaaaatgacaccacacgtcaggctcagctcacagaggccaccgccgccgtgttcctctgtcccgcgggcccccaccccacccgcgtcttcaacttcctgcctgccgctcttctccttgtttgttcccttccgtctaatttggctgcgggtgcaggtggaggccgaggccgaggccaacgccgcctgcgcctggcctgccgtgaggtggaggcggaggcggaggccgaagccaacgccgcccgcgcctggcctgccgttccgcgtcatcttcttccttcgcgtaacgacgccggccaggccaataaataaacaatttccaattccgttcctggaggacgtctgcacggggaccttcccagcgggcgacggccggctgcatccatggcggtggccttcctgctgctgggattgggtttcctccttggcctcctctccctggcgatcgcggaggggctgacgctcctttgggccatccgaagcctcacgcgccgcacatcggcctcacgcagcacgccgccgccatcactccccatccacccgacgccggcgcggtctgtgtctcgccacagcctcaaccgacagggcttcttatggatgctggagcaacccaaggatagcagcatcaatggcgctagcccagggatcagagacaggaagctcctcgtcgaggttttccctgtaaaaatgtctgctacgcttcaaggacattccctcaccttgtctggacccgatgatgcctcgcagctaaccattgacctgctcggttgcacagttgctgctgtttctgcatccaatctgccctcacgtaaatgggccaagaggtatccgataaaactggaaagcaaggaatctggtatttgcagggggagcaaggtatgctatgtttatgcagacacctcttgggagaaggaatcatggtgtaaagcactccgtcttgcttctactacggacaaggacaaactcaaatcccatgaaatgctgacccaagagttccgcagttacatgtcctctctgaaagctggatacccttcctttctgggaccctcgacactctccagtcaggaacatgtgcttgtggacaacactgtgaagaatgatggaccttcaaaactccgaggttttctcaaacgattggtgggaaagaaggcatctgccaaggcttctcaggagagcaaaacaggtccggcgccatctaaacaagatacaagccaacccagtactcctagctccactatgagtttcaacagccagctaccagcttcccccagtgcaaaggtggatgaaaagcttgccgatgacggtacactttgttggaacctcctaatctcccggttgttttttgatgctaaaatgaatgatgagatgaacaaagccatcagagcacgtattcagcgaacattgtcgaacaccagaactccagcctacattggtgagatcacgcttactgacctcaaccttggcaagctcccaccatctctgcacagaatgagagtcctcccactggatttggacgaatcgtgggctttcgaagttgacttcgagtgttctagtggaatactgctgcatatcgaaacaagacttgaggttcaggcgccagagctggaaaaggacattatgaagactgatattagaggcaatcctaatggggacgcgagttcagatttccttgatagtattgagcaatatggtaaccaattcgggccttcagaagtttcggattttgcagcagaggtcaacgatgaagcagataccttaaggaaatcaaagagcgctgggtgggcatcaacatatatgtcaaggtggagaagtatcttgaattcaatagcggaccaggtttcacaggtgccgctatcattggcgattaaaatttcttcagttcgtggaacgatgcggatacatctaaagcctcctccgggtgatcgagtttggtatgggtttacgtccatgccggagatagagtgggagttggaatcatcggttggggataggaagataagcagcagttacatcgcctcgcttatcggcaacaggatcaagatcttggtgatgcccaactgtgaaagctttcctatttcctggatgatagcagatacggatgactgggtgccccgcagaattgcaccttttatatggctgaaccgtgagcccgctgataggcgtgctgcagacacaactagagagatgatgccaggggaagcttccacatccaaggccattgcaaagaacaagtcgagtccgctgccgtctacaaaaagaatcaccaacggttcctggaacaagacaaagatacgtgttgatgggcaagagcaagagcaggcagaagcatcaacgagctcgcagtcttggctggtttcagcaaatggtgatgcaacaagggaacagctgaggatgccactgctgagcagcagcggagacgagagagcaggccctgtggaggagcagcaagcatcaccttctgctgctgaggaggagggagatgcgaagaagaggaagaggcgtgcacgggtgatggatctaggaaggaggatgggcgacaagctggaagagaagggcaagcgtttcgtcgggaagatgcgggagaacgcgaggaacaaccgcttgctattgccggacttggagcaggccaccacccctcctgctcctgctcctagttaggcattttaaggatgttactcgacaaaatgaaaattaatcagttgcagcgcctagcaacagctcctaattaggagcacttgtattatgtaaaagaaagaaagaaaaagcttatgagatatgattgtaccacacagatggatgtatgcatctctcatctcacccactgaattaacacaaca

SEQ ID NO: 53754 - DNA, 3615 bp, Zea Mays
ccgcacacaagtcctcacgatatttagattcttatgcagctagttatacacgaattcaaattctatatttaaaaggagtaccaaacaggtccaatgtgtgtaataaaaagaaaaaaaaagattccagtagcagcagtaaagcccattcgtatgtggccctgctccggaccgaaagataaagcccatttgaaatccagctcggcctgctgtcagttcaggagcaggacgagtcggggtcggcgcggcggcaggccgcaggccggcagcaggctctcgcttcgctctctcgttgtctgtcgagaggaagaagacgaggcgagggacggcagcagtagcagctccagcatcttctagcttcttcattcatgggattcggtctctactaggattaggggtgcttcatttcatccgatccccaacgacttgacctgattctgatctcgacgacgatgcggaagcgggatctgggcatcctgctgctcgccgccttcgccatcttcttctccctccaccacgaaggcgacttctccttccgggagtcctggtaccacctcaccgacgaggacttccccatcaagtacgaggccgaccgcctgcccccgccgctcgtcgccgatctcaacggcgacggcaagcccgaggtcctcctccccacccacgacgccaagatccaggttctccagccgccccacgcccgccacctcaacgatgactccgccttccaggaggcccgtgtcatggccgacatctctctcctccccgacaacgtccgcctcgcctcggggaggcgccccatcgccatggccgtcggcaacgtcgaccgctcctacagacctggcgaggtcaggaagcaggtgctcgtcgtcgtcacctccggatggtcagtcatgtgcttcgaccataacctcaagaagctgtgggagcacaacctccaggacgatttccctcatgccgcccaccaccgcgaggtcgcaatctccataaccaattatactctcaagcatggagatgcaggcctcgtcatcgttggaggaaggatggagatgcagcatcattcagcagatctcttcgatgaatttatgataccagaacacaacatggatgatcgccgtcgaagcgccagtgagaaacagggctctgaggctggcaatgcagacctgcgccattttgccctttatgccttcgctggacgtagtggcgaccgtagatggagccggaagaatgagaacatccagtcacagccatcagatgcttctgtgatgttaccacagcataattacaaactcgacgttcatgccctcaatagtcatcaacctggtcagttcgaatgtcgtgaattcagagaatcaatccttggcatcatgcctcatcattgggataggagagaggatactaccctacaacttgcacattttaggaagcataaaaggaaacaagttaagagaacgcctggaaaggctgttattaatagcgtgaacaagcccattgaacacaatccacctgggaaggatgcttccaatagaatagctagagctcttgggaaggctgcagatatggctaactcaaataaagccaggaaggcacagaggatgcagtatgttccgacaatcactaatcatactcaagtttggtgggttcctaatgttgttgttgtacatgaaaaggaagggatagaggttgtccatctagcttctggacgtacaatatgcaagcttcatttaaatgaaggaggccttcatgcagatattaatggagatggagttctggatcatgtccaggttgttggtggaaatggtattaaagagcagactgtcaagttttgggaggacattgatacagctggtttagaggtcgcgactcctatcctggtccagacagacgatgggcataaacacaggagaggaagccatggtgatatcatctttttgacaagccggggagaggtgacatcgtactctcctgggctgctcggccatgatgcggtgtggagatggcaagtatcatcaggggcgacatggtccaaccttccatctccatcgggaatgatggagaacatagtggtgcctaccttgaaggccttctccctacgtgcctatgacccgaaagaggtgatcatcgccggtggtgaccaggaagcggtggtgctctctccttctggtggcatactggccatgatcgagctcccagcgccccccactcacgctcacctcctggaggatttctccggggacggtctcaccgacatgattgtggtaacttccggtggaatatatggattcgtgcagacaaggcagcctggggctcttttcttcagcacgctggtggggtgcctgatagttgtgatcggcgtggtattcgtgtctctgcacctcagttcgtccaatgccgccaaacccagggcttcctcgtctgaatacagatgatgttttgatatgcaaggtcaagagacttttggtactcctatgttctagtagtctatatatttaaccaaatgagaattcgtgttattgtatgataagaattgttcctactagtatatctcatgatatactgatagtgcaatctcgttttttgttgtctaccttggtgttcctagcccccacaaccatttgtacgttggttttttttttaagtttgtttggtcagcaggtcaggcaacaatccagtccatctaatttgagtacatgatggtcaagattgtttcctggtcgacaagttgcctgcccggctataaacaaaatatgatgtcctagcatgcaaagctcgtcttgtctacagtagaatgtgtaaaatagaagatgcagacaagtttgaaatagaaaatgagatataaaatagaagacgtagacaagtttgaaatatagaatgagataggagatctgttgaagatagtttgaagttgaagatagtttgaagatagtcttattgtgttgtcacaattctaccaaagagagggaaagaaaaaaaaatgacaccacacgtcaggctcagctcacagaggccaccgccgccgtgttcctctgtcccgcgggcccccaccccacccgcgtcttcaacttcctgcctgccgctcttctccttgtttgttcccttccgtctaatttggctgcgggtgcaggtggaggccgaggccgaggccaacgccgcctgcgcctggcctgccgtgaggtggaggcggaggcggaggccgaagccaacgccgcccgcgcctggcctgccgttccgcgtcatcttcttccttcgcgtaacgacgccggccaggccaataaataaacaatttccaattccgttcctggaggacgtctgcacggggaccttcccagcgggcgacggccggctgcatccatggcggtggccttcctgctgctgggattgggtttcctccttggcctcctctccctggcgatcgcggaggggctgacgctcctttgggccatccgaagcctcacgcgccgcacatcggcctcacgcagcacgccgccgccatcactccccatccacccgacgccggcgcggtctgtgtctcgccacagcctcaaccgacaggacacctcatttcatccatccactgctgcagtattccacacgttcacgacctgtaccttgacacctttc

SEQ ID NO: 53755 - DNA, 1596 bp, Zea Mays
ccgcacacaagtcctcacgatatttagattcttatgcagctagttatacacgaattcaaattctatatttaaaaggagtaccaaacaggtccaatgtgtgtaataaaaagaaaaaaaaagattccagtagcagcagtaaagcccattcgtatgtggccctgctccggaccgaaagataaagcccatttgaaatccagctcggcctgctgtcagttcaggagcaggacgagtcggggtcggcgcggcggcaggccgcaggccggcagcaggctctcgcttcgctctctcgttgtctgtcgagaggaagaagacgaggcgagggacggcagcagtagcagctccagcatcttctagcttcttcattcatgggattcggtctctactaggattaggggtgcttcatttcatccgatccccaacgacttgacctgattctgatctcgacgacgatgcggaagcgggatctgggcatcctgctgctcgccgccttcgccatcttcttctccctccaccacgaaggcgacttctccttccgggagtcctggtaccacctcaccgacgaggacttccccatcaagtacgaggccgaccgcctgcccccgccgctcgtcgccgatctcaacggcgacggcaagcccgaggtcctcctccccacccacgacgccaagatccaggttctccagccgccccacgcccgccacctcaacgatgactccgccttccaggaggcccgtgtcatggccgacatctctctcctccccgacaacgtccgcctcgcctcggggaggcgccccatcgccatggccgtcggcaacgtcgaccgctcctacagacctggcgaggtcaggaagcaggtgctcgtcgtcgtcacctccggatggtcagtcatgtgcttcgaccataacctcaagaagctgtgggagcacaacctccaggacgatttccctcatgccgcccaccaccgcgaggtcgcaatctccataaccaattatactctcaagcatggagatgcaggcctcgtcatcgttggaggaaggatggagatgcagcatcattcagcagatctcttcgatgaatttatgataccagaacacaacatggatgatcgccgtcgaagcgccagtgagaaacagggctctgaggctggcaatgcagacctgcgccattttgccctttatgccttcgctggacgtagtggcgaccgtagatggagccggaagaatgagaacatccagtcacagccatcagatgcttctgtgatgttaccacagcataattacaaactcgacgttcatgccctcaatagtcatcaacctggtcagttcgaatgtcgtgaattcagagaatcaatccttggcatcatgcctcatcattgggataggagagaggatactaccctacaacttgcacattttaggaagcataaaaggaaacaagttaagagaacgcctggaaaggctgttattaatagcgtgaacaagcccattgaacacaatccacctgggaaggatgcttccaatagaatagctagagctcttgggaaggctgcagatatggctaactcaaataaagccaggaaggttgtttcttttactg

SEQ ID NO: 53756 - DNA, 1089 bp, Zea Mays
gtgagatctgttcagagggaaactgaatatcttgatataatggtgtccgaaggcttggaaataacacaacctgctctggaccctgatctatcaactgatatccaccatcgaatcacaatccgtaataagatggcaaaagttcacaggagaatatacgacaatcggcctagtatgaattgttctgacgagagcaaaggacctccatgtacaggaatgatcttattcatggatggggtcttgacatgaagcttggatattgcgctcagggtgatcgaacagagaaagttggtgttattgacagtgagtatgtagttcatcaagggataccatcattaggagggccatcacttagcagcaagacacctcgaagatcattggatttgaggacccacatacgaagacaatcatcggctgagctggagaagttcaaggagaggtggaacagggctgtaagggaagatgaaggatggagggatccttttgattcttgattacttggaaagcagagtgtgacacttctgataacaaaactggccagtggccacagtcacagcagtagagtttggaagcggagagcatcttctgcttcatgtcaaaaacacttgtttggttataggatgacgagacggttggttggttataggatgatgacttacatacacacacacacatcataactttatccacatgagttaaaagcgggaacattatcgtcaatacaaggagctgatggagaagttgaaactaacaaagtaacagggggtttccgaaagtgctgtaattttccgttggaaatatctgttcgggagagttgtatagtgtcatgatatacacacttgtgcagttatttgatgaggaaacttacatagcctagagcagatgtgtttcctatattattattgccttgtacaatgtaagatgaattccatgagtcagaaatagcatcaggtctctatgcttatacttggacaagttaagaggatggcacggcatattttttgtgtcaccgcaccgaggttgtcgctctctttatgtgtatcaaaaatataaaagctcttgtttatgtacatgaacgatgttttgggtgtc

SEQ ID NO: 53757 - DNA, 1361 bp, Zea Mays
gtttgagcctcttttcgtaactgtttagtgagatctgttcagagggaaactgaatatcttgatataatggtgtccgaaggcttggaaataacacaacctgctctggaccctgatctatcaactgatatccaccatcgaatcacaatccgtaataagatggcaaaagttcacaggagaatatacgacaatcggcctagtatgaattgttctgacgagagcaaaggacctccatgtacaggaatgatcttattcatggatggggtcttgacatgaagcttggatattgcgctcagggtgatcgaacagagaaagttggtgttattgacagtgagtatgtagttcatcaagggataccatcattaggagggccatcacttagcagcaaggtgcttgacatctcagcaacaaactatttttttagaaacttggagtccggtaggaccaaggatgaagtgtactgattcatccaaactttgtttgaaaaaaaaactaccagagcatcgattttccttgtgtgcttttcttttaccctagttggcatatacctgcatgatagtaatgttaggtgtcatgaattcatgatcgttcaataaaatttgcatgtgccgctactgacatcttgttgacgcagacacctcgaagatcattggatttgaggacccacatacgaagacaatcatcggctgagctggagaagttcaaggagaggtggaacagggctgtaagggaagatgaaggatggagggatccttttgattcttgattacttggaaagcagagtgtgacacttctgataacaaaactggccagtggccacagtcacagcagtagagtttggaagcggagagcatcttctgcttcatgtcaaaaacacttgtttggttataggatgacgagacggttggttggttataggatgatgacttacatacacacacacacatcataactttatccacatgagttaaaagcgggaacattatcgtcaatacaaggagctgatggagaagttgaaactaacaaagtaacagggggtttccgaaagtgctgtaattttccgttggaaatatctgttcgggagagttgtatagtgtcatgatatacacacttgtgcagttatttgatgaggaaacttacatagcctagagcagatgtgtttcctatattattattgccttgtacaatgtaagatgaattccatgagtcagaaatagcatcaggtctctatgcttatacttggacaagttaagaggatggcacggcatattttttgtgtcaccgcaccgaggttgtcgctctctttatgtgtatcaaaaatataaaagctcttgtttatgtacatgaacgatgttttgggtgtc

SEQ ID NO: 53758 - DNA, 2641 bp, Zea Mays
acggaccgaccggcgaccgcacccaatgcaagcaatttttgcggacagggggaccttcctcttcttcttcctcgtccccggcccctgcccctctcccctgcggagacggagcgccaccttcctcaccttctagaaagaactagaaccctccctccagaaccttgaagaccagcccagaccagaccagccccgaagctctccgccggccccgcccttgacgacatgaagcaccagccgccgcgccgctggggcgtcgtggcggcggtcgtcgcactcgtcctcctcgcctgcctccagatccagtaccaccacctcaaggtggatctcggcaaggccggctttgcctctgccacgcaagagaataacgcgatccgcagccgcaatcgcattcgctggggccccgacaggaacggcgcccactccttgccgcgcgggattgtccaccgccactccgacatgtccctccgcccgctctgggaggacgacactgcttccacccacaagaataaaaacagtgactacagtgctctcctcgccatggcagtcggcatctcccaaataaaaaacattgacactatggccctttctgaaggaaaactatgcagtcatgctcttccattatgatggaaatgtagatggatggcgtcatcttgagtggagtgataaggccatacacatccttgctcacaaccaaacaaaatggtggtttgctaagcgttttctgcatcctgatgtcatggctatctatgatttcatttttctatgggatgaagaccttggagtggagaacttcaaccctagaaggtatgcattatggacataataattctttccctatagtcagacacactactcagttgtcacggtggaaccaaaacttaccatattgtcatccaagtgctggatatcagccattttagagcagatcaactaattgattctcatactcttttttgctatggcctggtagttatcaaacattaatcagatattatttattagaatgggaatatgtgcagccagtttgagcctcttttcgtaactgtttagtgagatctgttcagagggaaactgagtaagaacttcaaacaatgtcatcttcacttcctttctactgtagaagcttcctgtgaatacatctatgatttaattgtgtttttatgtgcaaatacgcttcctcatctttcgtgttgtttggtcctagatatcttgatataatggtgtccgaaggcttggaaataacacaacctgctctggaccctgatctatcaactgatatccaccatcgaatcacaatccgtaataagatggcaaaagttcacaggagaatatacgacaatcggcctagtatgaattgttctgacgagagcaaaggacctccatgtacagggtgggtagagggcatggcaccagttttttctcgcactgcttggaaatgtgtatggcatctaattcagaatgatcttattcatggatggggtcttgacatgaagcttggatattgcgctcaggttctcaatatatgttaacagtcttaaaagatattttgataggatgtctgttgactattgagggtgatcgaacagagaaagttggtgttattgacagtgagtatgtagttcatcaagggataccatcattaggagggccatcacttagcagcaaggtgcttgacatctcagcaacaaactatttttttagaaacttggagtccggtaggaccaaggatgaagtgtactgattcatccaaactttgtttgaaaaaaaaactaccagagcatcgattttccttgtgtgcttttcttttaccctagttggcatatacctgcatgatagtaatgttaggtgtcatgaattcatgatcgttcaataaaatttgcatgtgccgctactgacatcttgttgacgcagacacctcgaagatcattggatttgaggacccacatacgaagacaatcatcggctgagctggagaagttcaaggagaggtggaacagggctgtaagggaagatgaaggatggagggatccttttgattcttgattacttggaaagcagagtgtgacacttctgataacaaaactggccagtggccacagtcacagcagtagagtttggaagcggagagcatcttctgcttcatgtcaaaaacacttgtttggttataggatgacgagacggttggttggttataggatgatgacttacatacacacacacacatcataactttatccacatgagttaaaagcgggaacattatcgtcaatacaaggagctgatggagaagttgaaactaacaaagtaacagggggtttccgaaagtgctgtaattttccgttggaaatatctgttcgggagagttgtatagtgtcatgatatacacacttgtgcagttatttgatgaggaaacttacatagcctagagcagatgtgtttcctatattattattgccttgtacaatgtaagatgaattccatgagtcagaaatagcatcaggtctctatgcttatacttggacaagttaagaggatggcacggcatattttttgtgtcaccgcaccgaggttgtcgctctctttatgtgtatcaaaaatataaaagctcttgtttatgtacatgaacgatgttttgggtgtc

SEQ ID NO: 53759 - DNA, 2246 bp, Zea Mays
acggaccgaccggcgaccgcacccaatgcaagcaatttttgcggacagggggaccttcctcttcttcttcctcgtccccggcccctgcccctctcccctgcggagacggagcgccaccttcctcaccttctagaaagaactagaaccctccctccagaaccttgaagaccagcccagaccagaccagccccgaagctctccgccggccccgcccttgacgacatgaagcaccagccgccgcgccgctggggcgtcgtggcggcggtcgtcgcactcgtcctcctcgcctgcctccagatccagtaccaccacctcaaggtggatctcggcaaggccggctttgcctctgccacgcaagagaataacgcgatccgcagccgcaatcgcattcgctggggccccgacaggaacggcgcccactccttgccgcgcgggattgtccaccgccactccgacatgtccctccgcccgctctgggaggacgacactgcttccacccacaagaataaaaacagtgactacagtgctctcctcgccatggcagtcggcatctcccaaataaaaaacattgacactatggcccgtaagtttctgaaggaaaactatgcagtcatgctcttccattatgatggaaatgtagatggatggcgtcatcttgagtggagtgataaggccatacacatccttgctcacaaccaaacaaaatggtggtttgctaagcgttttctgcatcctgatgtcatggctatctatgatttcatttttctatgggatgaagaccttggagtggagaacttcaaccctagaagatatcttgatataatggtgtccgaaggcttggaaataacacaacctgctctggaccctgatctatcaactgatatccaccatcgaatcacaatccgtaataagatggcaaaagttcacaggagaatatacgacaatcggcctagtatgaattgttctgacgagagcaaaggacctccatgtacagggtgggtagagggcatggcaccagttttttctcgcactgcttggaaatgtgtatggcatctaattcagaatgatcttattcatggatggggtcttgacatgaagcttggatattgcgctcaggttctcaatatatgttaacagtcttaaaagatattttgataggatgtctgttgactattgagggtgatcgaacagagaaagttggtgttattgacagtgagtatgtagttcatcaagggataccatcattaggagggccatcacttagcagcaaggtgcttgacatctcagcaacaaactatttttttagaaacttggagtccggtaggaccaaggatgaagtgtactgattcatccaaactttgtttgaaaaaaaaactaccagagcatcgattttccttgtgtgcttttcttttaccctagttggcatatacctgcatgatagtaatgttaggtgtcatgaattcatgatcgttcaataaaatttgcatgtgccgctactgacatcttgttgacgcagacacctcgaagatcattggatttgaggacccacatacgaagacaatcatcggctgagctggagaagttcaaggagaggtggaacagggctgtaagggaagatgaaggatggagggatccttttgattcttgattacttggaaagcagagtgtgacacttctgataacaaaactggccagtggccacagtcacagcagtagagtttggaagcggagagcatcttctgcttcatgtcaaaaacacttgtttggttataggatgacgagacggttggttggttataggatgatgacttacatacacacacacacatcataactttatccacatgagttaaaagcgggaacattatcgtcaatacaaggagctgatggagaagttgaaactaacaaagtaacagggggtttccgaaagtgctgtaattttccgttggaaatatctgttcgggagagttgtatagtgtcatgatatacacacttgtgcagttatttgatgaggaaacttacatagcctagagcagatgtgtttcctatattattattgccttgtacaatgtaagatgaattccatgagtcagaaatagcatcaggtctctatgcttatacttggacaagttaagaggatggcacggcatattttttgtgtcaccgcaccgaggttgtcgctctctttatgtgtatcaaaaatataaaagctcttgtttatgtacatgaacgatgttttgggtgtc

SEQ ID NO: 53760 - DNA, 1934 bp, Zea Mays
acggaccgaccggcgaccgcacccaatgcaagcaatttttgcggacagggggaccttcctcttcttcttcctcgtccccggcccctgcccctctcccctgcggagacggagcgccaccttcctcaccttctagaaagaactagaaccctccctccagaaccttgaagaccagcccagaccagaccagccccgaagctctccgccggccccgcccttgacgacatgaagcaccagccgccgcgccgctggggcgtcgtggcggcggtcgtcgcactcgtcctcctcgcctgcctccagatccagtaccaccacctcaaggtggatctcggcaaggccggctttgcctctgccacgcaagagaataacgcgatccgcagccgcaatcgcattcgctggggccccgacaggaacggcgcccactccttgccgcgcgggattgtccaccgccactccgacatgtccctccgcccgctctgggaggacgacactgcttccacccacaagaataaaaacagtgactacagtgctctcctcgccatggcagtcggcatctcccaaataaaaaacattgacactatggcccgtaagtttctgaaggaaaactatgcagtcatgctcttccattatgatggaaatgtagatggatggcgtcatcttgagtggagtgataaggccatacacatccttgctcacaaccaaacaaaatggtggtttgctaagcgttttctgcatcctgatgtcatggctatctatgatttcatttttctatgggatgaagaccttggagtggagaacttcaaccctagaagatatcttgatataatggtgtccgaaggcttggaaataacacaacctgctctggaccctgatctatcaactgatatccaccatcgaatcacaatccgtaataagatggcaaaagttcacaggagaatatacgacaatcggcctagtatgaattgttctgacgagagcaaaggacctccatgtacaggaatgatcttattcatggatggggtcttgacatgaagcttggatattgcgctcaggttctcaatatatgttaacagtcttaaaagatattttgataggatgtctgttgactattgagggtgatcgaacagagaaagttggtgttattgacagtgagtatgtagttcatcaagggataccatcattaggagggccatcacttagcagcaagacacctcgaagatcattggatttgaggacccacatacgaagacaatcatcggctgagctggagaagttcaaggagaggtggaacagggctgtaagggaagatgaaggatggagggatccttttgattcttgattacttggaaagcagagtgtgacacttctgataacaaaactggccagtggccacagtcacagcagtagagtttggaagcggagagcatcttctgcttcatgtcaaaaacacttgtttggttataggatgacgagacggttggttggttataggatgatgacttacatacacacacacacatcataactttatccacatgagttaaaagcgggaacattatcgtcaatacaaggagctgatggagaagttgaaactaacaaagtaacagggggtttccgaaagtgctgtaattttccgttggaaatatctgttcgggagagttgtatagtgtcatgatatacacacttgtgcagttatttgatgaggaaacttacatagcctagagcagatgtgtttcctatattattattgccttgtacaatgtaagatgaattccatgagtcagaaatagcatcaggtctctatgcttatacttggacaagttaagaggatggcacggcatattttttgtgtcaccgcaccgaggttgtcgctctctttatgtgtatcaaaaatataaaagctcttgtttatgtacatgaacgatgttttgggtgtc

SEQ ID NO: 53761 - DNA, 2167 bp, Zea Mays
acggaccgaccggcgaccgcacccaatgcaagcaatttttgcggacagggggaccttcctcttcttcttcctcgtccccggcccctgcccctctcccctgcggagacggagcgccaccttcctcaccttctagaaagaactagaaccctccctccagaaccttgaagaccagcccagaccagaccagccccgaagctctccgccggccccgcccttgacgacatgaagcaccagccgccgcgccgctggggcgtcgtggcggcggtcgtcgcactcgtcctcctcgcctgcctccagatccagtaccaccacctcaaggtggatctcggcaaggccggctttgcctctgccacgcaagagaataacgcgatccgcagccgcaatcgcattcgctggggccccgacaggaacggcgcccactccttgccgcgcgggattgtccaccgccactccgacatgtccctccgcccgctctgggaggacgacactgcttccacccacaagaataaaaacagtgactacagtgctctcctcgccatggcagtcggcatctcccaaataaaaaacattgacactatggcccgtaagtttctgaaggaaaactatgcagtcatgctcttccattatgatggaaatgtagatggatggcgtcatcttgagtggagtgataaggccatacacatccttgctcacaaccaaacaaaatggtggtttgctaagcgttttctgcatcctgatgtcatggctatctatgatttcatttttctatgggatgaagaccttggagtggagaacttcaaccctagaagaatgggaatatgtgcagccagtttgagcctcttttcgtaactgtttagtgagatctgttcagagggaaactgaatatcttgatataatggtgtccgaaggcttggaaataacacaacctgctctggaccctgatctatcaactgatatccaccatcgaatcacaatccgtaataagatggcaaaagttcacaggagaatatacgacaatcggcctagtatgaattgttctgacgagagcaaaggacctccatgtacagggtgggtagagggcatggcaccagttttttctcgcactgcttggaaatgtgtatggcatctaattcagaatgatcttattcatggatggggtcttgacatgaagcttggatattgcgctcaggttctcaatatatgttaacagtcttaaaagatattttgataggatgtctgttgactattgaggcatgctatttcagcttccatgtcctttgttaaacacggtggagcatgggcatgctatttcaggttgattgacacagtcacatgatatttcagggtgatcgaacagagaaagttggtgttattgacagtgagtatgtagttcatcaagggataccatcattaggagggccatcacttagcagcaagacacctcgaagatcattggatttgaggacccacatacgaagacaatcatcggctgagctggagaagttcaaggagaggtggaacagggctgtaagggaagatgaaggatggagggatccttttgattcttgattacttggaaagcagagtgtgacacttctgataacaaaactggccagtggccacagtcacagcagtagagtttggaagcggagagcatcttctgcttcatgtcaaaaacacttgtttggttataggatgacgagacggttggttggttataggatgatgacttacatacacacacacacatcataactttatccacatgagttaaaagcgggaacattatcgtcaatacaaggagctgatggagaagttgaaactaacaaagtaacagggggtttccgaaagtgctgtaattttccgttggaaatatctgttcgggagagttgtatagtgtcatgatatacacacttgtgcagttatttgatgaggaaacttacatagcctagagcagatgtgtttcctatattattattgccttgtacaatgtaagatgaattccatgagtcagaaatagcatcaggtctctatgcttatacttggacaagttaagaggatggcacggcatattttttgtgtcaccgcaccgaggttgtcgctctctttatgtgtatcaaaaatataaaagctcttgtttatgtacatgaacgatgttttgggtgtc

SEQ ID NO: 53762 - DNA, 2064 bp, Zea Mays
gttcatttcactcatcacggaccgaccggcgaccgcacccaatgcaagcaatttttgcggacagggggaccttcctcttcttcttcctcgtccccggcccctgcccctctcccctgcggagacggagcgccaccttcctcaccttctagaaagaactagaaccctccctccagaaccttgaagaccagcccagaccagaccagccccgaagctctccgccggccccgcccttgacgacatgaagcaccagccgccgcgccgctggggcgtcgtggcggcggtcgtcgcactcgtcctcctcgcctgcctccagatccagtaccaccacctcaaggtggatctcggcaaggccggctttgcctctgccacgcaagagaataacgcgatccgcagccgcaatcgcattcgctggggccccgacaggaacggcgcccactccttgccgcgcgggattgtccaccgccactccgacatgtccctccgcccgctctgggaggacgacactgcttccacccacaagatggatggcgtcatcttgagtggagtgataaggccatacacatccttgctcacaaccaaacaaaatggtggtttgctaagcgttttctgcatcctgatgtcatggctatctatgatttcatttttctatgggatgaagaccttggagtggagaacttcaaccctagaagatatcttgatataatggtgtccgaaggcttggaaataacacaacctgctctggaccctgatctatcaactgatatccaccatcgaatcacaatccgtaataagatggcaaaagttcacaggagaatatacgacaatcggcctagtatgaattgttctgacgagagcaaaggacctccatgtacagggtgggtagagggcatggcaccagttttttctcgcactgcttggaaatgtgtatggcatctaattcagaatgatcttattcatggatggggtcttgacatgaagcttggatattgcgctcagggtgatcgaacagagaaagttggtgttattgacagtgagtatgtagttcatcaagggataccatcattaggagggccatcacttagcagcaaggtgcttgacatctcagcaacaaactatttttttagaaacttggagtccggtaggaccaaggatgaagtgtactgattcatccaaactttgtttgaaaaaaaaactaccagagcatcgattttccttgtgtgcttttcttttaccctagttggcatatacctgcatgatagtaatgttaggtgtcatgaattcatgatcgttcaataaaatttgcatgtgccgctactgacatcttgttgacgcagacacctcgaagatcattggatttgaggacccacatacgaagacaatcatcggctgagctggagaagttcaaggagaggtggaacagggctgtaagggaagatgaaggatggagggatccttttgattcttgattacttggaaagcagagtgtgacacttctgataacaaaactggccagtggccacagtcacagcagtagagtttggaagcggagagcatcttctgcttcatgtcaaaaacacttgtttggttataggatgacgagacggttggttggttataggatgatgacttacatacacacacacacatcataactttatccacatgagttaaaagcgggaacattatcgtcaatacaaggagctgatggagaagttgaaactaacaaagtaacagggggtttccgaaagtgctgtaattttccgttggaaatatctgttcgggagagttgtatagtgtcatgatatacacacttgtgcagttatttgatgaggaaacttacatagcctagagcagatgtgtttcctatattattattgccttgtacaatgtaagatgaattccatgagtcagaaatagcatcaggtctctatgcttatacttggacaagttaagaggatggcacggcatattttttgtgtcaccgcaccgaggttgtcgctctctttatgtgtatcaaaaatataaaagctcttgtttatgtacatgaacgatgttttgggtgtc

SEQ ID NO: 53763 - DNA, 2009 bp, Zea Mays
gttcatttcactcatcacggaccgaccggcgaccgcacccaatgcaagcaatttttgcggacagggggaccttcctcttcttcttcctcgtccccggcccctgcccctctcccctgcggagacggagcgccaccttcctcaccttctagaaagaactagaaccctccctccagaaccttgaagaccagcccagaccagaccagccccgaagctctccgccggccccgcccttgacgacatgaagcaccagccgccgcgccgctggggcgtcgtggcggcggtcgtcgcactcgtcctcctcgcctgcctccagatccagtaccaccacctcaaggtggatctcggcaaggccggctttgcctctgccacgcaagagaataacgcgatccgcagccgcaatcgcattcgctggggccccgacaggaacggcgcccactccttgccgcgcgggattgtccaccgccactccgacatgtccctccgcccgctctgggaggacgacactgcttccacccacaagaataaaaacagtgactacagtgctctcctcgccatggcagtcggcatctcccaaataaaaaacattgacactatggcccgtaagtttctgaaggaaaactatgcagtcatgctcttccattatgatggaaatgtagatggatggcgtcatcttgagtggagtgataaggccatacacatccttgctcacaaccaaacaaaatggtggtttgctaagcgttttctgcatcctgatgtcatggctatctatgatttcatttttctatgggatgaagaccttggagtggagaacttcaaccctagaagatatcttgatataatggtgtccgaaggcttggaaataacacaacctgctctggaccctgatctatcaactgatatccaccatcgaatcacaatccgtaataagatggcaaaagttcacaggagaatatacgacaatcggcctagtatgaattgttctgacgagagcaaaggacctccatgtacaggagggcatggcaccagttttttctcgcactgcttggaaatgtgtatggcatctaattcagaatgatcttattcatggatggggtcttgacatgaagcttggatattgcgctcaggttctcaatatatgttaacagtcttaaaagatattttgataggatgtctgttgactattgagggtgatcgaacagagaaagttggtgttattgacagtgagtatgtagttcatcaagggataccatcattaggagggccatcacttagcagcaagacacctcgaagatcattggatttgaggacccacatacgaagacaatcatcggctgagctggagaagttcaaggagaggtggaacagggctgtaagggaagatgaaggatggagggatccttttgattcttgattacttggaaagcagagtgtgacacttctgataacaaaactggccagtggccacagtcacagcagtagagtttggaagcggagagcatcttctgcttcatgtcaaaaacacttgtttggttataggatgacgagacggttggttggttataggatgatgacttacatacacacacacacatcataactttatccacatgagttaaaagcgggaacattatcgtcaatacaaggagctgatggagaagttgaaactaacaaagtaacagggggtttccgaaagtgctgtaattttccgttggaaatatctgttcgggagagttgtatagtgtcatgatatacacacttgtgcagttatttgatgaggaaacttacatagcctagagcagatgtgtttcctatattattattgccttgtacaatgtaagatgaattccatgagtcagaaatagcatcaggtctctatgcttatacttggacaagttaagaggatggcacggcatattttttgtgtcaccgcaccgaggttgtcgctctctttatgtgtatcaaaaatataaaagctcttgtttatgtacatgaacgatgttttgggtgtc

SEQ ID NO: 53764 - DNA, 2200 bp, Zea Mays
gttcatttcactcatcacggaccgaccggcgaccgcacccaatgcaagcaatttttgcggacagggggaccttcctcttcttcttcctcgtccccggcccctgcccctctcccctgcggagacggagcgccaccttcctcaccttctagaaagaactagaaccctccctccagaaccttgaagaccagcccagaccagaccagccccgaagctctccgccggccccgcccttgacgacatgaagcaccagccgccgcgccgctggggcgtcgtggcggcggtcgtcgcactcgtcctcctcgcctgcctccagatccagtaccaccacctcaaggtggatctcggcaaggccggctttgcctctgccacgcaagagaataacgcgatccgcagccgcaatcgcattcgctggggccccgacaggaacggcgcccactccttgccgcgcgggattgtccaccgccactccgacatgtccctccgcccgctctgggaggacgacactgcttccacccacaagaataaaaacagtgactacagtgctctcctcgccatggcagtcggcatctcccaaataaaaaacattgacactatggcccgtaagtttctgaaggaaaactatgcagtcatgctcttccattatgatggaaatgtagatggatggcgtcatcttgagtggagtgataaggccatacacatccttgctcacaaccaaacaaaatggtggtttgctaagcgttttctgcatcctgatgtcatggctatctatgatttcatttttctatgggatgaagaccttggagtggagaacttcaaccctagaagatatcttgatataatggtgtccgaaggcttggaaataacacaacctgctctggaccctgatctatcaactgatatccaccatcgaatcacaatccgtaataagatggcaaaagttcacaggagaatatacgacaatcggcctagtatgaattgttctgacgagagcaaaggacctccatgtacagggtgggtagagggcatggcaccagttttttctcgcactgcttggaaatgtgtatggcatctaattcagaatgatcttattcatggatggggtcttgacatgaagcttggatattgcgctcagggtgatcgaacagagaaagttggtgttattgacagtgagtatgtagttcatcaagggataccatcattaggagggccatcacttagcagcaaggtgcttgacatctcagcaacaaactatttttttagaaacttggagtccggtaggaccaaggatgaagtgtactgattcatccaaactttgtttgaaaaaaaaactaccagagcatcgattttccttgtgtgcttttcttttaccctagttggcatatacctgcatgatagtaatgttaggtgtcatgaattcatgatcgttcaataaaatttgcatgtgccgctactgacatcttgttgacgcagacacctcgaagatcattggatttgaggacccacatacgaagacaatcatcggctgagctggagaagttcaaggagaggtggaacagggctgtaagggaagatgaaggatggagggatccttttgattcttgattacttggaaagcagagtgtgacacttctgataacaaaactggccagtggccacagtcacagcagtagagtttggaagcggagagcatcttctgcttcatgtcaaaaacacttgtttggttataggatgacgagacggttggttggttataggatgatgacttacatacacacacacacatcataactttatccacatgagttaaaagcgggaacattatcgtcaatacaaggagctgatggagaagttgaaactaacaaagtaacagggggtttccgaaagtgctgtaattttccgttggaaatatctgttcgggagagttgtatagtgtcatgatatacacacttgtgcagttatttgatgaggaaacttacatagcctagagcagatgtgtttcctatattattattgccttgtacaatgtaagatgaattccatgagtcagaaatagcatcaggtctctatgcttatacttggacaagttaagaggatggcacggcatattttttgtgtcaccgcaccgaggttgtcgctctctttatgtgtatcaaaaatataaaagctcttgtttatgtacatgaacgatgttttgggtgtc

SEQ ID NO: 53765 - DNA, 2130 bp, Zea Mays
tagggttcatttcactcatcacggaccgaccggcgaccgcacccaatgcaagcaatttttgcggacagggggaccttcctcttcttcttcctcgtccccggcccctgcccctctcccctgcggagacggagcgccaccttcctcaccttctagaaagaactagaaccctccctccagaaccttgaagaccagcccagaccagaccagccccgaagctctccgccggccccgcccttgacgacatgaagcaccagccgccgcgccgctggggcgtcgtggcggcggtcgtcgcactcgtcctcctcgcctgcctccagatccagtaccaccacctcaaggtggatctcggcaaggccggctttgcctctgccacgcaagagaataacgcgatccgcagccgcaatcgcattcgctggggccccgacaggaacggcgcccactccttgccgcgcgggattgtccaccgccactccgacatgtccctccgcccgctctgggaggacgacactgcttccacccacaagatggatggcgtcatcttgagtggagtgataaggccatacacatccttgctcacaaccaaacaaaatggtggtttgctaagcgttttctgcatcctgatgtcatggctatctatgatttcatttttctatgggatgaagaccttggagtggagaacttcaaccctagaagatatcttgatataatggtgtccgaaggcttggaaataacacaacctgctctggaccctgatctatcaactgatatccaccatcgaatcacaatccgtaataagatggcaaaagttcacaggagaatatacgacaatcggcctagtatgaattgttctgacgagagcaaaggacctccatgtacagggtgggtagagggcatggcaccagttttttctcgcactgcttggaaatgtgtatggcatctaattcagaatgatcttattcatggatggggtcttgacatgaagcttggatattgcgctcaggttctcaatatatgttaacagtcttaaaagatattttgataggatgtctgttgactattgagggtgatcgaacagagaaagttggtgttattgacagtgagtatgtagttcatcaagggataccatcattaggagggccatcacttagcagcaaggtgcttgacatctcagcaacaaactatttttttagaaacttggagtccggtaggaccaaggatgaagtgtactgattcatccaaactttgtttgaaaaaaaaactaccagagcatcgattttccttgtgtgcttttcttttaccctagttggcatatacctgcatgatagtaatgttaggtgtcatgaattcatgatcgttcaataaaatttgcatgtgccgctactgacatcttgttgacgcagacacctcgaagatcattggatttgaggacccacatacgaagacaatcatcggctgagctggagaagttcaaggagaggtggaacagggctgtaagggaagatgaaggatggagggatccttttgattcttgattacttggaaagcagagtgtgacacttctgataacaaaactggccagtggccacagtcacagcagtagagtttggaagcggagagcatcttctgcttcatgtcaaaaacacttgtttggttataggatgacgagacggttggttggttataggatgatgacttacatacacacacacacatcataactttatccacatgagttaaaagcgggaacattatcgtcaatacaaggagctgatggagaagttgaaactaacaaagtaacagggggtttccgaaagtgctgtaattttccgttggaaatatctgttcgggagagttgtatagtgtcatgatatacacacttgtgcagttatttgatgaggaaacttacatagcctagagcagatgtgtttcctatattattattgccttgtacaatgtaagatgaattccatgagtcagaaatagcatcaggtctctatgcttatacttggacaagttaagaggatggcacggcatattttttgtgtcaccgcaccgaggttgtcgctctctttatgtgtatcaaaaatataaaagctcttgtttatgtacatgaacgatgttttgggtgtc

SEQ ID NO: 53766 - DNA, 1909 bp, Zea Mays
ggcagtttggcagagggtagggttcatttcactcatcacggaccgaccggcgaccgcacccaatgcaagcaatttttgcggacagggggaccttcctcttcttcttcctcgtccccggcccctgcccctctcccctgcggagacggagcgccaccttcctcaccttctagaaagaactagaaccctccctccagaaccttgaagaccagcccagaccagaccagccccgaagctctccgccggccccgcccttgacgacatgaagcaccagccgccgcgccgctggggcgtcgtggcggcggtcgtcgcactcgtcctcctcgcctgcctccagatccagtaccaccacctcaaggtggatctcggcaaggccggctttgcctctgccacgcaagagaataacgcgatccgcagccgcaatcgcattcgctggggccccgacaggaacggcgcccactccttgccgcgcgggattgtccaccgccactccgacatgtccctccgcccgctctgggaggacgacactgcttccacccacaagaataaaaacagtgactacagtgctctcctcgccatggcagtcggcatctcccaaataaaaaacattgacactatggcccgtaagtttctgaaggaaaactatgcagtcatgctcttccattatgatggaaatgtagatggatggcgtcatcttgagtggagtgataaggccatacacatccttgctcacaaccaaacaaaatggtggtttgctaagcgttttctgcatcctgatgtcatggctatctatgatttcatttttctatgggatgaagaccttggagtggagaacttcaaccctagaagatatcttgatataatggtgtccgaaggcttggaaataacacaacctgctctggaccctgatctatcaactgatatccaccatcgaatcacaatccgtaataagatggcaaaagttcacaggagaatatacgacaatcggcctagtatgaattgttctgacgagagcaaaggacctccatgtacaggaatgatcttattcatggatggggtcttgacatgaagcttggatattgcgctcagggtgatcgaacagagaaagttggtgttattgacagtgagtatgtagttcatcaagggataccatcattaggagggccatcacttagcagcaagacacctcgaagatcattggatttgaggacccacatacgaagacaatcatcggctgagctggagaagttcaaggagaggtggaacagggctgtaagggaagatgaaggatggagggatccttttgattcttgattacttggaaagcagagtgtgacacttctgataacaaaactggccagtggccacagtcacagcagtagagtttggaagcggagagcatcttctgcttcatgtcaaaaacacttgtttggttataggatgacgagacggttggttggttataggatgatgacttacatacacacacacacatcataactttatccacatgagttaaaagcgggaacattatcgtcaatacaaggagctgatggagaagttgaaactaacaaagtaacagggggtttccgaaagtgctgtaattttccgttggaaatatctgttcgggagagttgtatagtgtcatgatatacacacttgtgcagttatttgatgaggaaacttacatagcctagagcagatgtgtttcctatattattattgccttgtacaatgtaagatgaattccatgagtcagaaatagcatcaggtctctatgcttatacttggacaagttaagaggatggcacggcatattttttgtgtcaccgcaccgaggttgtcgctctctttatgtgtatcaaaaatataaaagctcttgtttatgtacatgaacgatgttttgggtgtc

SEQ ID NO: 53767 - DNA, 1778 bp, Zea Mays
gtttgggcagtttggcagagggtagggttcatttcactcatcacggaccgaccggcgaccgcacccaatgcaagcaatttttgcggacagggggaccttcctcttcttcttcctcgtccccggcccctgcccctctcccctgcggagacggagcgccaccttcctcaccttctagaaagaactagaaccctccctccagaaccttgaagaccagcccagaccagaccagccccgaagctctccgccggccccgcccttgacgacatgaagcaccagccgccgcgccgctggggcgtcgtggcggcggtcgtcgcactcgtcctcctcgcctgcctccagatccagtaccaccacctcaaggtggatctcggcaaggccggctttgcctctgccacgcaagagaataacgcgatccgcagccgcaatcgcattcgctggggccccgacaggaacggcgcccactccttgccgcgcgggattgtccaccgccactccgacatgtccctccgcccgctctgggaggacgacactgcttccacccacaagatggatggcgtcatcttgagtggagtgataaggccatacacatccttgctcacaaccaaacaaaatggtggtttgctaagcgttttctgcatcctgatgtcatggctatctatgatttcatttttctatgggatgaagaccttggagtggagaacttcaaccctagaagatatcttgatataatggtgtccgaaggcttggaaataacacaacctgctctggaccctgatctatcaactgatatccaccatcgaatcacaatccgtaataagatggcaaaagttcacaggagaatatacgacaatcggcctagtatgaattgttctgacgagagcaaaggacctccatgtacaggaatgatcttattcatggatggggtcttgacatgaagcttggatattgcgctcagggtgatcgaacagagaaagttggtgttattgacagtgagtatgtagttcatcaagggataccatcattaggagggccatcacttagcagcaagacacctcgaagatcattggatttgaggacccacatacgaagacaatcatcggctgagctggagaagttcaaggagaggtggaacagggctgtaagggaagatgaaggatggagggatccttttgattcttgattacttggaaagcagagtgtgacacttctgataacaaaactggccagtggccacagtcacagcagtagagtttggaagcggagagcatcttctgcttcatgtcaaaaacacttgtttggttataggatgacgagacggttggttggttataggatgatgacttacatacacacacacacatcataactttatccacatgagttaaaagcgggaacattatcgtcaatacaaggagctgatggagaagttgaaactaacaaagtaacagggggtttccgaaagtgctgtaattttccgttggaaatatctgttcgggagagttgtatagtgtcatgatatacacacttgtgcagttatttgatgaggaaacttacatagcctagagcagatgtgtttcctatattattattgccttgtacaatgtaagatgaattccatgagtcagaaatagcatcaggtctctatgcttatacttggacaagttaagaggatggcacggcatattttttgtgtcaccgcaccgaggttgtcgctctctttatgtgtatcaaaaatataaaagctcttgtttatgtacatgaacgatgttttgggtgtc

SEQ ID NO: 53768 - DNA, 2087 bp, Zea Mays
ttgagtttaaaatagtaaatacgatagagaatgacatagcccatgatacaaatggtagtgacaagggagtgatcgctttcccttttcttttttcttcctctgaatctgaatacgatatcagaaaagcaaacgatgataacattgttgttagtaggtacagtgcgtactagtggttttggtgtttgggcagtttggcagagggtagggttcatttcactcatcacggaccgaccggcgaccgcacccaatgcaagcaatttttgcggacagggggaccttcctcttcttcttcctcgtccccggcccctgcccctctcccctgcggagacggagcgccaccttcctcaccttctagaaagaactagaaccctccctccagaaccttgaagaccagcccagaccagaccagccccgaagctctccgccggccccgcccttgacgacatgaagcaccagccgccgcgccgctggggcgtcgtggcggcggtcgtcgcactcgtcctcctcgcctgcctccagatccagtaccaccacctcaaggtggatctcggcaaggccggctttgcctctgccacgcaagagaataacgcgatccgcagccgcaatcgcattcgctggggccccgacaggaacggcgcccactccttgccgcgcgggattgtccaccgccactccgacatgtccctccgcccgctctgggaggacgacactgcttccacccacaagatggatggcgtcatcttgagtggagtgataaggccatacacatccttgctcacaaccaaacaaaatggtggtttgctaagcgttttctgcatcctgatgtcatggctatctatgatttcatttttctatgggatgaagaccttggagtggagaacttcaaccctagaagatatcttgatataatggtgtccgaaggcttggaaataacacaacctgctctggaccctgatctatcaactgatatccaccatcgaatcacaatccgtaataagatggcaaaagttcacaggagaatatacgacaatcggcctagtatgaattgttctgacgagagcaaaggacctccatgtacagggtgggtagagggcatggcaccagttttttctcgcactgcttggaaatgtgtatggcatctaattcagaatgatcttattcatggatggggtcttgacatgaagcttggatattgcgctcaggttctcaatatatgttaacagtcttaaaagatattttgataggatgtctgttgactattgagggtgatcgaacagagaaagttggtgttattgacagtgagtatgtagttcatcaagggataccatcattaggagggccatcacttagcagcaagacacctcgaagatcattggatttgaggacccacatacgaagacaatcatcggctgagctggagaagttcaaggagaggtggaacagggctgtaagggaagatgaaggatggagggatccttttgattcttgattacttggaaagcagagtgtgacacttctgataacaaaactggccagtggccacagtcacagcagtagagtttggaagcggagagcatcttctgcttcatgtcaaaaacacttgtttggttataggatgacgagacggttggttggttataggatgatgacttacatacacacacacacatcataactttatccacatgagttaaaagcgggaacattatcgtcaatacaaggagctgatggagaagttgaaactaacaaagtaacagggggtttccgaaagtgctgtaattttccgttggaaatatctgttcgggagagttgtatagtgtcatgatatacacacttgtgcagttatttgatgaggaaacttacatagcctagagcagatgtgtttcctatattattattgccttgtacaatgtaagatgaattccatgagtcagaaatagcatcaggtctctatgcttatacttggacaagttaagaggatggcacggcatattttttgtgtcaccgcaccgaggttgtcgctctctttatgtgtatcaaaaatataaaagctcttgtttatgtacatgaacgatgttttgggtgtc

SEQ ID NO: 53769 - DNA, 1637 bp, Zea Mays
atattggatcattgtaactagtttatttcacttgggggcctcttcagtggaatggaatagattaaggggaagagaggtattgagaaacagcctttccagcttcctgacttcattgctgcaactggaatagaaaagataagacaggcttatattgagaaagaggatagcaagaagttgaaacagaaacagcgtgagcgtatgcagcccaagatgggcaaaatggatatagattatcaggttttgcatgacgcgttcttcaaatatcagacaaaacccaagctgtctagtcatggtgatctgtattatgaaggcaaagaatttgaggttaaactgagggaaatgaagccaggcatgctgtctcgtgagcttaaagatgctcttggtatgcctgatggcgcccctcccccatggcttataaacatgcagcgctatggtccacctccatcttatccccaactgaagatcccaggtctaaatgccccaatcccccctggtgccagttttggttatagaccaggggagtggggaaagccaccagttgatgagcatggacgtccactctatggagacgtttttggtgttctgcagcaggacgaacctaactacgatgatgaacctgttgatcgcagcaaacactggggagatttggaggaagaggaggaggaagaagaggaagaggaggaagaggaagaaccaatggaagacgaggaaatggaagacggaattcagtctgtcgataccatctcaagtactccaactggtgttgaaacacctgatgttatcgaccttcggaagctgcagaggaaggagactgacaagcaggcagaacggccgctgtaccaggttcttgaacaaaaggaagaaaggatcgcccctgggactctatatgggtcaagccatacgtatgtgttgggaacacaagataaatcatcagctccgaaaagggtggatctgcttaagaatcaaaagtcagacaaggtggacgtcaccatccaacccgaggaactggaagccatggatgatgttctggcagccaagtatgaagaagctcgagaggaagagaagcttcggaaccaaaaggaggacttcagtgacatggtggcagagaatgctcacaagaggaagaggaagcaagagaaggaaggcaagtcgaagaagaaggaattcaagttttaagggcaggcgggcgatgtaggtcatgaggcaccgttgtagctgttccaaatatgactggctgtatggtttagttgctgcgatcagacagttccgttccgtgttccaagttccaaccgagaggtcgggctcattcgcttggttaacacaaatgtcgctttggattttcactggaatatgcttaattactctgtaagaaatcgttgcgctgttgaaatatcacgtgctggaaaggcggtctttgctatggggggggggggggggtgctttgacctgccgaaggggttatgcggcgcgatgatctatttcggtggagccaacaagacaattgattatggctagtgtgggaacattttcccgtgtttttcttagaaaaaatgaactaatttcttttgagcaaatgaaaaccccttaaaaaaaatagggttttcaaaatagctctggtcagaagagaaaaaaataca

SEQ ID NO: 53770 - DNA, 1577 bp, Zea Mays
gttcaggggaagagaggtattgagaaacagcctttccagcttcctgacttcattgctgcaactggaatagaaaagataagacaggcttatattgagaaagaggatagcaagaagttgaaacagaaacagcgtgagcgtatgcagcccaagatgggcaaaatggatatagattatcaggttttgcatgacgcgttcttcaaatatcagacaaaacccaagctgtctagtcatggtgatctgtattatgaaggcaaagaatttgaggttaaactgagggaaatgaagccaggcatgctgtctcgtgagcttaaagatgctcttggtatgcctgatggcgcccctcccccatggcttataaacatgcagcgctatggtccacctccatcttatccccaactgaagatcccaggtctaaatgccccaatcccccctggtgccagttttggttatagaccaggggagtggggaaagccaccagttgatgagcatggacgtccactctatggagacgtttttggtgttctgcagcaggacgaacctaactacgatgatgaacctgttgatcgcagcaaacactggggagatttggaggaagaggaggaggaagaagaggaagaggaggaagaggaagaaccaatggaagacgaggaaatggaagacggaattcagtctgtcgataccatctcaagtactccaactggtgttgaaacacctgatgttatcgaccttcggaagctgcagaggaaggagactgacaagcaggcagaacggccgctgtaccaggttcttgaacaaaaggaagaaaggatcgcccctgggactctatatgggtcaagccatacgtatgtgttgggaacacaagataaatcatcagctccgaaaagggtggatctgcttaagaatcaaaagtcagacaaggtggacgtcaccatccaacccgaggaactggaagccatggatgatgttctggcagccaagtatgaagaagctcgagaggaagagaagcttcggaaccaaaaggaggacttcagtgacatggtggcagagaatgctcacaagaggaagaggaagcaagagaaggaaggcaagtcgaagaagaaggaattcaagttttaagggcaggcgggcgatgtaggtcatgaggcaccgttgtagctgttccaaatatgactggctgtatggtttagttgctgcgatcagacagttccgttccgtgttccaagttccaaccgagaggtcgggctcattcgcttggttaacacaaatgtcgctttggattttcactggaatatgcttaattactctgtaagaaatcgttgcgctgttgaaatatcacgtgctggaaaggcggtctttgctatggggggggggggggggtgctttgacctgccgaaggggttatgcggcgcgatgatctatttcggtggagccaacaagacaattgattatggctagtgtgggaacattttcccgtgtttttcttagaaaaaatgaactaatttcttttgagcaaatgaaaaccccttaaaaaaaatagggttttcaaaatagctctggtcagaagagaaaaaaataca

SEQ ID NO: 53771 - DNA, 2314 bp, Zea Mays
aattgaaaacagggccttggtcgagttaaaaaaaacgcgagtgaaacacactgacaccgcacacacgccaaccggcctaccgccttcttctcttgtctcgtcctcctcgcgactatggccgccgccgccgaggtagaccccagccccaacccgccgccaactacagcctccggcctctccaagaccaagacgcgggaggccgaccgccgccgacgccgccgcagcaaggccaagaagaacaagtccgtcactgaggctgatgcccaggacgctgacgggggagcttccagctccgacgccaaggagaacgccgatcccaaccccgagccacaggttgaggtggagatagagtacgtgccggagaaggccgagcttgacgaccctctcctggatgatttcaaggccatcttcgagaagttcaccttcaaggacgctgctgcagcggcggccgagacgagggtgccgctgatgccacaaagaaggggtcactggatgatgatgacgacgacgaagatgatgagcaggaggcaaacaagaagaaggacggaggcctatccaataagaagaagaagctggaacgcaggatgaagattgcagacctcaaacagatatgcaacagacctgacgtcgtggaggtctgggatgcaactgctgcagatccaaaattgcttgtatatctcaaggcgtaccgaaatacagtacctgtccctaggcactggtctcagaagcgcaagttcttgcaggggaagagaggtattgagaaacagcctttccagcttcctgacttcattgctgcaactggaatagaaaagataagacaggcttatattgagaaagaggatagcaagaagttgaaacagaaacagcgtgagcgtatgcagcccaagatgggcaaaatggatatagattatcaggttttgcatgacgcgttcttcaaatatcagacaaaacccaagctgtctagtcatggtgatctgtattatgaaggcaaagaatttgaggttaaactgagggaaatgaagccaggcatgctgtctcgtgagcttaaagatgctcttggtatgcctgatggcgcccctcccccatggcttataaacatgcagcgctatggtccacctccatcttatccccaactgaagatcccaggtctaaatgccccaatcccccctggtgccagttttggttatagaccaggggagtggggaaagccaccagttgatgagcatggacgtccactctatggagacgtttttggtgttctgcagcaggacgaacctaactacgatgatgaacctgttgatcgcagcaaacactggggagatttggaggaagaggaggaggaagaagaggaagaggaggaagaggaagaaccaatggaagacgaggaaatggaagacggaattcagtctgtcgataccatctcaagtactccaactggtgttgaaacacctgatgttatcgaccttcggaagctgcagaggaaggagactgacaagcaggcagaacggccgctgtaccaggttcttgaacaaaaggaagaaaggatcgcccctgggactctatatgggtcaagccatacgtatgtgttgggaacacaagataaatcatcagctccgaaaagggtggatctgcttaagaatcaaaagtcagacaaggtggacgtcaccatccaacccgaggaactggaagccatggatgatgttctggcagccaagtatgaagaagctcgagaggaagagaagcttcggaaccaaaaggaggacttcagtgacatggtggcagagaatgctcacaagaggaagaggaagcaagagaaggaaggcaagtcgaagaagaaggaattcaagttttaagggcaggcgggcgatgtaggtcatgaggcaccgttgtagctgttccaaatatgactggctgtatggtttagttgctgcgatcagacagttccgttccgtgttccaagttccaaccgagaggtcgggctcattcgcttggttaacacaaatgtcgctttggattttcactggaatatgcttaattactctgtaagaaatcgttgcgctgttgaaatatcacgtgctggaaaggcggtctttgctatggggggggggggggggtgctttgacctgccgaaggggttatgcggcgcgatgatctatttcggtggagccaacaagacaattgattatggctagtgtgggaacattttcccgtgtttttcttagaaaaaatgaactaatttcttttgagcaaatgaaaaccccttaaaaaaaatagggttttcaaaatagctctggtcagaagagaaaaaaataca

SEQ ID NO: 53772 - DNA, 2411 bp, Zea Mays
ctcaatatttatgttgcattttgatatcatacaacaattgaaaacagggccttggtcgagttaaaaaaaacgcgagtgaaacacactgacaccgcacacacgccaaccggcctaccgccttcttctcttgtctcgtcctcctcgcgactatggccgccgccgccgaggtagaccccagccccaacccgccgccaactacagcctccggcctctccaagaccaagacgcgggaggccgaccgccgccgacgccgccgcagcaaggccaagaagaacaagtccgtcactgaggctgatgcccaggacgctgacgggggagcttccagctccgacgccaaggagaacgccgatcccaaccccgagccacaggttgaggtggagatagagtacgtgccggagaaggccgagcttgacgaccctctcctggatgatttcaaggccatcttcgagaagttcaccttcaaggacgctgctgcagcggcggccgaggatgataagaaagacgagggtgccgctgatgccacaaagaaggggtcactggatgatgatgacgacgacgaagatgatgagcaggaggcaaacaagaagaaggacggaggcctatccaataagaagaagaagctggaacgcaggatgaagattgcagacctcaaacagatatgcaacagacctgacgtcgtggaggtctgggatgcaactgctgcagatccaaaattgcttgtatatctcaaggcgtaccgaaatacagtacctgtccctaggcactggtctcagaagcgcaagttcttgcagggatggctataacaactggggcggctgggcttgctggtgcagtacttgagggaagagaggtattgagaaacagcctttccagcttcctgacttcattgctgcaactggaatagaaaagataagacaggcttatattgagaaagaggatagcaagaagttgaaacagaaacagcgtgagcgtatgcagcccaagatgggcaaaatggatatagattatcaggttttgcatgacgcgttcttcaaatatcagacaaaacccaagctgtctagtcatggtgatctgtattatgaaggcaaagaatttgaggttaaactgagggaaatgaagccaggcatgctgtctcgtgagcttaaagatgctcttggtatgcctgatggcgcccctcccccatggcttataaacatgcagcgctatggtccacctccatcttatccccaactgaagatcccaggtctaaatgccccaatcccccctggtgccagttttggttatagaccaggggagtggggaaagccaccagttgatgagcatggacgtccactctatggagacgtttttggtgttctgcagcaggacgaacctaactacgatgatgaacctgttgatcgcagcaaacactggggagatttggaggaagaggaggaggaagaagaggaagaggaggaagaggaagaaccaatggaagacgaggaaatggaagacggaattcagtctgtcgataccatctcaagtactccaactggtgttgaaacacctgatgttatcgaccttcggaagctgcagaggaaggagactgacaagcaggcagaacggccgctgtaccaggttcttgaacaaaaggaagaaaggatcgcccctgggactctatatgggtcaagccatacgtatgtgttgggaacacaagataaatcatcagctccgaaaagggtggatctgcttaagaatcaaaagtcagacaaggtggacgtcaccatccaacccgaggaactggaagccatggatgatgttctggcagccaagtatgaagaagctcgagaggaagagaagcttcggaaccaaaaggaggacttcagtgacatggtggcagagaatgctcacaagaggaagaggaagcaagagaaggaaggcaagtcgaagaagaaggaattcaagttttaagggcaggcgggcgatgtaggtcatgaggcaccgttgtagctgttccaaatatgactggctgtatggtttagttgctgcgatcagacagttccgttccgtgttccaagttccaaccgagaggtcgggctcattcgcttggttaacacaaatgtcgctttggattttcactggaatatgcttaattactctgtaagaaatcgttgcgctgttgaaatatcacgtgctggaaaggcggtctttgctatggggggggggggggggtgctttgacctgccgaaggggttatgcggcgcgatgatctatttcggtggagccaacaagacaattgattatggctagtgtgggaacattttcccgtgtttttcttagaaaaaatgaactaatttcttttgagcaaatgaaaaccccttaaaaaaaatagggttttcaaaatagctctggtcagaagagaaaaaaataca

SEQ ID NO: 53773 - DNA, 2531 bp, Zea Mays
caagacgttcaaggagctcttgcttacgctttctgggtgcagtttttgaacttggctgagaaagactgtcatgtttggagttttctagttccggtgactattcctctaaatccgcttatgctgctatgttttgtggctcggtgttcttcaagcaggctgatcgaatttggaagacttggacccctagcaaatgtcggttctttctgtggcttatggctcacaacaaatgttggacagcaaataggttggctaaaagaggtctgactcaatcgcttttttgcccactttgtgatcaacatgatgagactatcaatcacttgctggtaggctgctcctttgcatgtcttttctggttcgaattgttcaggccgtttggattgcagggcttcattccaggacaggatattgaggattttaatgtctggtggtgttccaatagtgctcggctagatgggctgagtaagaagggctttgactctttggtcgctctaggtgcttggatgctgtggaagcatagaaatggtgttgtctttaatggttcctctccaagcgtggtggtggccgttcggctggctagggaggaagctctattgtggtccttggcgggagctaagggggtttccttcctccaagctcagagccatatgggatagtttctttgttgttagtgttggggtgtctgccagctaacaggcactctgcccctgctctggctgggtggggtttctagtgtgtgtgtgtgtgtgtggtggggggagggggggttcgctttgtaagattatgttccgggggtctttcccctttttcttcttaatacaatgagacgcagctctcctgcgtgttcgacaaaaaaatatttccaccatcgtttgacactaacgggagccgaggtgtctaaacgaagccaacgcccctcggccagtccgttctaattccccacacaagctaactctggataaaagctcctcgtctcgacctcttccctacgccgcctccctcactcatccacaaaatcgctacctcttcccagtcctaggaccaggagacagacggcgagcagcggcccgtggcgtctcggcgctttcgcatggacaacgaacaagggagcagcaacgctcagtcctccaattcggagtccgatccgagttgggtgtttcgttctccggcagctgccgacagcaaggaaagctcatggaggtcgtcctcgtgctgcccgcaaggctccccgcaaccccatccgccaccacaacctctactacccatacatcagaaaggggcaacgacaagaaaagaaggcagatgggggtcaggttggagtcaaggaagagggtggtcaagcggcagcaagaagatgtggttcaaccggcgtccaagcatggggagaagaaagaagatgcagaggaagaaggggatctaagcccgcgtccaacgaaggaagtgatgaagcagcgtcaaaaaaagaacaagtaatgttactcggtagttctgcaattcatgtgatcatgctgtggatgttgacagtagacagttaatctatcgaacatgtcgttaatttctggtactcggtcgttcatgctagtaggatatgttccatgtgattatgtcgtaaatctgcagttcatgggtatttttctcaattgttttcacttcatcattcaagttaatctatcgaacatgccgtgaaactgatcatttttgctggtattgcttgatgtacagagaaaaatgggatgagaaaaaaaataggatgaacaagaaccatgcatacctgcttgctgattcaatggtacaggtattcggatcaggtatgtattcatcaggtatgtatgcagcatcatctaactgtacatttagataagggaggaaaggcctaattggattctgagacatgttggtgcttttgtgctttggtaggttggctgtttgtatcatggcgttacagctttatatagaagttgttgggcgccaaagtgttactgtgtgccaaatatttgtttttccctgtgaaaaaaagtggtgccatgtgatggttcgtgaaattattttactttttgtaggccaaacaggagttagcaaaagcttggcgccaagaggagatggacagttttggcgcaagaagttgttgctgcaggcttgacgtcagcatccaactaacgcttgggtgccatatctatttaggattagctttaatactcagcagctgctatttactccagccttgtaatcaaccaaaaaataggatacatgcgtcttttaccgctgctactaatctgtcttacaattgctagaacgtccaactttcatggacggagggtgtattagattaaatgttatcaaaggtacattagcttatgcaggagtttcagacaggtccatcaactctaaaagttgatttagggcccttaaactttttaagttgttcacagcaagtctatagtggtccacttatgcatctagcaacgacatggcaagctgattaggcagtttcctgttaaggaattttgtcgagcaggtcattaatgcgtgaggac

SEQ ID NO: 53774 - DNA, 2164 bp, Zea Mays
  misc_feature (699)..(798): n is a, c, g, or t
cgtagctgtattccaggcggaatgaacgagtctggtttggaatccggttccacctgctagaactattcgttttgatattggccgaaaagaaaaccgcttgaattcgagctaaccctttaatctttggcctggaacaaactcagacaatccacctttcggattgattcccagccaagaaacagactagtgaccatgattaagtggctggattggttactgatccggttttgattcacatctgccgaacgaggccttaaggttttatttgggtactttattattgatcaaaattcatatgtattatcgtgttgaggtggattaaagtataaattagtttaaattacatcctatctaagtcaacatatgtggactggggtcaatagtacccaaactcgtgacaagcagttaatttttcgagtgaacaaagagacgggggcacagtagtagaccgcggaatccgatctaaccctaaacccgaatcccaaacggaggagggcactcggcgaggcaggtggcgattctgcgattctcctgtcaccttccgtcgtctccatccccttccatttccggcgagggtcaaagcaggcctcttgctcttgggggtggtttgagagagggagagaacatggccgcggcggcggtgttggtggtgctcacggtgtcagcgctggcgggggcagcggccggcggtgatatcgnnnnnnnnnnnnnnnnnnnnnnnnnnnnnnnnnnnnnnnnnnnnnnnnnnnnnnnnnnnnnnnnnnnnnnnnnnnnnnnnnnnnnnnnnnnnnnnnnnnntctcctccgaaacataaggttcctggagatgttcttttagttcaaaggggaaagtgcaaattcacaaagaaagcaaagtttgctgaagctgctggtgcttctgctatagtaatcataaaccatgtccacgaattgtacaagatggtctgcgaaaagaatgaaaccgaccttgacataaatatacctgcagttctcctaccaaaagatgcaggttctgctttacatacacttcttacaaatggtaacacagtttctgtgcagctttactctccagatcgacctgtagttgacactgcagaggtgtttctatggcttatggctgttggcacagtacttggtgcttcctactggtcagcatggagtgctagagaagcagttattgaacaagagaagctcctcaagggtctacaaacatgcttggtggctctgttatcaagatggtttaaacctgctgcagaatcttttgtgaaagtaccgttccttggagccgtttcgcatcttactctggcagtttgcccattttgcgttgcatttgctgttgtgtgggctgtttttcgccagctcccctttgcttggattgggcaagacattctgggtattgcattgatagttacagtcatccaaattgtgagagtacctaacctcaaggtgggttcggttcttctcggctgtgccttcctgtatgatatcttctgggtgtttatctccaagagatggtttcatgagagcgtgatgattgtggttgcgcgtggcgacaagaccgacgaggatggtgtgcccatgctgctaaaaatcccgcgaatgtttgatccatggggtggatacagcatcattggctttggtgatatccttcttcctggtcttttagttgctttctcgctaagatacgatttttctgcaaagaagggcttacggtctggttactttttgtgggcaatggtggcctatggctctggacttctaatcacatatgttgcgctgaacctgatggatgggcatggacaacctgcccttttgtacatcgtgcccttcactcttggcaccttgatcgcgcttggatggaagagaggggagctgcagaacctgtgggcgaggggagagccagagagagtgtgcacgcatatgcatatgccgctgctgccgacgaccccaaactaaccacagggtcagtagaaaatcagcaagggttcctagcttctgcaaaatattgtatttgcctgctggtaatatgcaaaccaaatcatgccagtttaaaaggaggcactgcttcttggagacagcaaagtctgattgtgagctaactgctgcccaatgtgcagccatgcatgtatgtaacagcactgcttcttggagacagcaaagtctg

SEQ ID NO: 53775 - DNA, 2373 bp, Zea Mays
  misc_feature (699)..(798): n is a, c, g, or t
cgtagctgtattccaggcggaatgaacgagtctggtttggaatccggttccacctgctagaactattcgttttgatattggccgaaaagaaaaccgcttgaattcgagctaaccctttaatctttggcctggaacaaactcagacaatccacctttcggattgattcccagccaagaaacagactagtgaccatgattaagtggctggattggttactgatccggttttgattcacatctgccgaacgaggccttaaggttttatttgggtactttattattgatcaaaattcatatgtattatcgtgttgaggtggattaaagtataaattagtttaaattacatcctatctaagtcaacatatgtggactggggtcaatagtacccaaactcgtgacaagcagttaatttttcgagtgaacaaagagacgggggcacagtagtagaccgcggaatccgatctaaccctaaacccgaatcccaaacggaggagggcactcggcgaggcaggtggcgattctgcgattctcctgtcaccttccgtcgtctccatccccttccatttccggcgagggtcaaagcaggcctcttgctcttgggggtggtttgagagagggagagaacatggccgcggcggcggtgttggtggtgctcacggtgtcagcgctggcgggggcagcggccggcggtgatatcgnnnnnnnnnnnnnnnnnnnnnnnnnnnnnnnnnnnnnnnnnnnnnnnnnnnnnnnnnnnnnnnnnnnnnnnnnnnnnnnnnnnnnnnnnnnnnnnnnnnntctcctccgaaacataaggttcctggagatgttcttttagttcaaaggggaaagtgcaaattcacaaagaaagcaaagtttgctgaagctgctggtgcttctgctatagtaatcataaaccatgtccacgaattgtacaagatggtctgcgaaaagaatgaaaccgaccttgacataaatatacctgcagttctcctaccaaaagatgcaggttctgctttacatacacttcttacaaatggtaacacagtttctgtgcagctttactctccagatcgacctgtagttgacactgcagaggtgtttctatggcttatggctgttggcacagtacttggtgcttcctactggtcagcatggagtgctagagaagcagttattgaacaagagaagctcctcaaggatggccatgaagacctactgaatgttgaggccagaggttctagtggcatggtagatatcaatgtggcatcagcgataatgtttgtggtggttgcgtcatgcttcttaataatgctttacaaactgatgtcttactggtttgtggagctactggtggtaatcttctgcattggcggtgtagagggtctacaaacatgcttggtggctctgttatcaagatggtttaaacctgctgcagaatcttttgtgaaagtaccgttccttggagccgtttcgcatcttactctggcagtttgcccattttgcgttgcatttgctgttgtgtgggctgtttttcgccagctcccctttgcttggattgggcaagacattctgggtattgcattgatagttacagtcatccaaattgtgagagtacctaacctcaaggtgggttcggttcttctcggctgtgccttcctgtatgatatcttctgggtgtttatctccaagagatggtttcatgagagcgtgatgattgtggttgcgcgtggcgacaagaccgacgaggatggtgtgcccatgctgctaaaaatcccgcgaatgtttgatccatggggtggatacagcatcattggctttggtgatatccttcttcctggtcttttagttgctttctcgctaagatacgatttttctgcaaagaagggcttacggtctggttactttttgtgggcaatggtggcctatggctctggcaccttgatcgcgcttggatggaagagaggggagctgcagaacctgtgggcgaggggagagccagagagagtgtgcacgcatatgcatatgccgctgctgccgacgaccccaaactaaccacagggtcagtagaaaatcagcaagggttcctagcttctgcaaaatattgtatttgcctgctggtaatatgcaaaccaaatcatgccagtttaaaaggaggcactgcttcttggagacagcaaagtctgattgtgagctaactgctgcccaatgtgcagccatgcatgtatgtaacagcacaacaataaattgagcctgtcgaacagaaatgtatgagccgtgcatagcagcagcataaaaatactctccattcttttttaatttttttatttgtcgttttttgaaacaataggcgacaaatattcaagaacggag

SEQ ID NO: 53776 - DNA, 2407 bp, Zea Mays
agattggtttttctcccccacgtcttgcttaacaactagataagataagtcttatctcttgtatgtgcaaccaccacgagcgctttctccacgttggtggcgtcatgtattaacctgaacttcccatctctatccccgcctccatctccctcatccagattcttctgcatcgccatagatgacatcgagcagatcatcttgctagctttcgacacatcagtcatcgtcgcccgtcatgccccactcgtggcacaacttttaccttccctggtcggtaagagcctcaaaccactgtcacgactcttcgccgtcatgagtcttcactttactaaggtatgagtttctactatcatgcatcacacactaagcgcatagatctgttttctccctcatgtgtcgtttaacaaccaaataagataaatcgtatctcttatatgtctcgcaaatcaactatttcttacatgccttttggtgtttcgaatcaaattcgaataaataaacggacgaaatacaacatctcaggattagtctgacaaccctatttttttaaaaaaatccatttttctaagggggtgtttggatcccttcattttagagaaattggaattcactcaataaaataacttatttagtttgaaatttgacattccaccactttacaaagtttagatataagtctatctcaaattcatagattggaggatgagaaatgattttatgcattagtagaatttgtttctactctgtaatttacatgatactcttcgtctcattcatctatagtaaaaatgtagcacataaatatctccgacatctttctaataataatatacaaatatattttgcataaaaccgaattagcttaattgatatatgtcaaaattactattattataatgaaattcaattccaatgatccaaacagggtgtacgaaattagtgtattttcttcttctctgtgctcgataattaggtcgtcactcccccccttccgagatatgggatcgcacgcgattctaaaccagccactatataatagtatataagtgaaggacttttatgtaaatatatactcattaagatagtgatccaaggttcggtggcaatgtgaacagacttgacttgaccttaaatgcagcaaccatcgcacaagaatctgttgatgatatcgacctgcatatatatatataccttgactgctgatacaatacaacagtagtactgtttaccatgtcgtctctacatttaaaccagaactattaattatacaagttatttttaggaaaaataacgcttgattcgttgatgtattctttttaggatgtttttctttttcttttatggtggatgtttatttttttatatctaatgtcatgtaagaggctgcaacattatgttttcattataaaaaaaataccagtgtcatgtttatatgtatttaatctctgcgcacggtaaccactcttctccactgcaatattttcttcttttgtttgtagcatggctcaattaatctttttgtcatctgttcatatggcataacatgtaaattaagttggacgattatttccacatggttttattttaatgtaaaaacactgacaattcaaatagtaattctatttccatttttgtaaagaggcattctttatatttgattgtatatggcttcatgttgttcatttatgtgcaagaaacttgcataaaagatatatgtcgatgttttgaacctcgctctgacaagtaaatttattgtgctcgttccgagctccagacagtgtgcgcggtgggctcaagatttatactagttcgggcagaaagtccccacttctagtcatcggcggcttgcgctaccgacatcattgatgatcaaagctcatattacggtttacaagcgggtgagagagggggagaggctcccaagtctcttatcggggtggaagcggagctaaaggttacagagtggagtcctagctaagtcttggcttggcggcggagctccaacctctaggtcctcgtcggtgcgtcctccttttcgtcggttcgtttgggtgtcttctcgtctagggtttgtccgtgcgagtgtgccctctgttcaaccccttccttttataggtcgagggaaggatcggctaacggcggcttccctaggaaggaggcaccgtgcaatggtaaaaccaagtgttctacccggggtgaagccacacgtgctcgtgggccccgaggtcgcctggttgtctcgtattatttatggcggacaccgcgagcagcgtggagcccaagcgccattatttgggctatgtcgacccctggccttcgtagcctggggctcgagtgcggcttgtcatgttgcgccctaccagcggtctgtgcactcaagcctattcagataggtcatgagtgcgcc

SEQ ID NO: 53777 - DNA, 3937 bp, Zea Mays
ggccctttcccagccgtctaccgcggtagcatattgggttgactccgacgccaccaaccacactactttcgacaccggtaccatatctacccttcgtccaccgcatcttgctcttccttcctctatccttgttggtaacagattctctctgtcgatcatcttagtaggtgattcagttcttcttggtccgctctaccttaacaacattttacttgccataatattatcgtgaatctcctttttgcccggcgctttactactgataatcaccactccattgaatttgatctgtttggtgtttctgtgaaggattttttccaagaacgtgatcgtcggttcaatagtgttggtccgatgtacaccctgtgcctccccacgtcactccctatacgtgtgctagctgttgtctcgacctccacttggcaccgtctatgatgcgcggattcttcacaaaactcacgtaccggtgtcggataccgtatcggatatggatactcctcggatactttcggatacgtatccggggcgtatcgggaatttctgtgaatttaaataaataaaaaatgatggatactcctaggacacctctccgacacctgcgggataccttatatggtctctggtctgttagaattagaacttagaacttgtgtggtggactagtgattatttgcgagtctgctgatacatgtttttggcatgctggattcattgatttgagtctagataaattctagaagaggaagtagatgtttactttagtcaaagttgttgaacattaacttctaatgcccttaaattgaactgatcggttgtggtccatctcagacatttcagcatttaattttgtttataatatatattgtgtatcgctgtatcagtattttttgagaaatggcgtatcggggtatcggcgtatcgcgtatccgtatccccgtttcagggcaacatagggcaccgttgccttggtcatcctggcccagacgttctatcttgtctagcttgctcgtcggctatctcttgtaataagggcacgaatgttaccctttgttgcacttgctagctcggtcatcacatacgagttccattttcgttgtcttcttcttgtaccgcgcatcagtttgatcttgtgcattgtgacttgtggacatctcccgccgctagcgtgtctgtttacaaatattacttggtgatcttggatgatttttcacactacttgtgatccatttcatttcagctaaccgaggcatgagtgttggcgtgaaggtgctggtgcacgcttcgactacgttgtgtctcgtcctcctagcgccaacgtcgtcactggcaagtggaccttcaagcataagctccatgccgatggtaccctcgagcggtacaaggcatgttgggttctccgcgggttcacccagtggcctggcatcgactacgacgagaccttcaatccggttgtgaagtcgacgactgcctggaccgttctcgcactagccctcttacgtgattggacagattattagctcgacgtcaagaacgcctttctccatggatctatgtctgagatggtctactgcagccagcctattgactcaagcaggctcctcacccttggtatggtcagtttgcctccttgctgtctatagggttcactgaagccaagtctcacgcctcgctattcgtcttttggtgtggctctgatttgatttacttgctgctttatgtcaacgatattgtgctcactgcctccaacctggctctgcttcaacacactatttcaacattgcagcaggattttttatgaaggacatgggggagttgcatcactttttggggatttctattcaactttcaacatcgatcaagaggcttgttcttgtatcggcgttcctatgcccaagatattaccgaacgcgcgagcatggctgattgcaagccggtctccactctatttgatgctcagaccaagatttctacttgtatagatgatacttttgttcaggatgtcactatgtatcgcagcctgatcggcgctctgcagtatctcaccttcaccagccttgatatcccttatgcggtttagcagtttcgtctttgcatgcattcaccgcgggagcctcacttgactgcaatcagacgcatcatgtgttatctctaggggactcttgatcatggtttccttccttggtgctcctcggctttagatctgattgtctacactgatgccgacttggccggctatcctggtactcgccagtccatctttaggtatgcaatttttctggtgacagtttggtctcctggtcatccaaacgccagaacacggtttcccgctccagtgctaaagtcgagtatgaggttgttgccaaggacaattggcttggccagttgctgatcgtgctatattcattccccctgagtcgtagtactcttgtctattgtggcaacgtcaatgttgtttgcttgttcaccaacttggttcagcattagcataccaagtacttgagatcgatctccacttcatacatgacaaggttgccattggagacatttgtgttctacacgttccgacgacttgtcagtttgctgatatcttcaccaaaggcttctcatcttcactcttcaacaattttcgttccggtctcaacatctgcgatgactagagttgagaatgtgagggggtgttagactatgtaattaggctgaccatgtctaccatatctgatgatcatgtctgccatatgtaccttggtgtttatggtagttgatcatagattaggcaaggatctttattgattggatgctttctataaatactagatgatccttctatatattgtgcaccccttgtacctctaccatcaatccaatatctggtagctcctgttctataatggaccccccttgttttctctctaatgcaaagatacgcagccctcttgcgtatttaaaaaaactaagaaatgtgaccttgttcaaaggagttcgccaaaagaaatgtatgaaagaattcttgataaaacaccagacttagaaataaaaactgcaaggcgacaataagaagtggttgagcttgagcacgagtataaaaataaaaatgcagcattgtaatttaaagaaaaaaactccgcctatgttgtctcagcatatgttggtgcagccactcaaatggacacggagagttgtgttaggcgtggcgagccagctataaaaaacttagccactcaaatggagatgaaacccaatagaaaaccgttggggcgtaaccctcttagtgacacgccatatcggaatccggatatggtgttaaatgggcaagggccgagccgccacccccttggtggcgcgccgtgtcatgatttggatgcggtgttaaatgggcaagggtcgagccgccacccccttggtggcatgctgtgtcatgatttggatgcggtgtcaagtgagcaaggatcgagtcgtcgcttccttagtggcgcgctacatcgacaccgagtgtagtgacaaatgtgcaagggtcatcgcatctatctcaacgggtgtcaggggtaaggaagctagttgagccgactaggatccgtgtaggtagttggaacgtagggtcccttacaggtaagctaagagaattagtcgatgcagcgagcaggaggcgtgttaatatcctttgtgtccaggagacaaaatggaaggggcaaaaagcgaaggaggtggagaacactggtttcaagctttggtactcaagaaaaagtggcaaacaaaaatggagtaggtatactgattgataagagcctgaaggatggagtggtggatgtcaaaaggcagggaaataggattatcctagtcaaactagttttgggggatgtggtcttgaacattataagtgcatatgcccctcaggttggtctcaatgagagcgagaagaggaagttctggaaagacttag

SEQ ID NO: 53778 - DNA, 1869 bp, Zea Mays
gagaactaggtctttccattgggtgctccgtaaacccataacttttacttaagattagcagttgtggagtgagagaatgtagtggaagagcgagtgtcatgatggtgatgcaaattgtagcaaatgtgtgcatttgtggtcctcatctggagccaaagatctccaggagttccttgtatacagttggaaagattacacctattcagagacgtgaagtgcgagcttctgattatggttccagagcaagtttctggatgaacttccccaaaaatggttcacgacttactccttcacatcatgctgataattttaaatggaaagactactgcccaatggtgttcagaaatttgagggagatgttcaagattgatgcagcggattatatggtttccatttgtggaagtgacgcacttagggagctatcttctcctggaaagagtggaagtgtcttctttctatctcaggatgatcgatttatgatcaagactctacggaagtctgaagtgcaggttcttctacgaatgcttccagagtattatcaccatgtccgtacctatgagaacacactcataactaagttttttggcctccacagggttaaaccgtccagcagtcaaaagttccggtttgtagtgatgggaaacatgttttgcactgaacttagaattcaccggaggtttgacttgaaaggttcatccttaggccgctcaacagacaaagtaaaaatcgacgagaacacaacactgaaagacttggatctaaactattcattttatctcgagccttcttggcggcagactttgcttgcgcaaattgagaccgatagcaaatttctaaagcagcacgcaataatggattatagtttgcttcttggcgttcatttccgggctcctcaaagcctacggacacaggcatcctttcatcaagcaatcctaccagataggctggctgttctttcagaagaaggtgctctggaggaggatgttttgaacagtcctgaaggactggttttggttcagcgagctagtgatcaaaatgatgttgtcattggttcccatataaggggggcccgtcttcgatcatcaagtgcaagttttgaggaagtagatctcttgcttccaggcaccgcaaggctccagatccaacttggggttaacatgccggccagggcaaaacagacggttgaggatgatgacagtgaagataatggtcaggtgtatgatgtggtgctgtacctgggaataattgatatcttgcaggagtacagcataaggaagaagattgagcatgcttacaagtgcatccaatataactcattgtcaatatctgtcgtggaacccagtctctactcggagcgcttcctgaaattcattcaaactatctttcctgaaaattcataaaataaaatccagtaattcttcacctacaggagcaaagtgaaagaaacattgttcagtgtgcattgtggccctttgcaagttcaaattttacataatagaaggtgataacatactctgtccgtccatacttttggaagcagcagcagcacctgctgtcatccacgagctaagcatatagaagcagcagcacctgccagagacttatccatccatgtccctatattcaaacttcaatacagtttatagtgcaaaatagtgtttcgaataatggatacggtcattttaagatttgcttggatattcacctcaatccacatacattcaagtggattgtaaatgtaagtttaacttccacccttaatttaccttaaatattatatggatcgaatgtaaaactgaggtggatatgagtgcagccaaacaaacacaaactattatatttgacgattcactaagctccacaagcggc

SEQ ID NO: 53779 - DNA, 1703 bp, Zea Mays
catctaaaagtatacagttggaaagattacacctattcagagacgtgaagtgcgagcttctgattatggttccagagcaagtttctggatgaacttccccaaaaatggttcacgacttactccttcacatcatgctgataattttaaatggaaagactactgcccaatggtgttcagaaatttgagggagatgttcaagattgatgcagcggattatatggtttccatttgtggaagtgacgcacttagggagctatcttctcctggaaagagtggaagtgtcttctttctatctcaggatgatcgatttatgatcaagactctacggaagtctgaagtgcaggttcttctacgaatgcttccagagtattatcaccatgtccgtacctatgagaacacactcataactaagttttttggcctccacagggttaaaccgtccagcagtcaaaagttccggtttgtagtgatgggaaacatgttttgcactgaacttagaattcaccggaggtttgacttgaaaggttcatccttaggccgctcaacagacaaagtaaaaatcgacgagaacacaacactgaaagacttggatctaaactattcattttatctcgagccttcttggcggcagactttgcttgcgcaaattgagaccgatagcaaatttctaaagcagcacgcaataatggattatagtttgcttcttggcgttcatttccgggctcctcaaagcctacggacacaggcatcctttcatcaagcaatcctaccagataggctggctgttctttcagaagaaggtgctctggaggaggatgttttgaacagtcctgaaggactggttttggttcagcgagctagtgatcaaaatgatgttgtcattggttcccatataaggggggcccgtcttcgatcatcaagtgcaagttttgaggaagtagatctcttgcttccaggcaccgcaaggctccagatccaacttggggttaacatgccggccagggcaaaacagacggttgaggatgatgacagtgaagataatggtcaggtgtatgatgtggtgctgtacctgggaataattgatatcttgcaggagtacagcataaggaagaagattgagcatgcttacaagtgcatccaatataactcattgtcaatatctgtcgtggaacccagtctctactcggagcgcttcctgaaattcattcaaactatctttcctgaaaattcataaaataaaatccagtaattcttcacctacaggagcaaagtgaaagaaacattgttcagtgtgcattgtggccctttgcaagttcaaattttacataatagaaggtgataacatactctgtccgtccatacttttggaagcagcagcagcacctgctgtcatccacgagctaagcatatagaagcagcagcacctgccagagacttatccatccatgtccctatattcaaacttcaatacagtttatagtgcaaaatagtgtttcgaataatggatacggtcattttaagatttgcttggatattcacctcaatccacatacattcaagtggattgtaaatgtaagtttaacttccacccttaatttaccttaaatattatatggatcgaatgtaaaactgaggtggatatgagtgcagccaaacaaacacaaactattatatttgacgattcactaagctccacaagcggc

SEQ ID NO: 53780 - DNA, 3869 bp, Zea Mays
cggatggattcctctattagctacgtactagtctgattcccccaccgtcactcctcgggccgcccccagtatttttcgattccattacctgaggaataatctcattagttaattatttgggtttgaaccagatacgcatgcaatgcatgcaggcagggtgttctgtttcatcattctttttttttcttctcatctccggcacggggacggggatcagattcacgccactttattatttattactatgctcaccacttctcagcacgcaattcattacaaaagggtcccctgccaagatccaacactcatgaattgcaacaatacggatcggagacagcgagcagatctcgcggacttgcaattcctgttttatcttcttgccgcagcccctgctgagctgtgagctgtatgcatggcatggccacccctgtggcgcctcttctccatgatgagcctcaagctgctggtatcttactcccagggacaacccagcattcagatcaaacaaactctgactctagagttggagagcttatactgcctaatggggatacttatcgtggcgcgttatcgggcaacacgccacatggcccaggttgttatatctggtccgatggttgtgtttatgagggtgattggaggagaggcctcaggcatggccgaggcaagacgctgtggccaacaggggccacctacacaggtgactactccggtggctacatttatggtcagggaacgtataccgccgggcttaacagttacaggggaggctggaagctgaatcttaagcatggccaccttggcctacagacatatcccaacggagacacttttcaaggttcttgggtgcatgggcaaatgcaggggcatggcacctatacctgggcaaatgggaacacttatgttggcgccatgaaagatggggtcatgtcaggcaaaggaattctcacatggaacaatggagattcatttgaagggaactggttagatggtgccatgcatggctatggaatctacacatggaaggactctggctactatgtaggaacctggacaaggggggtcaaggacggaaaaggcacgttctatccaaaatgccgtgggattccggttaccgacatcgacgatttaagaaacagaggtgtactgcctggtgctgaaagccagactcatggttcccgtatccttcactctgcctcatcggacatggcagacatggtggctagcagaaatcaggactctgtaggtatttcatctgttagaagcttgaattttgagaaaactcgctccactaatgtgctactggaaagaaggtggagccttggagtggctattgaaaaattcctcggtcgcgaaaccaatgaaagttctgcaattgaaagatgtgaaaacaaggctgattccaaccttcctatactggaacgggaatatatgcaaggtgttctcatcagcgaggtcgtggtggatgcaagcttctcgaatccattaaaaagggtatcacgccgccagaagaaaatagtgaaggacataaagaaacctgggcagacaataattaaaggacataggagttatgatctgatgctcagtctgcagcttggaatcaggtatacagttggaaagattacacctattcagagacgtgaagtgcgagcttctgattatggttccagagcaagtttctggatgaacttccccaaaaatggttcacgacttactccttcacatcatgctgataattttaaatggaaagactactgcccaatggtgttcagaaatttgagggagatgttcaagattgatgcagcggattatatggtttccatttgtggaagtgacgcacttagggagctatcttctcctggaaagagtggaagtgtcttctttctatctcaggatgatcgatttatgatcaagactctacggaagtctgaagtgcaggttcttctacgaatgcttccagagtattatcaccatgtccgtacctatgagaacacactcataactaagttttttggcctccacagggttaaaccgtccagcagtcaaaagttccggtttgtagtgatgggaaacatgttttgcactgaacttagaattcaccggaggtttgacttgaaaggttcatccttaggccgctcaacagacaaagtaaaaatcgacgagaacacaacactgaaagacttggatctaaactattcattttatctcgagccttcttggcggcagactttgcttgcgcaaattgagaccgatagcaaatttctaaagcagcacgcaataatggattatagtttgcttcttggcgttcatttccgggctcctcaaagcctacggacacaggcatcctttcatcaagcaatcctaccagataggctggctgttctttcagaagaaggtgctctggaggaggatgttttgaacagtcctgaaggactggttttggttcagcgagctagtgatcaaaatgatgttgtcattggttcccatataaggggggcccgtcttcgatcatcaagtgcaagttttgaggaagtagatctcttgcttccaggcaccgcaaggctccagatccaacttggggttaacatgccggccagggcaaaacagacggttgaggatgatgacagtgaagataatggtcaggtgtatgatgtggtgctgtacctgggaataattgatatcttgcaggagtacagcataaggaagaagattgagcatgcttacaagtgcatccaatataactcattgtcaatatctgtcgtggaacccagtctctactcggagcgcttcctgaaattcattcaaactatctttcctgaaaattcataaaataaaatccagtaattcttcacctacaggagcaaagtgaaagaaacattgttcagtgtgcattgtggccctttgcaagtatgcttttgctacgtccttgattgattctctttctttacacatgttgatcatggtaaggatttccggattacgtatcccagtggtgctatccactagtagtggataactgtaccttgccctattaatctgagttgatgacgattctaccgtctacttcaaattcacactgtctaaacaatgttttgcacattcacttattcataccagtaaattcagccttagggctggtttggttttgtgacaaagggagattgaaggagaaataaactaatttctccctcagtgtcatccaatccacctgtgatttctagtcaccaaaccagaccttagtgtaccttgaattccacgtccattgtagtattgtatgtgtaaaaatgtccattgtagtattgtatgtgtaaaaatgttttgcacaaaatgtattctctgtgggtaaatttagcttttagatttttggaagtattatcagacctataagcctattattattattgttttattacagagagattcctaaaaaaacaagaagctattaaatggtgattctcctttatttctacttgcacaggttcaaattttacataatagaaggtgataacatactctgtccgtccatacttttggaagcagcagcagcacctgctgtcatccacgagctaagcatatagaagcagcagcacctgccagagacttatccatccatgtccctatattcaaacttcaatacagtttatagtgcaaaatagtgtttcgaataatggatacggtcattttaagatttgcttggatattcacctcaatccacatacattcaagtggattgtaaatgtaagtttaacttccacccttaatttaccttaaatattatatggatcgaatgtaaaactgaggtggatatgagtgcagccaaacaaacacaaactattatatttgacgattcactaagctccacaagcggc

SEQ ID NO: 53781 - DNA, 3624 bp, Zea Mays
caaacctcaaccgacactccccgtggggggcggtgccgtcgccggcgactcgccaattttgatttgaagaaaagaaaccaccagccaccacgcccgcggccgtcagccggaggtgaagcctgttttatcttcttgccgcagcccctgctgagctgtgagctgtatgcatggcatggccacccctgtggcgcctcttctccatgatgagcctcaagctgctggtatcttactcccagggacaacccagcattcagatcaaacaaactctgactctagagttggagagcttatactgcctaatggggatacttatcgtggcgcgttatcgggcaacacgccacatggcccaggttgttatatctggtccgatggttgtgtttatgagggtgattggaggagaggcctcaggcatggccgaggcaagacgctgtggccaacaggggccacctacacaggtgactactccggtggctacatttatggtcagggaacgtataccgccgggcttaacagttacaggggaggctggaagctgaatcttaagcatggccaccttggcctacagacatatcccaacggagacacttttcaaggttcttgggtgcatgggcaaatgcaggggcatggcacctatacctgggcaaatgggaacacttatgttggcgccatgaaagatggggtcatgtcaggcaaaggaattctcacatggaacaatggagattcatttgaagggaactggttagatggtgccatgcatggctatggaatctacacatggaaggactctggctactatgtaggaacctggacaaggggggtcaaggacggaaaaggcacgttctatccaaaatgccgtgggattccggttaccgacatcgacgatttaagaaacagaggtgtactgcctggtgctgaaagccagactcatggttcccgtatccttcactctgcctcatcggacatggcagacatggtggctagcagaaatcaggactctgtaggtatttcatctgttagaagcttgaattttgagaaaactcgctccactaatgtgctactggaaagaaggtggagccttggagtggctattgaaaaattcctcggtcgcgaaaccaatgaaagttctgcaattgaaagatgtgaaaacaaggctgattccaaccttcctatactggaacgggaatatatgcaaggtgttctcatcagcgaggtcgtggtggatgcaagcttctcgaatccattaaaaagggtatcacgccgccagaagaaaatagtgaaggacataaagaaacctgggcagacaataattaaaggacataggagttatgatctgatgctcagtctgcagcttggaatcaggtatacagttggaaagattacacctattcagagacgtgaagtgcgagcttctgattatggttccagagcaagtttctggatgaacttccccaaaaatggttcacgacttactccttcacatcatgctgataattttaaatggaaagactactgcccaatggtgttcagaaatttgagggagatgttcaagattgatgcagcggattatatggtttccatttgtggaagtgacgcacttagggagctatcttctcctggaaagagtggaagtgtcttctttctatctcaggatgatcgatttatgatcaagactctacggaagtctgaagtgcaggttcttctacgaatgcttccagagtattatcaccatgtccgtacctatgagaacacactcataactaagttttttggcctccacagggttaaaccgtccagcagtcaaaagttccggtttgtagtgatgggaaacatgttttgcactgaacttagaattcaccggaggtttgacttgaaaggttcatccttaggccgctcaacagacaaagtaaaaatcgacgagaacacaacactgaaagacttggatctaaactattcattttatctcgagccttcttggcggcagactttgcttgcgcaaattgagaccgatagcaaatttctaaagcagcacgcaataatggattatagtttgcttcttggcgttcatttccgggctcctcaaagcctacggacacaggcatcctttcatcaagcaatcctaccagataggctggctgttctttcagaagaaggtgctctggaggaggatgttttgaacagtcctgaaggactggttttggttcagcgagctagtgatcaaaatgatgttgtcattggttcccatataaggggggcccgtcttcgatcatcaagtgcaagttttgaggaagtagatctcttgcttccaggcaccgcaaggctccagatccaacttggggttaacatgccggccagggcaaaacagacggttgaggatgatgacagtgaagataatggtcaggtgtatgatgtggtgctgtacctgggaataattgatatcttgcaggagtacagcataaggaagaagattgagcatgcttacaagtgcatccaatataactcattgtcaatatctgtcgtggaacccagtctctactcggagcgcttcctgaaattcattcaaactatctttcctgaaaattcataaaataaaatccagtaattcttcacctacaggagcaaagtgaaagaaacattgttcagtgtgcattgtggccctttgcaagtatgcttttgctacgtccttgattgattctctttctttacacatgttgatcatggtaaggatttccggattacgtatcccagtggtgctatccactagtagtggataactgtaccttgccctattaatctgagttgatgacgattctaccgtctacttcaaattcacactgtctaaacaatgttttgcacattcacttattcataccagtaaattcagccttagggctggtttggttttgtgacaaagggagattgaaggagaaataaactaatttctccctcagtgtcatccaatccacctgtgatttctagtcaccaaaccagaccttagtgtaccttgaattccacgtccattgtagtattgtatgtgtaaaaatgtccattgtagtattgtatgtgtaaaaatgttttgcacaaaatgtattctctgtgggtaaatttagcttttagatttttggaagtattatcagacctataagcctattattattattgttttattacagagagattcctaaaaaaacaagaagctattaaatggtgattctcctttatttctacttgcacaggttcaaattttacataatagaaggtgataacatactctgtccgtccatacttttggaagcagcagcagcacctgctgtcatccacgagctaagcatatagaagcagcagcacctgccagagacttatccatccatgtccctatattcaaacttcaatacagtttatagtgcaaaatagtgtttcgaataatggatacggtcattttaagatttgcttggatattcacctcaatccacatacattcaagtggattgtaaatgtaagtttaacttccacccttaatttaccttaaatattatatggatcgaatgtaaaactgaggtggatatgagtgcagccaaacaaacacaaactattatatttgacgattcactaagctccacaagcggc

SEQ ID NO: 53782 - DNA, 1814 bp, Zea Mays
cccaaacctcaaccgacactccccgtggggggcggtgccgtcgccggcgactcgccaattttgatttgaagaaaagaaaccaccagccaccacgcccgcggccgtcagccggaggtgaaggtatacagttggaaagattacacctattcagagacgtgaagtgcgagcttctgattatggttccagagcaagtttctggatgaacttccccaaaaatggttcacgacttactccttcacatcatgctgataattttaaatggaaagactactgcccaatggtgttcagaaatttgagggagatgttcaagattgatgcagcggattatatggtttccatttgtggaagtgacgcacttagggagctatcttctcctggaaagagtggaagtgtcttctttctatctcaggatgatcgatttatgatcaagactctacggaagtctgaagtgcaggttcttctacgaatgcttccagagtattatcaccatgtccgtacctatgagaacacactcataactaagttttttggcctccacagggttaaaccgtccagcagtcaaaagttccggtttgtagtgatgggaaacatgttttgcactgaacttagaattcaccggaggtttgacttgaaaggttcatccttaggccgctcaacagacaaagtaaaaatcgacgagaacacaacactgaaagacttggatctaaactattcattttatctcgagccttcttggcggcagactttgcttgcgcaaattgagaccgatagcaaatttctaaagcagcacgcaataatggattatagtttgcttcttggcgttcatttccgggctcctcaaagcctacggacacaggcatcctttcatcaagcaatcctaccagataggctggctgttctttcagaagaaggtgctctggaggaggatgttttgaacagtcctgaaggactggttttggttcagcgagctagtgatcaaaatgatgttgtcattggttcccatataaggggggcccgtcttcgatcatcaagtgcaagttttgaggaagtagatctcttgcttccaggcaccgcaaggctccagatccaacttggggttaacatgccggccagggcaaaacagacggttgaggatgatgacagtgaagataatggtcaggtgtatgatgtggtgctgtacctgggaataattgatatcttgcaggagtacagcataaggaagaagattgagcatgcttacaagtgcatccaatataactcattgtcaatatctgtcgtggaacccagtctctactcggagcgcttcctgaaattcattcaaactatctttcctgaaaattcataaaataaaatccagtaattcttcacctacaggagcaaagtgaaagaaacattgttcagtgtgcattgtggccctttgcaagttcaaattttacataatagaaggtgataacatactctgtccgtccatacttttggaagcagcagcagcacctgctgtcatccacgagctaagcatatagaagcagcagcacctgccagagacttatccatccatgtccctatattcaaacttcaatacagtttatagtgcaaaatagtgtttcgaataatggatacggtcattttaagatttgcttggatattcacctcaatccacatacattcaagtggattgtaaatgtaagtttaacttccacccttaatttaccttaaatattatatggatcgaatgtaaaactgaggtggatatgagtgcagccaaacaaacacaaactattatatttgacgattcactaagctccacaagcggc

SEQ ID NO: 53783 - DNA, 3162 bp, Zea Mays
gtccaacccaaacctcaaccgacactccccgtggggggcggtgccgtcgccggcgactcgccaattttgatttgaagaaaagaaaccaccagccaccacgcccgcggccgtcagccggaggtgaagcacgcaattcattacaaaagggtcccctgccaagatccaacactcatgaattgcaacaatacggatcggagacagcgagcagatctcgcggacttgcaattcctgttttatcttcttgccgcagcccctgctgagctgtgagctgtatgcatggcatggccacccctgtggcgcctcttctccatgatgagcctcaagctgctggtatcttactcccagggacaacccagcattcagatcaaacaaactctgactctagagttggagagcttatactgcctaatggggatacttatcgtggcgcgttatcgggcaacacgccacatggcccaggttgttatatctggtccgatggttgtgtttatgagggtgattggaggagaggcctcaggcatggccgaggcaagacgctgtggccaacaggggccacctacacaggtgactactccggtggctacatttatggtcagggaacgtataccgccgggcttaacagttacaggggaggctggaagctgaatcttaagcatggccaccttggcctacagacatatcccaacggagacacttttcaaggttcttgggtgcatgggcaaatgcaggggcatggcacctatacctgggcaaatgggaacacttatgttggcgccatgaaagatggggtcatgtcaggcaaaggaattctcacatggaacaatggagattcatttgaagggaactggttagatggtgccatgcatggctatggaatctacacatggaaggactctggctactatgtaggaacctggacaaggggggtcaaggacggaaaaggcacgttctatccaaaatgccgtgggattccggttaccgacatcgacgatttaagaaacagaggtgtactgcctggtgctgaaagccagactcatggttcccgtatccttcactctgcctcatcggacatggcagacatggtggctagcagaaatcaggactctgtaggtatttcatctgttagaagcttgaattttgagaaaactcgctccactaatgtgctactggaaagaaggtggagccttggagtggctattgaaaaattcctcggtcgcgaaaccaatgaaagttctgcaattgaaagatgtgaaaacaaggctgattccaaccttcctatactggaacgggaatatatgcaaggtgttctcatcagcgaggtcgtggtggatgcaagcttctcgaatccattaaaaagggtatcacgccgccagaagaaaatagtgaaggacataaagaaacctgggcagacaataattaaaggacataggagttatgatctgatgctcagtctgcagcttggaatcaggtatacagttggaaagattacacctattcagagacgtgaagtgcgagcttctgattatggttccagagcaagtttctggatgaacttccccaaaaatggttcacgacttactccttcacatcatgctgataattttaaatggaaagactactgcccaatggtgttcagaaatttgagggagatgttcaagattgatgcagcggattatatggtttccatttgtggaagtgacgcacttagggagctatcttctcctggaaagagtggaagtgtcttctttctatctcaggatgatcgatttatgatcaagactctacggaagtctgaagtgcaggttcttctacgaatgcttccagagtattatcaccatgtccgtacctatgagaacacactcataactaagttttttggcctccacagggttaaaccgtccagcagtcaaaagttccggtttgtagtgatgggaaacatgttttgcactgaacttagaattcaccggaggtttgacttgaaaggttcatccttaggccgctcaacagacaaagtaaaaatcgacgagaacacaacactgaaagacttggatctaaactattcattttatctcgagccttcttggcggcagactttgcttgcgcaaattgagaccgatagcaaatttctaaagcagcacgcaataatggattatagtttgcttcttggcgttcatttccgggctcctcaaagcctacggacacaggcatcctttcatcaagcaatcctaccagataggctggctgttctttcagaagaaggtgctctggaggaggatgttttgaacagtcctgaaggactggttttggttcagcgagctagtgatcaaaatgatgttgtcattggttcccatataaggggggcccgtcttcgatcatcaagtgcaagttttgaggaagtagatctcttgcttccaggcaccgcaaggctccagatccaacttggggttaacatgccggccagggcaaaacagacggttgaggatgatgacagtgaagataatggtcaggtgtatgatgtggtgctgtacctgggaataattgatatcttgcaggagtacagcataaggaagaagattgagcatgcttacaagtgcatccaatataactcattgtcaatatctgtcgtggaacccagtctctactcggagcgcttcctgaaattcattcaaactatctttcctgaaaattcataaaataaaatccagtaattcttcacctacaggagcaaagtgaaagaaacattgttcagtgtgcattgtggccctttgcaagttcaaattttacataatagaaggtgataacatactctgtccgtccatacttttggaagcagcagcagcacctgctgtcatccacgagctaagcatatagaagcagcagcacctgccagagacttatccatccatgtccctatattcaaacttcaatacagtttatagtgcaaaatagtgtttcgaataatggatacggtcattttaagatttgcttggatattcacctcaatccacatacattcaagtggattgtaaatgtaagtttaacttccacccttaatttaccttaaatattatatggatcgaatgtaaaactgaggtggatatgagtgcagccaaacaaacacaaactattatatttgacgattcactaagctccacaagcggc

SEQ ID NO: 53784 - DNA, 3313 bp, Zea Mays
gtccaacccaaacctcaaccgacactccccgtggggggcggtgccgtcgccggcgactcgccaattttgatttgaagaaaagaaaccaccagccaccacgcccgcggccgtcagccggaggtgaagcacgcaattcattacaaaagggtcccctgccaagatccaacactcatgaattgcaacaatacggatcggagacagcgagcagatctcgcggacttgcaattcctgttttatcttcttgccgcagcccctgctgagctgtgagctgtatgcatggcatggccacccctgtggcgcctcttctccatgatgagcctcaagctgctggtatcttactcccagggacaacccagcattcagatcaaacaaactctgactctagagttggagagcttatactgcctaatggggatacttatcgtggcgcgttatcgggcaacacgccacatggcccaggttgttatatctggtccgatggttgtgtttatgagggtgattggaggagaggcctcaggcatggccgaggcaagacgctgtggccaacaggggccacctacacaggtgactactccggtggctacatttatggtcagggaacgtataccgccgggcttaacagttacaggggaggctggaagctgaatcttaagcatggccaccttggcctacagacatatcccaacggagacacttttcaaggttcttgggtgcatgggcaaatgcaggggcatggcacctatacctgggcaaatgggaacacttatgttggcgccatgaaagatggggtcatgtcaggcaaaggaattctcacatggaacaatggagattcatttgaagggaactggttagatggtgccatgcatggctatggaatctacacatggaaggactctggctactatgtaggaacctggacaaggggggtcaaggacggaaaaggcacgttctatccaaaatgccgtgggattccggttaccgacatcgacgatttaagaaacagaggtgtactgcctggtgctgaaagccagactcatggttcccgtatccttcactctgcctcatcggacatggcagacatggtggctagcagaaatcaggactctgtaggtatttcatctgttagaagcttgaattttgagaaaactcgctccactaatgtgctactggaaagaaggtggagccttggagtggctattgaaaaattcctcggtcgcgaaaccaatgaaagttctgcaattgaaagatgtgaaaacaaggctgattccaaccttcctatactggaacgggaatatatgcaaggtgttctcatcagcgaggtcgtggtggatgcaagcttctcgaatccattaaaaagggtatcacgccgccagaagaaaatagtgaaggacataaagaaacctgggcagacaataattaaaggacataggagttatgatctgatgctcagtctgcagcttggaatcagtgtcaacaaaatgcgaaggagaactaggtggcggctttctgtcatctaaaaaatgtagtggaagagcgagtgtcatgatggtgatgcaaattgtagcaaatgtgtgcatttgtggtcctcatctggagccaaagatctccaggagttccttgtatacagttggaaagattacacctattcagagacgtgaagtgcgagcttctgattatggttccagagcaagtttctggatgaacttccccaaaaatggttcacgacttactccttcacatcatgctgataattttaaatggaaagactactgcccaatggtgttcagaaatttgagggagatgttcaagattgatgcagcggattatatggtttccatttgtggaagtgacgcacttagggagctatcttctcctggaaagagtggaagtgtcttctttctatctcaggatgatcgatttatgatcaagactctacggaagtctgaagtgcaggttcttctacgaatgcttccagagtattatcaccatgtccgtacctatgagaacacactcataactaagttttttggcctccacagggttaaaccgtccagcagtcaaaagttccggtttgtagtgatgggaaacatgttttgcactgaacttagaattcaccggaggtttgacttgaaaggttcatccttaggccgctcaacagacaaagtaaaaatcgacgagaacacaacactgaaagacttggatctaaactattcattttatctcgagccttcttggcggcagactttgcttgcgcaaattgagaccgatagcaaatttctaaagcagcacgcaataatggattatagtttgcttcttggcgttcatttccgggctcctcaaagcctacggacacaggcatcctttcatcaagcaatcctaccagataggctggctgttctttcagaagaaggtgctctggaggaggatgttttgaacagtcctgaaggactggttttggttcagcgagctagtgatcaaaatgatgttgtcattggttcccatataaggggggcccgtcttcgatcatcaagtgcaagttttgaggaagtagatctcttgcttccaggcaccgcaaggctccagatccaacttggggttaacatgccggccagggcaaaacagacggttgaggatgatgacagtgaagataatggtcaggtgtatgatgtggtgctgtacctgggaataattgatatcttgcaggagtacagcataaggaagaagattgagcatgcttacaagtgcatccaatataactcattgtcaatatctgtcgtggaacccagtctctactcggagcgcttcctgaaattcattcaaactatctttcctgaaaattcataaaataaaatccagtaattcttcacctacaggagcaaagtgaaagaaacattgttcagtgtgcattgtggccctttgcaagttcaaattttacataatagaaggtgataacatactctgtccgtccatacttttggaagcagcagcagcacctgctgtcatccacgagctaagcatatagaagcagcagcacctgccagagacttatccatccatgtccctatattcaaacttcaatacagtttatagtgcaaaatagtgtttcgaataatggatacggtcattttaagatttgcttggatattcacctcaatccacatacattcaagtggattgtaaatgtaagtttaacttccacccttaatttaccttaaatattatatggatcgaatgtaaaactgaggtggatatgagtgcagccaaacaaacacaaactattatatttgacgattcactaagctccacaagcggc

SEQ ID NO: 53785 - DNA, 3097 bp, Zea Mays
tccagtccaacccaaacctcaaccgacactccccgtggggggcggtgccgtcgccggcgactcgccaattttgatttgaagaaaagaaaccaccagccaccacgcccgcggccgtcagccggaggtgaagcccctgctgagctgtgagctgtatgcatggcatggccacccctgtggcgcctcttctccatgatgagcctcaagctgctggtatcttactcccagggacaacccagcattcagatcaaacaaactctgactctagagttggagagcttatactgcctaatggggatacttatcgtggcgcgttatcgggcaacacgccacatggcccaggttgttatatctggtccgatggttgtgtttatgagggtgattggaggagaggcctcaggcatggccgaggcaagacgctgtggccaacaggggccacctacacaggtgactactccggtggctacatttatggtcagggaacgtataccgccgggcttaacagttacaggggaggctggaagctgaatcttaagcatggccaccttggcctacagacatatcccaacggagacacttttcaaggttcttgggtgcatgggcaaatgcaggggcatggcacctatacctgggcaaatgggaacacttatgttggcgccatgaaagatggggtcatgtcaggcaaaggaattctcacatggaacaatggagattcatttgaagggaactggttagatggtgccatgcatggctatggaatctacacatggaaggactctggctactatgtaggaacctggacaaggggggtcaaggacggaaaaggcacgttctatccaaaatgccgtgggattccggttaccgacatcgacgatttaagaaacagaggtgtactgcctggtgctgaaagccagactcatggttcccgtatccttcactctgcctcatcggacatggcagacatggtggctagcagaaatcaggactctgtaggtatttcatctgttagaagcttgaattttgagaaaactcgctccactaatgtgctactggaaagaaggtggagccttggagtggctattgaaaaattcctcggtcgcgaaaccaatgaaagttctgcaattgaaagatgtgaaaacaaggctgattccaaccttcctatactggaacgggaatatatgcaaggtgttctcatcagcgaggtcgtggtggatgcaagcttctcgaatccattaaaaagggtatcacgccgccagaagaaaatagtgaaggacataaagaaacctgggcagacaataattaaaggacataggagttatgatctgatgctcagtctgcagcttggaatcaggtatacagttggaaagattacacctattcagagacgtgaagtgcgagcttctgattatggttccagagcaagtttctggatgaacttccccaaaaatggttcacgacttactccttcacatcatgctgataattttaaatggaaagactactgcccaatggtgttcagaaatttgagggagatgttcaagattgatgcagcggattatatggtttccatttgtggaagtgacgcacttagggagctatcttctcctggaaagagtggaagtgtcttctttctatctcaggatgatcgatttatgatcaagactctacggaagtctgaagtgcaggttcttctacgaatgcttccagagtattatcaccatgtccgtacctatgagaacacactcataactaagttttttggcctccacagggttaaaccgtccagcagtcaaaagttccggtttgtagtgatgggaaacatgttttgcactgaacttagaattcaccggaggtttgacttgaaaggttcatccttaggccgctcaacagacaaagtaaaaatcgacgagaacacaacactgaaagacttggatctaaactattcattttatctcgagccttcttggcggcagactttgcttgcgcaaattgagaccgatagcaaatttctaaagcagcacgcaataatggattatagtttgcttcttggcgttcatttccgggctcctcaaagcctacggacacaggcatcctttcatcaagcaatcctaccagataggctggctgttctttcagaagaaggtgctctggaggaggatgttttgaacagtcctgaaggactggttttggttcagcgagctagtgatcaaaatgatgttgtcattggttcccatataaggggggcccgtcttcgatcatcaagtgcaagttttgaggaagtagatctcttgcttccaggcaccgcaaggctccagatccaacttggggttaacatgccggccagggcaaaacagacggttgaggatgatgacagtgaagataatggtcaggtgtatgatgtggtgctgtacctgggaataattgatatcttgcaggagtacagcataaggaagaagattgagcatgcttacaagtgcatccaatataactcattgtcaatatctgtcgtggaacccagtctctactcggagcgcttcctgaaattcattcaaactatctttcctgaaaattcataaaataaaatccagtaattcttcacctacaggagcaaagtgaaagaaacattgttcagtgtgcattgtggccctttgcaagtatgcttttgctacgtccttgattgattctctttctttacacatgttgatcatggttcaaattttacataatagaaggtgataacatactctgtccgtccatacttttggaagcagcagcagcacctgctgtcatccacgagctaagcatatagaagcagcagcacctgccagagacttatccatccatgtccctatattcaaacttcaatacagtttatagtgcaaaatagtgtttcgaataatggatacggtcattttaagatttgcttggatattcacctcaatccacatacattcaagtggattgtaaatgtaagtttaacttccacccttaatttaccttaaatattatatggatcgaatgtaaaactgaggtggatatgagtgcagccaaacaaacacaaactattatatttgacgattcactaagctccacaagcggc

SEQ ID NO: 53786 - DNA, 3129 bp, Zea Mays
gtccagtccagtccaacccaaacctcaaccgacactccccgtggggggcggtgccgtcgccggcgactcgccaattttgatttgaagaaaagaaaccaccagccaccacgcccgcggccgtcagccggaggtgaagggtcccctgccaagatccaacactcatgaattgcaacaatacggatcggagacagcgagcagatctcgcggacttgcaattcccctgctgagctgtgagctgtatgcatggcatggccacccctgtggcgcctcttctccatgatgagcctcaagctgctggtatcttactcccagggacaacccagcattcagatcaaacaaactctgactctagagttggagagcttatactgcctaatggggatacttatcgtggcgcgttatcgggcaacacgccacatggcccaggttgttatatctggtccgatggttgtgtttatgagggtgattggaggagaggcctcaggcatggccgaggcaagacgctgtggccaacaggggccacctacacaggtgactactccggtggctacatttatggtcagggaacgtataccgccgggcttaacagttacaggggaggctggaagctgaatcttaagcatggccaccttggcctacagacatatcccaacggagacacttttcaaggttcttgggtgcatgggcaaatgcaggggcatggcacctatacctgggcaaatgggaacacttatgttggcgccatgaaagatggggtcatgtcaggcaaaggaattctcacatggaacaatggagattcatttgaagggaactggttagatggtgccatgcatggctatggaatctacacatggaaggactctggctactatgtaggaacctggacaaggggggtcaaggacggaaaaggcacgttctatccaaaatgccgtgggattccggttaccgacatcgacgatttaagaaacagaggtgtactgcctggtgctgaaagccagactcatggttcccgtatccttcactctgcctcatcggacatggcagacatggtggctagcagaaatcaggactctgtaggtatttcatctgttagaagcttgaattttgagaaaactcgctccactaatgtgctactggaaagaaggtggagccttggagtggctattgaaaaattcctcggtcgcgaaaccaatgaaagttctgcaattgaaagatgtgaaaacaaggctgattccaaccttcctatactggaacgggaatatatgcaaggtgttctcatcagcgaggtcgtggtggatgcaagcttctcgaatccattaaaaagggtatcacgccgccagaagaaaatagtgaaggacataaagaaacctgggcagacaataattaaaggacataggagttatgatctgatgctcagtctgcagcttggaatcaggtatacagttggaaagattacacctattcagagacgtgaagtgcgagcttctgattatggttccagagcaagtttctggatgaacttccccaaaaatggttcacgacttactccttcacatcatgctgataattttaaatggaaagactactgcccaatggtgttcagaaatttgagggagatgttcaagattgatgcagcggattatatggtttccatttgtggaagtgacgcacttagggagctatcttctcctggaaagagtggaagtgtcttctttctatctcaggatgatcgatttatgatcaagactctacggaagtctgaagtgcaggttcttctacgaatgcttccagagtattatcaccatgtccgtacctatgagaacacactcataactaagttttttggcctccacagggttaaaccgtccagcagtcaaaagttccggtttgtagtgatgggaaacatgttttgcactgaacttagaattcaccggaggtttgacttgaaaggttcatccttaggccgctcaacagacaaagtaaaaatcgacgagaacacaacactgaaagacttggatctaaactattcattttatctcgagccttcttggcggcagactttgcttgcgcaaattgagaccgatagcaaatttctaaagcagcacgcaataatggattatagtttgcttcttggcgttcatttccgggctcctcaaagcctacggacacaggcatcctttcatcaagcaatcctaccagataggctggctgttctttcagaagaaggtgctctggaggaggatgttttgaacagtcctgaaggactggttttggttcagcgagctagtgatcaaaatgatgttgtcattggttcccatataaggggggcccgtcttcgatcatcaagtgcaagttttgaggaagtagatctcttgcttccaggcaccgcaaggctccagatccaacttggggttaacatgccggccagggcaaaacagacggttgaggatgatgacagtgaagataatggtcaggtgtatgatgtggtgctgtacctgggaataattgatatcttgcaggagtacagcataaggaagaagattgagcatgcttacaagtgcatccaatataactcattgtcaatatctgtcgtggaacccagtctctactcggagcgcttcctgaaattcattcaaactatctttcctgaaaattcataaaataaaatccagtaattcttcacctacaggagcaaagtgaaagaaacattgttcagtgtgcattgtggccctttgcaagttcaaattttacataatagaaggtgataacatactctgtccgtccatacttttggaagcagcagcagcacctgctgtcatccacgagctaagcatatagaagcagcagcacctgccagagacttatccatccatgtccctatattcaaacttcaatacagtttatagtgcaaaatagtgtttcgaataatggatacggtcattttaagatttgcttggatattcacctcaatccacatacattcaagtggattgtaaatgtaagtttaacttccacccttaatttaccttaaatattatatggatcgaatgtaaaactgaggtggatatgagtgcagccaaacaaacacaaactattatatttgacgattcactaagctccacaagcggc

SEQ ID NO: 53787 - DNA, 3218 bp, Zea Mays
cccagcccagcccagtccagtccagtccaacccaaacctcaaccgacactccccgtggggggcggtgccgtcgccggcgactcgccaattttgatttgaagaaaagaaaccaccagccaccacgcccgcggccgtcagccggaggtgaagcacgcaattcattacaaaagggtcccctgccaagatccaacactcatgaattgcaacaatacggatcggagacagcgagcagatctcgcggacttgcaattcccctgctgagctgtgagctgtatgcatggcatggccacccctgtggcgcctcttctccatgatgagcctcaagctgctggtatcttactcccagggacaacccagcattcagatcaaacaaactctgactctagagttggagagcttatactgcctaatggggatacttatcgtggcgcgttatcgggcaacacgccacatggcccaggttgttatatctggtccgatggttgtgtttatgagggtgattggaggagaggcctcaggcatggccgaggcaagacgctgtggccaacaggggccacctacacaggtgactactccggtggctacatttatggtcagggaacgtataccgccgggcttaacagttacaggggaggctggaagctgaatcttaagcatggccaccttggcctacagacatatcccaacggagacacttttcaaggttcttgggtgcatgggcaaatgcaggggcatggcacctatacctgggcaaatgggaacacttatgttggcgccatgaaagatggggtcatgtcaggcaaaggaattctcacatggaacaatggagattcatttgaagggaactggttagatggtgccatgcatggctatggaatctacacatggaaggactctggctactatgtaggaacctggacaaggggggtcaaggacggaaaaggcacgttctatccaaaatgccgtgggattccggttaccgacatcgacgatttaagaaacagaggtgtactgcctggtgctgaaagccagactcatggttcccgtatccttcactctgcctcatcggacatggcagacatggtggctagcagaaatcaggactctgtaggtatttcatctgttagaagcttgaattttgagaaaactcgctccactaatgtgctactggaaagaaggtggagccttggagtggctattgaaaaattcctcggtcgcgaaaccaatgaaagttctgcaattgaaagatgtgaaaacaaggctgattccaaccttcctatactggaacgggaatatatgcaaggtgttctcatcagcgaggtcgtggtggatgcaagcttctcgaatccattaaaaagggtatcacgccgccagaagaaaatagtgaaggacataaagaaacctgggcagacaataattaaaggacataggagttatgatctgatgctcagtctgcagcttggaatcaggtatacagttggaaagattacacctattcagagacgtgaagtgcgagcttctgattatggttccagagcaagtttctggatgaacttccccaaaaatggttcacgacttactccttcacatcatgctgataattttaaatggaaagactactgcccaatggtgttcagaaatttgagggagatgttcaagattgatgcagcggattatatggtttccatttgtggaagtgacgcacttagggagctatcttctcctggaaagagtggaagtgtcttctttctatctcaggatgatcgatttatgatcaagactctacggaagtctgaagtgcaggttcttctacgaatgcttccagagtattatcaccatgtccgtacctatgagaacacactcataactaagttttttggcctccacagggttaaaccgtccagcagtcaaaagttccggtttgtagtgatgggaaacatgttttgcactgaacttagaattcaccggaggtttgacttgaaaggttcatccttaggccgctcaacagacaaagtaaaaatcgacgagaacacaacactgaaagacttggatctaaactattcattttatctcgagccttcttggcggcagactttgcttgcgcaaattgagaccgatagcaaatttctaaagcagcacgcaataatggattatagtttgcttcttggcgttcatttccgggctcctcaaagcctacggacacaggcatcctttcatcaagcaatcctaccagataggctggctgttctttcagaagaaggtgctctggaggaggatgttttgaacagtcctgaaggactggttttggttcagcgagctagtgatcaaaatgatgttgtcattggttcccatataaggggggcccgtcttcgatcatcaagtgcaagttttgaggaagtagatctcttgcttccaggcaccgcaaggctccagatccaacttggggttaacatgccggccagggcaaaacagacggttgaggatgatgacagtgaagataatggtcaggtgtatgatgtggtgctgtacctgggaataattgatatcttgcaggagtacagcataaggaagaagattgagcatgcttacaagtgcatccaatataactcattgtcaatatctgtcgtggaacccagtctctactcggagcgcttcctgaaattcattcaaactatctttcctgaaaattcataaaataaaatccagtaattcttcacctacaggagcaaagtgaaagaaacattgttcagtgtgcattgtggccctttgcaagtatgcttttgctacgtccttgattgattctctttctttacacatgttgatcatggttcaaattttacataatagaaggtgataacatactctgtccgtccatacttttggaagcagcagcagcacctgctgtcatccacgagctaagcatatagaagcagcagcacctgccagagacttatccatccatgtccctatattcaaacttcaatacagtttatagtgcaaaatagtgtttcgaataatggatacggtcattttaagatttgcttggatattcacctcaatccacatacattcaagtggattgtaaatgtaagtttaacttccacccttaatttaccttaaatattatatggatcgaatgtaaaactgaggtggatatgagtgcagccaaacaaacacaaactattatatttgacgattcactaagctccacaagcggc

SEQ ID NO: 53788 - DNA, 3163 bp, Zea Mays
cccagcccagcccagtccagtccagtccaacccaaacctcaaccgacactccccgtggggggcggtgccgtcgccggcgactcgccaattttgatttgaagaaaagaaaccaccagccaccacgcccgcggccgtcagccggaggtgaagcacgcaattcattacaaaagggtcccctgccaagatccaacactcatgaattgcaacaatacggatcggagacagcgagcagatctcgcggacttgcaattcccctgctgagctgtgagctgtatgcatggcatggccacccctgtggcgcctcttctccatgatgagcctcaagctgctggtatcttactcccagggacaacccagcattcagatcaaacaaactctgactctagagttggagagcttatactgcctaatggggatacttatcgtggcgcgttatcgggcaacacgccacatggcccaggttgttatatctggtccgatggttgtgtttatgagggtgattggaggagaggcctcaggcatggccgaggcaagacgctgtggccaacaggggccacctacacaggtgactactccggtggctacatttatggtcagggaacgtataccgccgggcttaacagttacaggggaggctggaagctgaatcttaagcatggccaccttggcctacagacatatcccaacggagacacttttcaaggttcttgggtgcatgggcaaatgcaggggcatggcacctatacctgggcaaatgggaacacttatgttggcgccatgaaagatggggtcatgtcaggcaaaggaattctcacatggaacaatggagattcatttgaagggaactggttagatggtgccatgcatggctatggaatctacacatggaaggactctggctactatgtaggaacctggacaaggggggtcaaggacggaaaaggcacgttctatccaaaatgccgtgggattccggttaccgacatcgacgatttaagaaacagaggtgtactgcctggtgctgaaagccagactcatggttcccgtatccttcactctgcctcatcggacatggcagacatggtggctagcagaaatcaggactctgtaggtatttcatctgttagaagcttgaattttgagaaaactcgctccactaatgtgctactggaaagaaggtggagccttggagtggctattgaaaaattcctcggtcgcgaaaccaatgaaagttctgcaattgaaagatgtgaaaacaaggctgattccaaccttcctatactggaacgggaatatatgcaaggtgttctcatcagcgaggtcgtggtggatgcaagcttctcgaatccattaaaaagggtatcacgccgccagaagaaaatagtgaaggacataaagaaacctgggcagacaataattaaaggacataggagttatgatctgatgctcagtctgcagcttggaatcaggtatacagttggaaagattacacctattcagagacgtgaagtgcgagcttctgattatggttccagagcaagtttctggatgaacttccccaaaaatggttcacgacttactccttcacatcatgctgataattttaaatggaaagactactgcccaatggtgttcagaaatttgagggagatgttcaagattgatgcagcggattatatggtttccatttgtggaagtgacgcacttagggagctatcttctcctggaaagagtggaagtgtcttctttctatctcaggatgatcgatttatgatcaagactctacggaagtctgaagtgcaggttcttctacgaatgcttccagagtattatcaccatgtccgtacctatgagaacacactcataactaagttttttggcctccacagggttaaaccgtccagcagtcaaaagttccggtttgtagtgatgggaaacatgttttgcactgaacttagaattcaccggaggtttgacttgaaaggttcatccttaggccgctcaacagacaaagtaaaaatcgacgagaacacaacactgaaagacttggatctaaactattcattttatctcgagccttcttggcggcagactttgcttgcgcaaattgagaccgatagcaaatttctaaagcagcacgcaataatggattatagtttgcttcttggcgttcatttccgggctcctcaaagcctacggacacaggcatcctttcatcaagcaatcctaccagataggctggctgttctttcagaagaaggtgctctggaggaggatgttttgaacagtcctgaaggactggttttggttcagcgagctagtgatcaaaatgatgttgtcattggttcccatataaggggggcccgtcttcgatcatcaagtgcaagttttgaggaagtagatctcttgcttccaggcaccgcaaggctccagatccaacttggggttaacatgccggccagggcaaaacagacggttgaggatgatgacagtgaagataatggtcaggtgtatgatgtggtgctgtacctgggaataattgatatcttgcaggagtacagcataaggaagaagattgagcatgcttacaagtgcatccaatataactcattgtcaatatctgtcgtggaacccagtctctactcggagcgcttcctgaaattcattcaaactatctttcctgaaaattcataaaataaaatccagtaattcttcacctacaggagcaaagtgaaagaaacattgttcagtgtgcattgtggccctttgcaagttcaaattttacataatagaaggtgataacatactctgtccgtccatacttttggaagcagcagcagcacctgctgtcatccacgagctaagcatatagaagcagcagcacctgccagagacttatccatccatgtccctatattcaaacttcaatacagtttatagtgcaaaatagtgtttcgaataatggatacggtcattttaagatttgcttggatattcacctcaatccacatacattcaagtggattgtaaatgtaagtttaacttccacccttaatttaccttaaatattatatggatcgaatgtaaaactgaggtggatatgagtgcagccaaacaaacacaaactattatatttgacgattcactaagctccacaagcggc

SEQ ID NO: 53789 - DNA, 3537 bp, Zea Mays
cggcgatcttccatcagcggatcagcggaggcaggcccagcccagcccagcccagtccagtccagtccaacccaaacctcaaccgacactccccgtggggggcggtgccgtcgccggcgactcgccaattttgatttgaagaaaagaaaccaccagccaccacgcccgcggccgtcagccggaggtgaaggtgaggcaaccaatacccggatggattcctctattagctacgtactagtctgattcccccaccgtcactcctcgggccgcccccagtatttttcgattccattacctgaggaataatctcattagttaattatttgggtttgaaccagatacgcatgcaatgcatgcaggcagggtgttctgtttcatcattctttttttttcttctcatctccggcacggggacggggatcagattcacgccactttattatttattactatgctcaccacttctcagcacgcaattcattacaaaagggtcccctgccaagatccaacactcatgaattgcaacaatacggatcggagacagcgagcagatctcgcggacttgcaattcccctgctgagctgtgagctgtatgcatggcatggccacccctgtggcgcctcttctccatgatgagcctcaagctgctggtatcttactcccagggacaacccagcattcagatcaaacaaactctgactctagagttggagagcttatactgcctaatggggatacttatcgtggcgcgttatcgggcaacacgccacatggcccaggttgttatatctggtccgatggttgtgtttatgagggtgattggaggagaggcctcaggcatggccgaggcaagacgctgtggccaacaggggccacctacacaggtgactactccggtggctacatttatggtcagggaacgtataccgccgggcttaacagttacaggggaggctggaagctgaatcttaagcatggccaccttggcctacagacatatcccaacggagacacttttcaaggttcttgggtgcatgggcaaatgcaggggcatggcacctatacctgggcaaatgggaacacttatgttggcgccatgaaagatggggtcatgtcaggcaaaggaattctcacatggaacaatggagattcatttgaagggaactggttagatggtgccatgcatggctatggaatctacacatggaaggactctggctactatgtaggaacctggacaaggggggtcaaggacggaaaaggcacgttctatccaaaatgccgtgggattccggttaccgacatcgacgatttaagaaacagaggtgtactgcctggtgctgaaagccagactcatggttcccgtatccttcactctgcctcatcggacatggcagacatggtggctagcagaaatcaggactctgtaggtatttcatctgttagaagcttgaattttgagaaaactcgctccactaatgtgctactggaaagaaggtggagccttggagtggctattgaaaaattcctcggtcgcgaaaccaatgaaagttctgcaattgaaagatgtgaaaacaaggctgattccaaccttcctatactggaacgggaatatatgcaaggtgttctcatcagcgaggtcgtggtggatgcaagcttctcgaatccattaaaaagggtatcacgccgccagaagaaaatagtgaaggacataaagaaacctgggcagacaataattaaaggacataggagttatgatctgatgctcagtctgcagcttggaatcaggtatacagttggaaagattacacctattcagagacgtgaagtgcgagcttctgattatggttccagagcaagtttctggatgaacttccccaaaaatggttcacgacttactccttcacatcatgctgataattttaaatggaaagactactgcccaatggtgttcagaaatttgagggagatgttcaagattgatgcagcggattatatggtttccatttgtggaagtgacgcacttagggagctatcttctcctggaaagagtggaagtgtcttctttctatctcaggatgatcgatttatgatcaagactctacggaagtctgaagtgcaggttcttctacgaatgcttccagagtattatcaccatgtccgtacctatgagaacacactcataactaagttttttggcctccacagggttaaaccgtccagcagtcaaaagttccggtttgtagtgatgggaaacatgttttgcactgaacttagaattcaccggaggtttgacttgaaaggttcatccttaggccgctcaacagacaaagtaaaaatcgacgagaacacaacactgaaagacttggatctaaactattcattttatctcgagccttcttggcggcagactttgcttgcgcaaattgagaccgatagcaaatttctaaagcagcacgcaataatggattatagtttgcttcttggcgttcatttccgggctcctcaaagcctacggacacaggcatcctttcatcaagcaatcctaccagataggctggctgttctttcagaagaaggtgctctggaggaggatgttttgaacagtcctgaaggactggttttggttcagcgagctagtgatcaaaatgatgttgtcattggttcccatataaggggggcccgtcttcgatcatcaagtgcaagttttgaggaagtagatctcttgcttccaggcaccgcaaggctccagatccaacttggggttaacatgccggccagggcaaaacagacggttgaggatgatgacagtgaagataatggtcaggtgtatgatgtggtgctgtacctgggaataattgatatcttgcaggagtacagcataaggaagaagattgagcatgcttacaagtgcatccaatataactcattgtcaatatctgtcgtggaacccagtctctactcggagcgcttcctgaaattcattcaaactatctttcctgaaaattcataaaataaaatccagtaattcttcacctacaggagcaaagtgaaagaaacattgttcagtgtgcattgtggccctttgcaagtatgcttttgctacgtccttgattgattctctttctttacacatgttgatcatggttcaaattttacataatagaaggtgataacatactctgtccgtccatacttttggaagcagcagcagcacctgctgtcatccacgagctaagcatatagaagcagcagcacctgccagagacttatccatccatgtccctatattcaaacttcaatacagtttatagtgcaaaatagtgtttcgaataatggatacggtcattttaagatttgcttggatattcacctcaatccacatacattcaagtggattgtaaatgtaagtttaacttccacccttaatttaccttaaatattatatggatcgaatgtaaaactgaggtggatatgagtgcagccaaacaaacacaaactattatatttgacgattcactaagctccacaagcggc

SEQ ID NO: 53790 - DNA, 2991 bp, Zea Mays
ctgctgttccggcgatcttccggccagagcatgagatagatcgatcgatcgagagtactaccggccggccagagcatctgctactgttccggcgatcttccatcagcggatcagcggagggacaacccagcattcagatcaaacaaactctgactctagagttggagagcttatactgcctaatggggatacttatcgtggcgcgttatcgggcaacacgccacatggcccaggttgttatatctggtccgatggttgtgtttatgagggtgattggaggagaggcctcaggcatggccgaggcaagacgctgtggccaacaggggccacctacacaggtgactactccggtggctacatttatggtcagggaacgtataccgccgggcttaacagttacaggggaggctggaagctgaatcttaagcatggccaccttggcctacagacatatcccaacggagacacttttcaaggttcttgggtgcatgggcaaatgcaggggcatggcacctatacctgggcaaatgggaacacttatgttggcgccatgaaagatggggtcatgtcaggcaaaggaattctcacatggaacaatggagattcatttgaagggaactggttagatggtgccatgcatggctatggaatctacacatggaaggactctggctactatgtaggaacctggacaaggggggtcaaggacggaaaaggcacgttctatccaaaatgccgtgggattccggttaccgacatcgacgatttaagaaacagaggtgtactgcctggtgctgaaagccagactcatggttcccgtatccttcactctgcctcatcggacatggcagacatggtggctagcagaaatcaggactctgtaggtatttcatctgttagaagcttgaattttgagaaaactcgctccactaatgtgctactggaaagaaggtggagccttggagtggctattgaaaaattcctcggtcgcgaaaccaatgaaagttctgcaattgaaagatgtgaaaacaaggctgattccaaccttcctatactggaacgggaatatatgcaaggtgttctcatcagcgaggtcgtggtggatgcaagcttctcgaatccattaaaaagggtatcacgccgccagaagaaaatagtgaaggacataaagaaacctgggcagacaataattaaaggacataggagttatgatctgatgctcagtctgcagcttggaatcaggtatacagttggaaagattacacctattcagagacgtgaagtgcgagcttctgattatggttccagagcaagtttctggatgaacttccccaaaaatggttcacgacttactccttcacatcatgctgataattttaaatggaaagactactgcccaatggtgttcagaaatttgagggagatgttcaagattgatgcagcggattatatggtttccatttgtggaagtgacgcacttagggagctatcttctcctggaaagagtggaagtgtcttctttctatctcaggatgatcgatttatgatcaagactctacggaagtctgaagtgcaggttcttctacgaatgcttccagagtattatcaccatgtccgtacctatgagaacacactcataactaagttttttggcctccacagggttaaaccgtccagcagtcaaaagttccggtttgtagtgatgggaaacatgttttgcactgaacttagaattcaccggaggtttgacttgaaaggttcatccttaggccgctcaacagacaaagtaaaaatcgacgagaacacaacactgaaagacttggatctaaactattcattttatctcgagccttcttggcggcagactttgcttgcgcaaattgagaccgatagcaaatttctaaagcagcacgcaataatggattatagtttgcttcttggcgttcatttccgggctcctcaaagcctacggacacaggcatcctttcatcaagcaatcctaccagataggctggctgttctttcagaagaaggtgctctggaggaggatgttttgaacagtcctgaaggactggttttggttcagcgagctagtgatcaaaatgatgttgtcattggttcccatataaggggggcccgtcttcgatcatcaagtgcaagttttgaggaagtagatctcttgcttccaggcaccgcaaggctccagatccaacttggggttaacatgccggccagggcaaaacagacggttgaggatgatgacagtgaagataatggtcaggtgtatgatgtggtgctgtacctgggaataattgatatcttgcaggagtacagcataaggaagaagattgagcatgcttacaagtgcatccaatataactcattgtcaatatctgtcgtggaacccagtctctactcggagcgcttcctgaaattcattcaaactatctttcctgaaaattcataaaataaaatccagtaattcttcacctacaggagcaaagtgaaagaaacattgttcagtgtgcattgtggccctttgcaagtatgcttttgctacgtccttgattgattctctttctttacacatgttgatcatggttcaaattttacataatagaaggtgataacatactctgtccgtccatacttttggaagcagcagcagcacctgctgtcatccacgagctaagcatatagaagcagcagcacctgccagagacttatccatccatgtccctatattcaaacttcaatacagtttatagtgcaaaatagtgtttcgaataatggatacggtcattttaagatttgcttggatattcacctcaatccacatacattcaagtggattgtaaatgtaagtttaacttccacccttaatttaccttaaatattatatggatcgaatgtaaaactgaggtggatatgagtgcagccaaacaaacacaaactattatatttgacgattcactaagctccacaagcggc

SEQ ID NO: 53791 - DNA, 3321 bp, Zea Mays
catatggtagctaggtgttggatgcatggattgctgctgttccggcgatcttccggccagagcatgagatagatcgatcgatcgagagtactaccggccggccagagcatctgctactgttccggcgatcttccatcagcggatcagcggagcacgcaattcattacaaaagggtcccctgccaagatccaacactcatgaattgcaacaatacggatcggagacagcgagcagatctcgcggacttgcaattgtaactcatctaatcccttattactttcgtcgttgtcgtcgtcgtcgtcgtcgtcgtcgtcatcatcattttgtgcagcctgttttatcttcttgccgcagcccctgctgagctgtgagctgtatgcatggcatggccacccctgtggcgcctcttctccatgatgagcctcaagctgctggtatcttactcccagggacaacccagcattcagatcaaacaaactctgactctagagttggagagcttatactgcctaatggggatacttatcgtggcgcgttatcgggcaacacgccacatggcccaggttgttatatctggtccgatggttgtgtttatgagggtgattggaggagaggcctcaggcatggccgaggcaagacgctgtggccaacaggggccacctacacaggtgactactccggtggctacatttatggtcagggaacgtataccgccgggcttaacagttacaggggaggctggaagctgaatcttaagcatggccaccttggcctacagacatatcccaacggagacacttttcaaggttcttgggtgcatgggcaaatgcaggggcatggcacctatacctgggcaaatgggaacacttatgttggcgccatgaaagatggggtcatgtcaggcaaaggaattctcacatggaacaatggagattcatttgaagggaactggttagatggtgccatgcatggctatggaatctacacatggaaggactctggctactatgtaggaacctggacaaggggggtcaaggacggaaaaggcacgttctatccaaaatgccgtgggattccggttaccgacatcgacgatttaagaaacagaggtgtactgcctggtgctgaaagccagactcatggttcccgtatccttcactctgcctcatcggacatggcagacatggtggctagcagaaatcaggactctgtaggtatttcatctgttagaagcttgaattttgagaaaactcgctccactaatgtgctactggaaagaaggtggagccttggagtggctattgaaaaattcctcggtcgcgaaaccaatgaaagttctgcaattgaaagatgtgaaaacaaggctgattccaaccttcctatactggaacgggaatatatgcaaggtgttctcatcagcgaggtcgtggtggatgcaagcttctcgaatccattaaaaagggtatcacgccgccagaagaaaatagtgaaggacataaagaaacctgggcagacaataattaaaggacataggagttatgatctgatgctcagtctgcagcttggaatcaggtatacagttggaaagattacacctattcagagacgtgaagtgcgagcttctgattatggttccagagcaagtttctggatgaacttccccaaaaatggttcacgacttactccttcacatcatgctgataattttaaatggaaagactactgcccaatggtgttcagaaatttgagggagatgttcaagattgatgcagcggattatatggtttccatttgtggaagtgacgcacttagggagctatcttctcctggaaagagtggaagtgtcttctttctatctcaggatgatcgatttatgatcaagactctacggaagtctgaagtgcaggttcttctacgaatgcttccagagtattatcaccatgtccgtacctatgagaacacactcataactaagttttttggcctccacagggttaaaccgtccagcagtcaaaagttccggtttgtagtgatgggaaacatgttttgcactgaacttagaattcaccggaggtttgacttgaaaggttcatccttaggccgctcaacagacaaagtaaaaatcgacgagaacacaacactgaaagacttggatctaaactattcattttatctcgagccttcttggcggcagactttgcttgcgcaaattgagaccgatagcaaatttctaaagcagcacgcaataatggattatagtttgcttcttggcgttcatttccgggctcctcaaagcctacggacacaggcatcctttcatcaagcaatcctaccagataggctggctgttctttcagaagaaggtgctctggaggaggatgttttgaacagtcctgaaggactggttttggttcagcgagctagtgatcaaaatgatgttgtcattggttcccatataaggggggcccgtcttcgatcatcaagtgcaagttttgaggaagtagatctcttgcttccaggcaccgcaaggctccagatccaacttggggttaacatgccggccagggcaaaacagacggttgaggatgatgacagtgaagataatggtcaggtgtatgatgtggtgctgtacctgggaataattgatatcttgcaggagtacagcataaggaagaagattgagcatgcttacaagtgcatccaatataactcattgtcaatatctgtcgtggaacccagtctctactcggagcgcttcctgaaattcattcaaactatctttcctgaaaattcataaaataaaatccagtaattcttcacctacaggagcaaagtgaaagaaacattgttcagtgtgcattgtggccctttgcaagtatgcttttgctacgtccttgattgattctctttctttacacatgttgatcatggttcaaattttacataatagaaggtgataacatactctgtccgtccatacttttggaagcagcagcagcacctgctgtcatccacgagctaagcatatagaagcagcagcacctgccagagacttatccatccatgtccctatattcaaacttcaatacagtttatagtgcaaaatagtgtttcgaataatggatacggtcattttaagatttgcttggatattcacctcaatccacatacattcaagtggattgtaaatgtaagtttaacttccacccttaatttaccttaaatattatatggatcgaatgtaaaactgaggtggatatgagtgcagccaaacaaacacaaactattatatttgacgattcactaagctccacaagcggc

SEQ ID NO: 53792 - DNA, 1773 bp, Zea Mays
acatacatgtattcttgtaggctccctctcatctctgcacacctcccgccgcgccgaccacgcgcctttccccttttcctctcccccagatccacccgccgcgccacccctctcggctcctcccaggcggcgtcggccctttcctcgccctcctccgtttctctccggcgtatatatgggttcgaaatcggtagatgaggtgctcgatgccgccgccggagtccattgctctgctctccgtctggacggtcccaacgtccagttttccgcctcctccgaggaagaaccaacgacgtctggcctggagaatggccatcaggagccctttgttattggcgttgctgggggtgcatcgtcaggcaaaagtaccgtgtgcaagatgatcattgatcagctccgtgaccagcgcgttgtggctgttacacaggagtccttttattatggattgacggatgaagaattagtccatgttcatgattataattttgatcatccagatgcatttcatacagagctacttctctcttgtatgcaaaacttgaaacatggcaaagctgtcgacatccctaattacaacttcaagacatacaagagtgtaccaaatgcaaggaaggttaatccttcagatgttattattttggaaggaattctagtttttcatgattcacgcctcagggatttgatgaacatgaagatcttcgttgatacagatgccgacgtacggttaacaaggaggatccgtcgtgataccattgacaagggtagagatatcaaagctgtgttagatcagtactcaaaatttgttaagcctgcttttgaagacttcatcctcccaacgaagaagtatgctgatattatcatcccacgaggtggagacaatgatgtggcaattgatctaattgttcaacatattcggactaaacttggacagcatgatctttgcaaaatacaccccaatttgtatgtaattcagactacttatcagatacgaggcatgcacacaataataagggatgctgccacagcaacacatgatttcatattttatgctgatcggttgattcgactggttgtggaacatggtcttggtcatcttccttttcaggaaaagcaggtcatcactccgactggatctgtttacactggtgtggagttctccaaaaggttgtgtggtgtctcagtgatcaggagtggcgaaagcatggagaatgcgttacgagcatgctgtaaaggtataaagattgggaagattcttattcatcgggaaggagacaatggacaacagctcatctatcaaaatttaccaaaagatattgcaaataggcatgttcttctgttggaccccatattgggaacaggaaattcagcagttcaggccatctcccttctattgaagaagggtgtacaagaagcaaatattatattccttaatcttatttcagcgccccaaggagtgcatgtggtgagcaagagattccctagagtgaagatcgttacttcggagattgagtttggtctaaatgatgatttccgtgttgtgcctgggatgggcgaatttggagacagatactttggaacagatgattatcagtcatcgacgccattcttttgtgacgataaaaatcgtgtcaggtacttattggcttaggttatgggccaagctgcggaaaagtgaagaggaagaagaccaaataaagaacgcttgtcgacaattagagacgatggcaatgaagatttttttatctccgtggatggaggtttacaaataggatt

SEQ ID NO: 53793 - DNA, 1856 bp, Zea Mays
acatacatgtattcttgtaggctccctctcatctctgcacacctcccgccgcgccgaccacgcgcctttccccttttcctctcccccagatccacccgccgcgccacccctctcggctcctcccaggcggcgtcggccctttcctcgccctcctccgtttctctccggcgtatatatgggttcgaaatcggtagatgaggtgctcgatgccgccgccggagtccattgctctgctctccgtctggacggtcccaacgtccagttttccgcctcctccgaggaagaaccaacgacgtctggcctggagaatggccatcaggagccctttgttattggcgttgctgggggtgcatcgtcaggcaaaagtaccgtgtgcaagatgatcattgatcagctccgtgaccagcgcgttgtggctgttacacaggagtccttttattatggattgacggatgaagaattagtccatgttcatgattataattttgatcatccagatgcatttcatacagagctacttctctcttgtatgcaaaacttgaaacatggcaaagctgtcgacatccctaattacaacttcaagacatacaagagtgtaccaaatgcaaggaaggttaatccttcagatgttattattttggaaggaattctagtttttcatgattcacgcctcagggatttgatgaacatgaagatcttcgttgatacagatgccgacgtacggttaacaaggaggatccgtcgtgataccattgacaagggtagagatatcaaagctgtgttagatcagtactcaaaatttgttaagcctgcttttgaagacttcatcctcccaacgaagaagtatgctgatattatcatcccacgaggtggagacaatgatgtggcaattgatctaattgttcaacatattcggactaaacttggacagcatgatctttgcaaaatacaccccaatttgtatgtaattcagactacttatcagatacgaggcatgcacacaataataagggatgctgccacagcaacacatgatttcatattttatgctgatcggttgattcgactggttgtggaacatggtcttggtcatcttccttttcaggaaaagcaggtcatcactccgactggatctgtttacactggtgtggagttctccaaaaggttgtgtggtgtctcagtgatcaggagtggcgaaagcatggagaatgcgttacgagcatgctgtaaaggtataaagattgggaagattcttattcatcgggaaggagacaatggacaacagctcatctatcaaaatttaccaaaagatattgcaaataggaaattcagcagttcaggccatctcccttctattgaagaagggtgtacaagaagcaaatattatattccttaatcttatttcagcgccccaaggagtgcatgtggtgagcaagagattccctagagtgaagatcgttacttcggagattgagtttggtctaaatgatgatttccgtgttgtgcctgggatgggcgaatttggagacagatactttggaacagatgattatcagtcatcgacgccattcttttgtgacgataaaaatcgtgtcaggctcttgtgacatgaagccatggctgcggcgtattctccaatttttgagaaacttatatcagcattccaaactctagaatgccatcataatgttttcattaccagacactgtaccatggaacatccagacagaaatcacctcttaatataattggatttgttccatttttattttttttgtcccagtttcgaaagcagcctcttgttcagctcattttggcactctacacaatacatatcgtgtcctcttcagcagcct

SEQ ID NO: 53794 - DNA, 1874 bp, Zea Mays
acatacatgtattcttgtaggctccctctcatctctgcacacctcccgccgcgccgaccacgcgcctttccccttttcctctcccccagatccacccgccgcgccacccctctcggctcctcccaggcggcgtcggccctttcctcgccctcctccgtttctctccggcgtatatatgggttcgaaatcggtagatgaggtgctcgatgccgccgccggagtccattgctctgctctccgtctggacggtcccaacgtccagttttccgcctcctccgaggaagaaccaacgacgtctggcctggagaatggccatcaggagccctttgttattggcgttgctgggggtgcatcgtcaggcaaaagtaccgtgtgcaagatgatcattgatcagctccgtgaccagcgcgttgtggctgttacacaggagtccttttattatggattgacggatgaagaattagtccatgttcatgattataattttgatcatccagatgcatttcatacagagctacttctctcttgtatgcaaaacttgaaacatggcaaagctgtcgacatccctaattacaacttcaagacatacaagagtgtaccaaatgcaaggaaggttaatccttcagatgttattattttggaaggaattctagtttttcatgattcacgcctcagggatttgatgaacatgaagatcttcgttgatacagatgccgacgtacggttaacaaggaggatccgtcgtgataccattgacaagggtagagatatcaaagctgtgttagatcagtactcaaaatttgttaagcctgcttttgaagacttcatcctcccaacgaagaagtatgctgatattatcatcccacgaggtggagacaatgatgtggcaattgatctaattgttcaacatattcggactaaacttggacagcatgatctttgcaaaatacaccccaatttgtatgtaattcagactacttatcagatacgaggcatgcacacaataataagggatgctgccacagcaacacatgatttcatattttatgctgatcggttgattcgactggttgtggaacatggtcttggtcatcttccttttcaggaaaagcaggtcatcactccgactggatctgtttacactggtgtggagttctccaaaaggttgtgtggtgtctcagtgatcaggagtggcgaaagcatggagaatgcgttacgagcatgctgtaaaggtataaagattgggaagattcttattcatcgggaaggagacaatggacaacagctcatctatcaaaatttaccaaaagatattgcaaataggcatgttcttctgttggaccccatattgggaacaggaaattcagcagttcaggccatctcccttctattgaagaagggtgtacaagaagcaaatattatattccttaatcttatttcagcgccccaaggagtgcatgtggtgagcaagagattccctagagtgaagatcgttacttcggagattgagtttggtctaaatgatgatttccgtgttgtgcctgggatgggcgaatttggagacagatactttggaacagatgattatcagtcatcgacgccattcttttgtgacgataaaaatcgtgtcagccatggctgcggcgtattctccaatttttgagaaacttatatcagcattccaaactctagaatgccatcataatgttttcattaccagacactgtaccatggaacatccagacagaaatcacctcttaatataattggatttgttccatttttattttttttgtcccagtttcgaaagcagcctcttgttcagctcattttggcactctacacaatacatatcgtgtcctcttcagcagcct

SEQ ID NO: 53795 - DNA, 2206 bp, Zea Mays
ttggccatctctagtcgccgttggctgtggctatgctgcactatctttttattgtagataataagtagctgcagtgttgttcagttaaactgtgtccaaaagtttacatatagttactaaaaacactgttttacatcgtggattgtactgttctcagtggattaatagaattggacgctggagatagacccgccggagaagatggcctgcccactgctcacagtagtctagtccctgcccaccaagtacggatctcatctcaccagctgcctgtgcagcagtccaattcctcttgctggagcataccagaagcagaatcgggtgagaggaaatgggatcaacaagaacgtctcatccatctttcccggtcctcctgctcttcctcctcgctaccgccgccgccgccggaagcaacaaggctgaggaggtggacgacctccagtaccttattgacaactccgaagacatcccacccaacgaccctgacgggtggcctgagggcggcggcggcggcgactacgacgacgaccttctcttccaagatcaggaccaggacctcccagactacgagccgcagatcgacgagacccacgtcgtggtcctcaccgccgccaacttctcctccttcctcgccgccacccgccatgtcatggttgagttctacgccccctggtgtggccactgccgcgagctcgcccctgaatacgccgccgccgccgcgcatctcgccgtccaccacaaccagaccgatctcgctcttgccaaggccgacgccaccgaggaaaccgacctagcccagaggtacgacgtccagggcttccccactatcatcctcttcatcgacggcgtccccaaggactacaacggcgcgaggaccaaggacgccatcgtcgactggatcaacaagaagctcggcccggccgtgcaagatgtcaccagcgtccacgaggccgagaggatactcaccggggatgacaaagccgtcattgccttcctcgacactctaaccggtgctcacagtgacgagcttgctgctgcttcaaggctggaagatagcatcaacttttatcaaacttcgattcctgatgttgctaagcttttccatatcgacccagcagcaaagcgtccatccatagtattactgaagaaagaggaggagaagttgaccttctatgatggaaagtttaaagcatcagccattgctgattttgtgtctgctaacaagcttcctttggttaccacactaactcaagaaacttccccttctatttttggcaatgcaatcaagaagcagattttactatttgctgttgcaagtgaatcctcaaaatttctgtccatctttaaggaagcagcaaagccatttaagggaaagctattatttgtctttgtggagcgagacaatgatgaagttggtgaaccagttgccaactactttggtcttactggacaagagaccacagttcttgcttacactggtaatgaagatgctaggaaatttttccttgatggcgaggtgtcacttgaagccattaaggacttcgctgaaggtttcttggaagacaaacttacaccattctacaagtctgaaccagtacctgaatctaatgatggggatgtcaaaattgttgttggaaagagtctggatgtaatagttttggatgaatcaaaagatgtacttctggagatatatgcaccgtggtgtgggcattgtcaatcactggagcctacttacaacaaactagccaagcatctaagtggagttgactcccttgtgatagccaaaatggatggtactaccaatgagcatccacgtgcaaaggtcacgtttgagggggagcggacagtggtagatatgtacaggttcatcaagaaacatgctagcatccctttcaagttgaagcgccaggagtcaagaagggagagcatccagacggatggtgtcaaggacgaactgtagggcaggtcatgcattgatagatagctgagttttgaattttggttttataaaattaggtccgccaccgaatttcgcgttttcagcttaaacatcacctaaatctgtttctttatattatactatattaaagcaccagtttcaaccgtagtccagcgtcaatatttttcaaaagacctcctacatttttttagaatcaactctcactcctataatttcttttctactactataataggagagttatgt

SEQ ID NO: 53796 - DNA, 3508 bp, Zea Mays
atggcggtgacgatgacgctgatatctcttcgaacattctcgactctgatacctccaactccgacgcgccaatatcgtaccagatcgcggcgggcgacacctactaaatcatctccaccaccaagccgcagaacacgcagtaccagcatggagcgcgtgaaccccaaactggtgcccaccaacctcgacatcggcatcacggtcatgttccctatcttctgccagtgcccggccgccgccgacaacgccaccgcgctcatcaccaccaagcttcagcaatacacgtcactcgatgaccactgccatgagcggggcatccttcaccaggacatcaagggctccaatctgctgatcgactaccccgacatgctcggtgacttcggcctcaacaactacggcgctgggcaccgacaaccgctcaccagccgcgtcgtcacgctctggtaccgcacacctgtgctgctgctgaactccaccagctacggcgtcggcttcgacctctggagcgcgggttgcctcaacgagatcttcttcggcaagcccctcatgcccggcagtggcgagatgtaccagctactgaagatcttcaagctgtgcgggtcacctccggatatggtcgaactccaacagcacatcaacaatggtcacgcggttctaggtgcccaccgtgtgttcgaggaattgtcatcacatgttattgccacctgcaacaatggtgttggctcgacgatgcaagacctggcacatgctatcggtaatactgaagtgtggccaataccatggccatctttcagtttctctccaattggattggctccactattagcattggaatcaattgcagtggtaggtggaagagtggagaaaagggagatttctaaaattacagatgcaacaatcatgcttttagaagaaatgaaggcacatggtattaagttgaaaggagaaacctaccattgtctactgaatgcacttgcaacaacaaggcaaactgatcaagcttatgtcgtatttagtggtacgagtgttgctgggcttgtgcacagagattctgttcaattcaggccaataccatggtttttcttcagattgtgtagtgaggttggttacaggtcctataattggactgagcgaatatctgaacccacagaacaactcatgatggtgttgtcatctctagcttggtcaggtactcagacagttaccacactaaaattacaagatcaaattcagcagcaagacattatggtgctcattgactctggatcttctcatacttttatcagtgacaaattgcgaccaatgttatcgggtgtggaacctctggttaacccaatcacagttcaactggctattagacaagttattccttgccattaccatttgcctttagccaagtggagtatgtcgggctgtcacttttcagcagacctgaagttcttgctaataccttcatttggtcaagttattacttgcaattatcaggtgccttcagctgagtggaccatgcctgttcgcagtttttcagtggatctcacgtttttactcttacccttgtttgatctggtcgtgggcatggacaggctgcaacgatatagtcctatgccagtgaactggtctaacaaatggatgatcattccctatcaaggagcaactaggtgtttacaaggtgttcacccttctgttcccacaggagcaatagtggagctgtggttactctcggccacctcccagcagaaccgtttccctgacagcaagatgccaacaatcaatactcaggtgcaggatattccttcccagtttttggatatttttgaggatccagttgggttgcctccaagcaggccgggtgatcacaatatccctctgttactcggtgcacatatgtttactgtgtgcctctatcagtacacaccggctctcaaagatcatgatacgcaagcacaagagttgttgactcaattggccatcgtctcagcatatcccaattcacctttcactatgcagttggtacatggtccaagtgatctggtcagggatggatgcttcgcatgcaacttgggaggacgccgaagcgcagaagaatcgcttcccatcagcgaccgcttggggacaagcggcgttcgaagaaggggggaatgtcagcatcagcccttcgatagagcaggtcttgccggttgtggcacaggagcagttgaacgctgagttggatgatgggccagaagagcaagctgatgatgggccgagaaggggcgttcgtcaaaggaaaatgaacccacgaatgcacaagcagagactggagtatatatatattaggaatgtgttgtggtagaggttttgtaggctagcagctgcgaccgtcttctcctattactatctgaagctctgaacttggaagataactctctcagccttagcggtctggtgctgaccgaaggttcttgcctcgtgagatgtccaaactgtctcgacattctcccagaaccgcacaacgttatagtctacaagtgcggcggatgtggcaccatccttcgtgctaaaatctgtgctagcaatggccaacacatggctgcaaaacaaggtcgccaagactctgacagttattcggtcgctacagctgtgagcaatggggcgcctcctcgaaataaagagcgaggctcagagagctccttcaatgttgatgctcctagcttcgagcatggcaacaataggacagggaagggtgaaaatggtgatgatgtgctggctaggcagaatgctatggtggttcaccatgctgagagcaaggaaaaccacactgtggaataacctacagagaatagggtgaaaatggtgataatgtgctggctaggcagaatgctatggtggttcaccatgctgagagcaaggaaaaccacactgtggaacaacctacagagaattcaaagaccttccgagtagtaagtggacgtgatgatatagaacaactctaataacaaaatggtttcttttgagaacagcaaagcagtcgcggccgtcagtatgcaagatcctgagcagaaggaagcaggcagagtcagagctgaacatgcaactaacaagaagggttatcttgtgagggtactatcttggtcctgtgatcttcaatagtcacgactcacgagactcgactgatttccattgtgcacggacttctctgcagccgaaaagttttagagccagtgagattgtatttgatttccatttgtcatgagactcgtcaaacaaaaggcaattgagattatatttgaaatattttgatgattataaggatttttgggttgaccggaagtagcctctactctctactcttataatacaccagttttcatcgtcgtagtgcgtcaggagatggatggtgcaggagattaacaacattttggttgttggtaaataatttgagttaggatcgatgataataaatctcttgtgtatttttatgtaatcgttgtatactcatattttataaaatattggtattgtttatttt

SEQ ID NO: 53797 - DNA, 4366 bp, Zea Mays
atggcggtgacgatgacgctgatatctcttcgaacattctcgactctgatacctccaactccgacgcgccaatatcgtaccagatcgcggcgggcgacacctactaaatcatctccaccaccaagccgcagaacacgcagtaccagcatggagcgcgtgaaccccaaactggtgcccaccaacctcgacatcggcatcacggtcatgttccctatcttctgccagtgcccggccgccgccgacaacgccaccgcgctcatcaccaccaagcttcagcaatacacgtcactcgatgacgtttctgcggacgcgcttttgcgcctcacccgcccgatggagtgggagaggacaactaagccggctatggcgcaccaaccgttaagcacgatctggctaggcacgacgccgaagggggcaagcacctcgcagaggcagctgagtagtgggacgcgcatgccagcctgtagaggaggagcatcgaagaatggtgctcacaagttgttcgatgaaatgccctcaagcaactggaggtcaccaggccgcttcctcgacgtcaatatatgcctgatcaagtgctacatgcagcagctgttcgtggggctgcagcactgccatgagcggggcatccttcaccaggacatcaagggctccaatctgctgatcgactaccccgacatgctcggtgacttcggcctcaacaactacggcgctgggcaccgacaaccgctcaccagccgcgtcgtcacgctctggtaccgcacacctgtgctgctgctgaactccaccagctacggcgtcggcttcgacctctggagcgcgggttgcctcaacgagatcttcttcggcaagcccctcatgcccggcagtggcgagatgtaccagctactgaagatcttcaagctgtgcgggtcacctccggatatggtcgaactccaacagcacatcaacaatggtcacgcggttctaggtgcccaccgtgtgttcgaggaattgtcatcacatgttattgccacctgcaacaatggtgttggctcgacgatgcaagacctggcacatgctatcggtaatactgaagtgtggccaataccatggccatctttcagtttctctccaattggattggctccactattagcattggaatcaattgcagtggtaggtggaaggtgcgtgcttcagaagagtgcaaaattcaaaattatctataggctgagtagtgtgttggcttggtttgttggttctggtgaccaggaacttagatggttgtctagttatctattcatgcattatggtaattcctggaagttagttgtgtatgatggccaagggcacatattggtgacaatgttgagctcaatttctattcgagaagtgggttcctttagatgtgtgctgaaattcatatgggtcctattctggtcgtgggtgtcctagacttcatgatggtactatccatgagtctaaaacagtgtgatacaaaatcatctcgcagagtggagaaaagggagatttctaaaattacagatgcaacaatcatgcttttagaagaaatgaaggcacatggtattaagttgaaaggagaaacctaccattgtctactgaatgcacttgcaacaacaaggcaaactgatcaagcttatgtcgtatttagtggtacgagtgttgctgggcttgtgcacagagattctgttcaattcaggccaataccatggtttttcttcagattgtgtagtgaggttggttacaggtcctataattggactgagcgaatatctgaacccacagaacaactcatgatggtgttgtcatctctagcttggtcaggtactcagacagttaccacactaaaattacaagatcaaattcagcagcaagacattatggtgctcattgactctggatcttctcatacttttatcagtgacaaattgcgaccaatgttatcgggtgtggaacctctggttaacccaatcacagttcaactggctattagacaagttattccttgccattaccatttgcctttagccaagtggagtatgtcgggctgtcacttttcagcagacctgaagttcttgctaataccttcatttggtcaagttattacttgcaattatcaggtgccttcagctgagtggaccatgcctgttcgcagtttttcagtggatctcacgtttttactcttacccttgtttgatctggtcgtgggcatggacaggctgcaacgatatagtcctatgccagtgaactggtctaacaaatggatgatcattccctatcaaggagcaactaggtgtttacaaggtgttcacccttctgttcccacaggagcaatagtggagctgtggttactctcggccacctcccagcagaaccgtttccctgacagcaagatgccaacaatcaatactcaggtgcaggatattccttcccagtttttggatatttttgaggatccagttgggttgcctccaagcaggccgggtgatcacaatatccctctgttactcggtgcacatatgtttactgtgtgcctctatcagtacacaccggctctcaaagatcatgatacgcaagcacaagagttgttgactcaattggccatcgtctcagcatatcccaattcacctttcactatgcagttggtacatggtccaagtgatctggtcagggatggatgcttcgcatgcaacttgggaggacgccgaagcgcagaagaatcgcttcccatcagcgaccgcttggggacaagcggcgttcgaagaaggggggaatgtcagcatcagcccttcgatagagcaggtcttgccggttgtggcacaggagcagttgaacgctgagttggatgatgggccagaagagcaagctgatgatgggccgagaaggggcgttcgtcaaaggaaaatgaacccacgaatgcacaagcagagactggagtatatatatattaggaatgtgttgtggtagagggtatgaaatgtaataacctaaacttccacttgtttccagccgtcacggcgctaccagctctctgccatatctctctgttcctctgtatcttcctcttctctcatacatctccactagtaatctgttaacaaatttccgtgcttaaatttagcccagacctgctagcctgttttgttggctagattctcatcatcgtttccttgtatatttttgcatattgcagttttgtaggctagcagctgcgaccgtcttctcctattactatctgaagctctgaacttggaagataactctctcagccttagcggtctggtgctgaccgaaggttcttgcctcgtgagatgtccaaactgtctcgacattctcccagaaccgcacaacgttatagtctacaagtgcggcggatgtggcaccatccttcgtgctaaaatctgtgctagcaatggccaacacatggctgcaaaacaaggtcgccaagactctgacagttattcggtcgctacagctgtgagcaatggggcgcctcctcgaaataaagagcgaggctcagagagctccttcaatgttgatgctcctagcttcgagcatggcaacaataggacagggaagggtgaaaatggtgatgatgtgctggctaggcagaatgctatggtggttcaccatgctgagagcaaggaaaaccacactgtggaataacctacagagaatagggtgaaaatggtgataatgtgctggctaggcagaatgctatggtggttcaccatgctgagagcaaggaaaaccacactgtggaacaacctacagagaattcaaagaccttccgagtagtaagtggacgtgatgatatagaacaactctaataacaaaatggtttcttttgagaacagcaaagcagtcgcggccgtcagtatgcaagatcctgagcagaaggaagcaggcagagtcagagctgaacatgcaactaacaagaagggttatcttgtgagggtactatcttggtcctgtgatcttcaatagtcacgactcacgagactcgactgatttccattgtgcacggacttctctgcagccgaaaagttttagagccagtgagattgtatttgatttccatttgtcatgagactcgtcaaacaaaaggcaattgagattatatttgaaatattttgatgattataaggatttttgggttgaccggaagtagcctctactctctactcttataatacaccagttttcatcgtcgtagtgcgtcaggagatggatggtgcaggagattaacaacattttggttgttggtaaataatttgagttaggatcgatgataataaatctcttgtgtatttttatgtaatcgttgtatactcatattttataaaatattggtattgtttatttt

SEQ ID NO: 53798 - DNA, 2576 bp, Zea Mays
atggcggtgacgatgacgctgatatctcttcgaacattctcgactctgatacctccaactccgacgcgccaatatcgtaccagatcgcggcgggcgacacctactaaatcatctccaccaccaagccgcagaacacgcagtaccagcatggagcgcgtgaaccccaaactggtgcccaccaacctcgacatcggcatcacggtcatgttccctatcttctgccagtgcccggccgccgccgacaacgccaccgcgctcatcaccaccaagcttcagcaatacacgtcactcgatgaccactgccatgagcggggcatccttcaccaggacatcaagggctccaatctgctgatcgactaccccgacatgctcggtgacttcggcctcaacaactacggcgctgggcaccgacaaccgctcaccagccgcgtcgtcacgctctggtaccgcacacctgtgctgctgctgaactccaccagctacggcgtcggcttcgacctctggagcgcgggttgcctcaacgagatcttcttcggcaagcccctcatgcccggcagtggcgagatgtaccagctactgaagatcttcaagctgtgcgggtcacctccggatatggtcgaactccaacagcacatcaacaatggtcacgcggttctaggtgcccaccgtgtgttcgaggaattgtcatcacatgttattgccacctgcaacaatggtgttggctcgacgatgcaagacctggcacatgctatcggtaatactgaagtgtggccaataccatggccatctttcagtttctctccaattggattggctccactattagcattggaatcaattgcagtggtaggtggaagagtggagaaaagggagatttctaaaattacagatgcaacaatcatgcttttagaagaaatgaaggcacatggtattaagttgaaaggagaaacctaccattgtctactgaatgcacttgcaacaacaaggcaaactgatcaagcttatgtcgtatttagtggtacgagtgttgctgggcttgtgcacagagattctgttcaattcaggccaataccatggtttttcttcagattgtgtagtgaggttggttacaggtcctataattggactgagcgaatatctgaacccacagaacaactcatgatggtgttgtcatctctagcttggtcaggtactcagacagttaccacactaaaattacaagatcaaattcagcagcaagacattatggtgctcattgactctggatcttctcatacttttatcagtgacaaattgcgaccaatgttatcgggtgtggaacctctggttaacccaatcacagttcaactggctattagacaagttattccttgccattaccatttgcctttagccaagtggagtatgtcgggctgtcacttttcagcagacctgaagttcttgctaataccttcatttggtcaagttattacttgcaattatcaggtgccttcagctgagtggaccatgcctgttcgcagtttttcagtggatctcacgtttttactcttacccttgtttgatctggtcgtgggcatggacaggctgcaacgatatagtcctatgccagtgaactggtctaacaaatggatgatcattccctatcaaggagcaactaggtgtttacaaggtgttcacccttctgttcccacaggagcaatagtggagctgtggttactctcggccacctcccagcagaaccgtttccctgacagcaagatgccaacaatcaatactcaggtgcaggatattccttcccagtttttggatatttttgaggatccagttgggttgcctccaagcaggccgggtgatcacaatatccctctgttactcggtgcacatatgtttactgtgtgcctctatcagtacacaccggctctcaaagatcatgatacgcaagcacaagagttgttgactcaattggccatcgtctcagcatatcccaattcacctttcactatgcagttggtacatggtccaagtgatctggtcagggatggatgcttcgcatgcaacttgggaggacgccgaagcgcagaagaatcgcttcccatcagcgaccgcttggggacaagcggcgttcgaagaaggggggaatgtcagcatcagcccttcgatagagcaggtcttgccggttgtggcacaggagcagttgaacgctgagttggatgatgggccagaagagcaagctgatgatgggccgagaaggggcgttcgtcaaaggaaaatgaacccacgaatgcacaagcagagactggagtatatatatattaggaatgtgttgtggtagagggtatgaaatgtaataacctaaacttccacttgtttccagccgtcacggcgctaccagctctctgccatatctctctgttcctctgtatcttcctcttctctcatacatctccactagtaatctgttaacaaatttccgtgcttaaatttagcccagacctgctagcctgttttgttggctagattctcatcatcgtttccttgtatatttttgcatattgcagttttgtaggctagcagct

SEQ ID NO: 53799 - DNA, 2885 bp, Zea Mays
atggcggtgacgatgacgctgatatctcttcgaacattctcgactctgatacctccaactccgacgcgccaatatcgtaccagatcgcggcgggcgacacctactaaatcatctccaccaccaagccgcagaacacgcagtaccagcatggagcgcgtgaaccccaaactggtgcccaccaacctcgacatcggcatcacggtcatgttccctatcttctgccagtgcccggccgccgccgacaacgccaccgcgctcatcaccaccaagcttcagcaatacacgtcactcgatgacgtttctgcggacgcgcttttgcgcctcacccgcccgatggagtgggagaggacaactaagccggctatggcgcaccaaccgttaagcacgatctggctaggcacgacgccgaagggggcaagcacctcgcagaggcagctgagtagtgggacgcgcatgccagcctgtagaggaggagcatcgaagaatggtgctcacaagttgttcgatgaaatgccctcaagcaactggaggtcaccaggccgcttcctcgacgtcaatatatgcctgatcaagtgctacatgcagcagctgttcgtggggctgcagcactgccatgagcggggcatccttcaccaggacatcaagggctccaatctgctgatcgactaccccgacatgctcggtgacttcggcctcaacaactacggcgctgggcaccgacaaccgctcaccagccgcgtcgtcacgctctggtaccgcacacctgtgctgctgctgaactccaccagctacggcgtcggcttcgacctctggagcgcgggttgcctcaacgagatcttcttcggcaagcccctcatgcccggcagtggcgagatgtaccagctactgaagatcttcaagctgtgcgggtcacctccggatatggtcgaactccaacagcacatcaacaatggtcacgcggttctaggtgcccaccgtgtgttcgaggaattgtcatcacatgttattgccacctgcaacaatggtgttggctcgacgatgcaagacctggcacatgctatcggtaatactgaagtgtggccaataccatggccatctttcagtttctctccaattggattggctccactattagcattggaatcaattgcagtggtaggtggaagagtggagaaaagggagatttctaaaattacagatgcaacaatcatgcttttagaagaaatgaaggcacatggtattaagttgaaaggagaaacctaccattgtctactgaatgcacttgcaacaacaaggcaaactgatcaagcttatgtcgtatttagtggtacgagtgttgctgggcttgtgcacagagattctgttcaattcaggccaataccatggtttttcttcagattgtgtagtgaggttggttacaggtcctataattggactgagcgaatatctgaacccacagaacaactcatgatggtgttgtcatctctagcttggtcaggtactcagacagttaccacactaaaattacaagatcaaattcagcagcaagacattatggtgctcattgactctggatcttctcatacttttatcagtgacaaattgcgaccaatgttatcgggtgtggaacctctggttaacccaatcacagttcaactggctattagacaagttattccttgccattaccatttgcctttagccaagtggagtatgtcgggctgtcacttttcagcagacctgaagttcttgctaataccttcatttggtcaagttattacttgcaattatcaggtgccttcagctgagtggaccatgcctgttcgcagtttttcagtggatctcacgtttttactcttacccttgtttgatctggtcgtgggcatggacaggctgcaacgatatagtcctatgccagtgaactggtctaacaaatggatgatcattccctatcaaggagcaactaggtgtttacaaggtgttcacccttctgttcccacaggagcaatagtggagctgtggttactctcggccacctcccagcagaaccgtttccctgacagcaagatgccaacaatcaatactcaggtgcaggatattccttcccagtttttggatatttttgaggatccagttgggttgcctccaagcaggccgggtgatcacaatatccctctgttactcggtgcacatatgtttactgtgtgcctctatcagtacacaccggctctcaaagatcatgatacgcaagcacaagagttgttgactcaattggccatcgtctcagcatatcccaattcacctttcactatgcagttggtacatggtccaagtgatctggtcagggatggatgcttcgcatgcaacttgggaggacgccgaagcgcagaagaatcgcttcccatcagcgaccgcttggggacaagcggcgttcgaagaaggggggaatgtcagcatcagcccttcgatagagcaggtcttgccggttgtggcacaggagcagttgaacgctgagttggatgatgggccagaagagcaagctgatgatgggccgagaaggggcgttcgtcaaaggaaaatgaacccacgaatgcacaagcagagactggagtatatatatattaggaatgtgttgtggtagagggtatgaaatgtaataacctaaacttccacttgtttccagccgtcacggcgctaccagctctctgccatatctctctgttcctctgtatcttcctcttctctcatacatctccactagtaatctgttaacaaatttccgtgcttaaatttagcccagacctgctagcctgttttgttggctagattctcatcatcgtttccttgtatatttttgcatattgcagttttgtaggctagcagct

SEQ ID NO: 53800 - DNA, 2902 bp, Zea Mays
atggcggtgacgatgacgctgatatctcttcgaacattctcgactctgatacctccaactccgacgcgccaatatcgtaccagatcgcggcgggcgacacctactaaatcatctccaccaccaagccgcagaacacgcagtaccagcatggagcgcgtgaaccccaaactggtgcccaccaacctcgacatcggcatcacggtcatgttccctatcttctgccagtgcccggccgccgccgacaacgccaccgcgctcatcaccaccaagcttcagcaatacacgtcactcgatgaccactgccatgagcggggcatccttcaccaggacatcaagggctccaatctgctgatcgactaccccgacatgctcggtgacttcggcctcaacaactacggcgctgggcaccgacaaccgctcaccagccgcgtcgtcacgctctggtaccgcacacctgtgctgctgctgaactccaccagctacggcgtcggcttcgacctctggagcgcgggttgcctcaacgagatcttcttcggcaagcccctcatgcccggcagtggcgagatgtaccagctactgaagatcttcaagctgtgcgggtcacctccggatatggtcgaactccaacagcacatcaacaatggtcacgcggttctaggtgcccaccgtgtgttcgaggaattgtcatcacatgttattgccacctgcaacaatggtgttggctcgacgatgcaagacctggcacatgctatcggtaatactgaagtgtggccaataccatggccatctttcagtttctctccaattggattggctccactattagcattggaatcaattgcagtggtaggtggaaggtgcgtgcttcagaagagtgcaaaattcaaaattatctataggctgagtagtgtgttggcttggtttgttggttctggtgaccaggaacttagatggttgtctagttatctattcatgcattatggtaattcctggaagttagttgtgtatgatggccaagggcacatattggtgacaatgttgagctcaatttctattcgagaagtgggttcctttagatgtgtgctgaaattcatatgggtcctattctggtcgtgggtgtcctagacttcatgatggtactatccatgagtctaaaacagtgtgatacaaaatcatctcgcagagtggagaaaagggagatttctaaaattacagatgcaacaatcatgcttttagaagaaatgaaggcacatggtattaagttgaaaggagaaacctaccattgtctactgaatgcacttgcaacaacaaggcaaactgatcaagcttatgtcgtatttagtggtacgagtgttgctgggcttgtgcacagagattctgttcaattcaggccaataccatggtttttcttcagattgtgtagtgaggttggttacaggtcctataattggactgagcgaatatctgaacccacagaacaactcatgatggtgttgtcatctctagcttggtcaggtactcagacagttaccacactaaaattacaagatcaaattcagcagcaagacattatggtgctcattgactctggatcttctcatacttttatcagtgacaaattgcgaccaatgttatcgggtgtggaacctctggttaacccaatcacagttcaactggctattagacaagttattccttgccattaccatttgcctttagccaagtggagtatgtcgggctgtcacttttcagcagacctgaagttcttgctaataccttcatttggtcaagttattacttgcaattatcaggtgccttcagctgagtggaccatgcctgttcgcagtttttcagtggatctcacgtttttactcttacccttgtttgatctggtcgtgggcatggacaggctgcaacgatatagtcctatgccagtgaactggtctaacaaatggatgatcattccctatcaaggagcaactaggtgtttacaaggtgttcacccttctgttcccacaggagcaatagtggagctgtggttactctcggccacctcccagcagaaccgtttccctgacagcaagatgccaacaatcaatactcaggtgcaggatattccttcccagtttttggatatttttgaggatccagttgggttgcctccaagcaggccgggtgatcacaatatccctctgttactcggtgcacatatgtttactgtgtgcctctatcagtacacaccggctctcaaagatcatgatacgcaagcacaagagttgttgactcaattggccatcgtctcagcatatcccaattcacctttcactatgcagttggtacatggtccaagtgatctggtcagggatggatgcttcgcatgcaacttgggaggacgccgaagcgcagaagaatcgcttcccatcagcgaccgcttggggacaagcggcgttcgaagaaggggggaatgtcagcatcagcccttcgatagagcaggtcttgccggttgtggcacaggagcagttgaacgctgagttggatgatgggccagaagagcaagctgatgatgggccgagaaggggcgttcgtcaaaggaaaatgaacccacgaatgcacaagcagagactggagtatatatatattaggaatgtgttgtggtagagggtatgaaatgtaataacctaaacttccacttgtttccagccgtcacggcgctaccagctctctgccatatctctctgttcctctgtatcttcctcttctctcatacatctccactagtaatctgttaacaaatttccgtgcttaaatttagcccagacctgctagcctgttttgttggctagattctcatcatcgtttccttgtatatttttgcatattgcagttttgtaggctagcagct

SEQ ID NO: 53801 - DNA, 2298 bp, Zea Mays
aaatctgttcattgccggctacctttcataaataacttatgaggccaaactaaagagggcagggcaggcgaatcgaaggaaaagtagtcaggagaggcgtttccctcgcaatcgaccatcacagatcaaatcgctgcaactagctagggtttcgtcgcctcatctctcgtcgatccatcgatggcgtccgagggcgaaaacaagaggatgatcacgctcaggagctccgacttagaggagttcgaggtggaggaagcggtggccatggagtcgcagactctccgccacatgatcgaggacgactgcgccgacaacggcatcccgctccccaacgtcaactccaggatcctctctaaggtcatcgagtactgcaacagtcacgtccacgccgccgccaaacccgctgactccgctgcctccgagggcggcgaggacctcaagagctgggacgcgaagttcgtcaaggtggaccaggctacgctcttcgacctcatcctggctgccaactatctgaacatcaagggattgctggacctgacctgccagacggttgctgacatgatcaagggcaagactccggaggagatccgcaagacattcagcatcaagaacgacttcacccaagaggaggaggatgagatccgcatggagaaccagtgggccttcgagtgattgttgtcttcctttccctgccatggcgaagcccgtctccatccaggtgtggaaccccagcggcaagtaccgcgtggtgagcaccaagtccatgccgggcacacgatggatccgcctgctcaccgacaacgactgccgccttgagatatgcaccgagcacaagaccatcctctccgtggacgacatcctggcgctcatcggcgatcgctgcgacggcgtcattggacagctcaccgaggactggggggacgtgctcttctctgcgctcaagcgcgccggaggcacggtcttcagcaacatggccgtcggctacaacaacgtcgatgtcgaggctgccaacaggaatggcatcgcaatcggcaacacgccgggcgttctgacggagacgacggctgagctcgccgcctccctctcgctggcggcagccaggaggatcgtcgaggctgaccagttcatgagggctggcctctatgacggatggctcccacacctgttcgttggcaacctgctcaagggccaaactgttggagtcattggagctggtcgcattggctccgcctatgcacgcatgatgattgagggtttcaagatgaacctcatctactacgacctgtatcaggccacacgtcttgagaatttcgtcacagcatatgggcagttcctcaaagcaaacggtgaggagcctgtcacctggaagagggccgccaccatggaggatgtcctcagggaggctgacgtgataagtctgcatccggtgctggacaagaccacctaccatctgataaaccccgagaggctggccatcatgaagaaggaggctgttcttgtgaacgcaagccgagggcccgtgatcgatgaggccgcgctggtggagcacctcaaggctaaccccatgttccgcgttggcctcgatgtctttgaggatgagccttacatgaaacctggactcgctgacatgaagaacgccgtcgtggtaccgcacatcgcatcagcctccaagtggacacgcgagggaatggcaaccctgtctgctctcaacgttcttgtatggtaagatcaaggggtaccctgtgtgggggaaccccaatcaggtggagcccttcttgcaggagaatttgacgccaccgcctgcctgcccaagcatcgttaatgccaaacaaattggcctgccatcggcaaagctttaggagcgaacactgacaggctggtatctacatgttgaagatgtgtcgtcgtcgtctccaccacgcgcacatatatgtacatgcatgtggattgaggtcatgcatctgcagagcaggtagcacatattaatttggatcatatatattgaccaatacacactgtatgctagattgctaggttgctgtgcatggatcatattgatcaatgacgaccaggcctccctccgtttcccttctatatttaggacctatttggttccttaagtccaatttggttccttaagtccatggactaaactcccgtattcttacgagtcatttaataagttttgaacacttttagtctcttcaaacagggtagggactaagagcatgtatggtttttttagtccagacactaaaatttggtctctaccctgtttggtgcatgaactaaaagtat

SEQ ID NO: 53802 - DNA, 3050 bp, Zea Mays
aaaatagctaatagctaaactattagctagagtgtttggatgtcttaactaattttagcgactaactattagctctagtgcattcaaacacctctaaatctgttcattgccggctacctttcataaataacttatgaggccaaactaaagagggcagggcaggcgaatcgaaggaaaagtagtcaggagaggcgtttccctcgcaatcgaccatcacagatcaaatcgctgcaactagctagggtttcgtcgcctcatctctcgtcgatccatcgatggcgtccgagggcgaaaacaagaggatgatcacgctcaggagctccgacttagaggagttcgaggtggaggaagcggtggccatggagtcgcagactctccgccacatgatcgaggacgactgcgccgacaacggcatcccgctccccaacgtcaactccaggatcctctctaaggtcatcgagtactgcaacagtcacgtccacgccgccgccaaacccgctgactccgctgcctccgagggcggcgaggacctcaagagctgggacgcgaagttcgtcaaggtggaccaggctacgctcttcgacctcatcctggctgccaactatctgaacatcaagggattgctggacctgacctgccagacggttgctgacatgatcaagggcaagactccggaggagatccgcaagacattcagcatcaagaacgacttcacccaagaggaggaggatgagatccgcatggagaaccagtgggccttcgagtgattgttgtcttcctttccctggtgatggtggtggttcttttacaagaacagatggatgtctgcactgcactctacaatgctagtctatctacttacgaaatagtagtgaaatagtagtataatggtcgtgatggttgtatccttttttggattggatgtatgtcaagctggtgggtgctagttcgtctgtctggacttgttactagttaatatctcataatacatatataaaagtggatcttatgatgatttgcctccatggctggttgttgtgccaacggtctactcgtggttgtcaaggagataagggaaatgctgataaggccggccacttgtctgttatccaccacccttcctatcttaaaaggaggagaaaacgaaaatgaaatttctggcgcctgtctgcccgccccctgataaggccggcgagagagagagagagagagagagagagagagagagagagagagagagagagagagagagagagagagagagagagagagagagagagaacctctctgcaggtgcagccatggcgaagcccgtctccatccaggtgtggaaccccagcggcaagtaccgcgtggtgagcaccaagtccatgccgggcacacgatggatccgcctgctcaccgacaacgactgccgccttgagatatgcaccgagcacaagaccatcctctccgtggacgacatcctggcgctcatcggcgatcgctgcgacggcgtcattggacagctcaccgaggactggggggacgtgctcttctctgcgctcaagcgcgccggaggcacggtcttcagcaacatggccgtcggctacaacaacgtcgatgtcgaggctgccaacaggaatggcatcgcaatcggcaacacgccgggcgttctgacggagacgacggctgagctcgccgcctccctctcgctggcggcagccaggaggatcgtcgaggctgaccagttcatgagggctggcctctatgacggatggctcccacacctgtcagtccctctgcttcctcatatactcctgcaaatgcaacaataacaatgtattgtcgcaggttcgttggcaacctgctcaagggccaaactgttggagtcattggagctggtcgcattggctccgcctatgcacgcatgatgattgagggtttcaagatgaacctcatctactacgacctgtatcaggccacacgtcttgagaatttcgtcacagcatatgggcagttcctcaaagcaaacggtgaggagcctgtcacctggaagagggccgccaccatggaggatgtcctcagggaggctgacgtgataagtctgcatccggtgctggacaagaccacctaccatctgataaaccccgagaggctggccatcatgaagaaggaggctgttcttgtgaacgcaagccgagggcccgtgatcgatgaggccgcgctggtggagcacctcaaggctaaccccatgttccgcgttggcctcgatgtctttgaggatgagccttacatgaaacctggactcgctgacatgaagaacgccgtcgtggtaccgcacatcgcatcagcctccaagtggacacgcgagggaatggcaaccctgtctgctctcaacgttcttgtatgtaagcatgattaggcacgcatatatggttattattactagtagttactgatgtggatcgagaattggcaactcttggtgcagggtaagatcaaggggtaccctgtgtgggggaaccccaatcaggtggagcccttcttgcaggagaatttgacgccaccgcctgcctgcccaagcatcgttaatgccaaacaaattggcctgccatcggcaaagctttaggagcgaacactgacaggctggtatctacatgttgaagatgtgtcgtcgtcgtctccaccacgcgcacatatatgtacatgcatgtggattgaggtcatgcatctgcagagcaggtagcacatattaatttggatcatatatattgaccaatacacactgtatgctagattgctaggttgctgtgcatggatcatattgatcaatgacgaccaggcctccctccgtttcccttctatatttaggacctatttggttccttaagtccaatttggttccttaagtccatggactaaactcccgtattcttacgagtcatttaataagttttgaacacttttagtctcttcaaacagggtagggactaagagcatgtatggtttttttagtccagacactaaaatttggtctctaccctgtttggtgcatgaactaaaagtat

SEQ ID NO: 53803 - DNA, 1501 bp, Zea Mays
ccacatgtaattggacgtgatttgtgttattttctgccattgctggttgacataatggaactgtattttcaggctgccaactatctgaacatcaagggattgctggacctgacctgccagacggttgctgacatgatcaagggcaagactccggaggagatccgcaagacattcagcatcaagaacgacttcacccaagaggaggaggatgagatccgcatggagaaccagtgggccttcgagtgattgttgtcttcctttccctgccatggcgaagcccgtctccatccaggtgtggaaccccagcggcaagtaccgcgtggtgagcaccaagtccatgccgggcacacgatggatccgcctgctcaccgacaacgactgccgccttgagatatgcaccgagcacaagaccatcctctccgtggacgacatcctggcgctcatcggcgatcgctgcgacggcgtcattggacagctcaccgaggactggggggacgtgctcttctctgcgctcaagcgcgccggaggcacggtcttcagcaacatggccgtcggctacaacaacgtcgatgtcgaggctgccaacaggaatggcatcgcaatcggcaacacgccgggcgttctgacggagacgacggctgagctcgccgcctccctctcgctggcggcagccaggaggatcgtcgaggctgaccagttcatgagggctggcctctatgacggatggctcccacacctgttcgttggcaacctgctcaagggccaaactgttggagtcattggagctggtcgcattggctccgcctatgcacgcatgatgattgagggtttcaagatgaacctcatctactacgacctgtatcaggccacacgtcttgagaatttcgtcacagcatatgggcagttcctcaaagcaaacggtgaggagcctgtcacctggaagagggccgccaccatggaggatgtcctcagggaggctgacgtgataagtctgcatccggtgctggacaagaccacctaccatctgataaaccccgagaggctggccatcatgaagaaggaggctgttcttgtgaacgcaagccgagggcccgtgatcgatgaggccgcgctggtggagcacctcaaggctaaccccatgttccgcgttggcctcgatgtctttgaggatgagccttacatgaaacctggactcgctgacatgaagaacgccgtcgtggtaccgcacatcgcatcagcctccaagtggacacgcgagggaatggcaaccctgtctgctctcaacgttcttgtatgtaagcatgattaggcacgcatatatggttattattactagtagttactgatgtggatcgagaattggcaactcttggtgcagggtaagatcaaggggtaccctgtgtgggggaaccccaatcaggtggagcccttcttgcaggagaatttgacgccaccgcctgcctgcccaagcatcgttaatgccaaacaaattgtatgttgc

SEQ ID NO: 53804 - DNA, 6442 bp, Zea Mays
atcgagagtggcaaccgggagatctgatgaaaggccgtccaggcggtccggtccaacagtccgtagatccgcatagtgcagcttgattgatgggatgagagcccatgaagggatggccggcccaggcctggagttgccgaccacgagagatcctgaccagcagttgctgggctgtgtgtgtgtctgcgtctgtcactctcctctctcgcgtcttggtcctcctcctccccttcatcgaacgaatccatccaaggcaaaagggaacgagggaagcaagcaaaaaatccccaattcctcctagatcgatccaccgccgacgcggccgccgcctcctcgtccgcctccaagcgcccccgccgcaactcctcttcctcctcctctgcgccgccgcgccagcagccaccgatggaaccctcgccctcctcccgccgccgctcccgcgccgccgccgccgacaagggcaaggaccccgaccccgcctcctccgaccacccttccccacccgcccctgacgatgacgccgacgtcaccttcccccagcccttcacctccgccagcaccgccctccagggcctcctccgcaggctcggcgccggcctcgacgacctcctcccatcctcctcctcagcgccctcctccgccacgtccggtcacctcaagaggatcctcgccggcctgcaggcgcacggcgacgagtcgcgccagctccagtccctcatgcagctctgcgagatgctctccatcggcaccgaggactcgctcgccgccttcccggtcgatgcttttgtcccaatcctcgtcgggatgctcggccgcgaggacgagcctgccaccgctggtgccagccccgacgtcatgctgctcgcggcgcgggcactctccaacctcgttgatgtgctcccctcctcctgctccgcggtcgtgcactacggggccatacagtgcttctgtgctcgactgctcaccatcgagtacatggacctcgctgagcagtctctacaagcccttaagaagatctctctggagcacccaactgcctgtttgcgagctggtgccctaatggctgttctatcgtatctcgacttcttctccactggggttcagagggtagccttgtctaccgctgcaaatatttgcaggaagctgccgtccgatgcttccgagtttgtcatggaagctgtccccttgctcacgaatcttctaaatcaccatgattccaaggtactagagcatgcttctgtttgtttgacacgcattgctgaagcttttgcctattaccccgacaaacttgatgaactctgcaatcatggattagttgctcaagctgctagcttgatagctgttggcaactcatctggccagacatcactgagcacatccacatatacaggcttaatccgtcttctctcaatatgtgcaagtggatccctgctggcagttaaaacactacttcttcttgggatcagcggcactcttaaagatatcctttctggctctgctttgatttctggaacatcagtctcccctgctgtaacaaggcctgcagatcagatgtttgagattgtgagccttgccgatgatttgcttccgcatatccctgcgagaatcattaagttaccaacatattaccatacatataaaggctcttcaacaaagaaatctgcttccatcaaacaagaggggggtggttcaacaggaaatgaaaggtctggccgtgagaggctattgcgtgagcaacctgagcttttacaacagtttggtatggatttgttacccacaatgacacaggtgtatggttctagtgtaaatgcaccaatacgtcacaagtgtttatctatcattggaaaattaatgtactacagctccgccgaaacaatccagtctctccttggcacaacaaacatatccagcttccttgcgggcattcttgcatggaaagatcctcaagtgttgattcctgctcttcagatagcagaaataatgatggaaaagcttccagagacattttccaagttatttgtgagggaaggtgtcgttcatgctgtggagtcactcatatgttcagaatcttccaacaaaatgccttctcaggtgccacctcaggataaagataaagattctgccatgccatcacgttctagacgtcaacgccggcgtgcgggtgctgttgcagcagaaaatagttcattggatgaatcaaatagttccaaccttggtgttatgtgctcaacagcaaccgcttcagaagctccaaacaccagccttcgtttcacagttagtgaccatgcaaagtctttcaaagataaatactttccggcggatactgattcaagtgatatcgggtttactgatgaccttcttaaactgagggcactctgtgcaaagttgaatactgtctctgagaacgtcaaaacaaaagcaaaagggaaatcaaaagctataagcactaattttttggacatctcaattgatgttgaagaacaattagacaaaataatatctgaaatgctctctgagcttagcaaagttaatggtgtttccacatttgaattcattagaagtggtgttgtcatagcattgcttgactatttgtcctgtgggacatttgggaaggaaaaggtatctgaaggaaacctatctcagcttcgtcagcaggcccttagacgatacaaaaccttcatatctgttgccctttctattgatcatggacgagatgaaactcccatggcactgttggttcagaaactgcaaagtgcattgtcttcgctggaacgtttccctgttgtgctcagccagtctagtaggattggtattggagggtctcgtctgacttcaggtcttagtgctctggctcaacccttcaagcttcgtctttcccgagctcaaggcgaaaaatcacttcgggattattcatcaaatattgtgcttatcgacccatttgctagtcttgcatctgttgaagaattcctttggcctagagttcaacgcagtgaggttgcatcgaagcctataattccatctggtaataattctgaatctggggttcctggcaccacggctggtgcatcattaacagctgcaatggctcaatctggtcggcgcccaacaacaagatcaaagtcatctgctgcaggtggtcttacatctaagaaggattctcatgatgaaagcactagtactgccaaaggaaaaggaaaagctattgtaaagccaaactcagatgaatcaaaaggacctaatacaaggaatgctgcccaccaaaaatctgcttcagagaaagatttggaaatgaagcaggcacatggccacagtagctctgaggatgaagagctcgacacatctcctgttgagatcgatgatgctttgatgattgatgatgatgacatttcagatgatgatgatgatgacgacgatgatcatgaggttctccaagaagggtctcttccaatctgttctcaagatggtgtgcatgacgtgaaactgggtgatgccgatgaatctaacattggatcagctacttttagccatgcacagccatcatctggttctggggctagaaacacttctagcaggggaccggattctactgaatttcgaagtatgggcacattcggttcacgaggtgcaatgtcatttgttgctgcgacgatggctggtctggcttctgttggtggtcgcagtgttagaggtgtccgagatcggcgtggtctgtcacttggaggtagcatgaatgatcacaataaacttatattcactgctggtggcaagcagcttaacaaacatttgactgtatatcaagctatccaacgtcaacttatgctcgacgaggatgatgaagaaaggtttaatggatctgatataccaaatgatggaaaccgcttctggggtgatgtgttcacaataacgtaccagaaggctgataaccaagttgagaagggttgccaagggacttccacctcattaaacataaaatcagattcttacaggtccatttctgaagcacaaggggtttctcttcttgatagcatcttacaaggagaacttccttgtgatcttgagaggacaaactcaacgtacaacattttagcattattgcgtatacttgaggggcttaatcagttatcccctcgtttaagagtacagggagcatctgatgattttgctgagggaaaaatcaataccctggatgagttatatagaactggagccaaggtaccttctgaagtgtttgtcaatagcaagttaacaccaaagcttgctcggcaaatgcaggacgttctcgcactatgtagtggcagtttaccttcttggtgttatcaaatgaccaaggcctgcccattcctgtttccttttgagacaaggaggcagtacttctattccacagcctttgggttgtcacgagcattgaatcgactccagcaacagcagagtgataatcacagctctggtggtgaaagagaggtcaggtttggcaggttacaacgccagaaagttcgtgtttcccgtaaccgtattctagattctgctgctaaagttatggagatgttctccagtcagagggctgttcttgaggtggaatactttggcgaagttggaactgggctggggcctactctagagttttatactctcttaagccatgaactacaatgtgctcaactgggattatggagagctacttcttcatatgattcaggattgcacactgatatgaaggatgtgatccgtttagatcctgaagatgggtcgtcaggaaaagaactcaacacagatctaccaggtgatggcatgtatttgatacaagctcctcttggattgttccctcgaccttggccacctaaagttgatacttcagaaggtagcagattcttcaaagttttggagtatttccgcttaataggtcaagtgatcgcaaaagtcctgcaagatggcagacttttagatttgcctttatcaacagcgttttataagcttatacttggacaggaacttgatttgtttgacatagtgtcatttgattctgagtttgggaagacattgcaagaactgcaagttcttgttgaacgaaagcagttccttgaatccacttctggcaagaaccagctacaagttgcagatttgtgtttccatggcgcttctattgaagatttgtgtttagattttactcttccaggttatcctgattatgtgcttaaagagggtgaaggaggcacaattgttaatatttataatttagaagagtatattactttggtggtggatgctacagttaagtcagggataaagcgacaggttgaggcatttagatcagggtttaatcaggtgtttgacatgtcatccctccacatattttcacctcaagaacttgactatctaatatgtggtcgacaagaaatttgggagtcggaatccctggtggataacataaaatttgatcatggatatactgctaaaagtcctgcgatcgtgaatctactcgagattttgtcagaattcacccctgagcagcagcatgcgttctgccagtttgtaaccggtgctcctcggcttccacatggtggattggctgcccttagccccaagcttactatagttaggaagcatccttcaagtgctgtgaatacttcaaattcaactggggcagtagagtccgctgatgatgatttgcctagtgtgatgacgtgcgccaattatctgaagctgcccccctactccacaaaagaaatcatgcgcaagaagttgctttatgcgatcctggaaggccgaggatcatttgatctttcataagaaatatacaatatccgaactaacatacaggggtcagttttattctggagatttagtttcttggtccatgtataacactgagttgaggttaccagctcactcagcaaacggcttcaagggcgagagccccagtcctcactcggatgcaggctaagctatagtaattgaggatgtgcgccttgagtgaggatgtgcgccaacaagaacccccgtttgtttcagtacatgtaaataaaagggattttttgttccagaattgttatctgtaacaagaacatctacatctgtgatgactgaccattaataaatgtgtcccggtgtaccatttgttttttttctttgagcactggcagtagcaggatacacaaaagggagtgtatgctatatactactagtcgcggatagctcatctggtcatggccacagttttttcttatggagagaataacaaaatttggccctataaacagaaaaaaataaagtgcaagaatcggcagcatgagaattgtttgtacccaagactatctttagtagcttacccatcctacttatatttaactctacaatagtgtagtttatagtgcagaaaagtatataaatagtgttttaagtaaactattaaactctactctacatttaaactctactattaaac

SEQ ID NO: 53805 - DNA, 3107 bp, Zea Mays
tacctccttgaggtctcccttgcgagcagcaacatggagcgggttccagccacggtcgtccgcgtcgtggcagctccgaaggcggctcatgctgagcgacctgcgcacctgcaccatggtattttggtatccttggcggctcctcgagcagcaggacaggggaggatctcgagactcagatccaaagcaacggaacaatgaaacgaacgggagtaaaatagcggggatcggttccgatggaggaagcggccgggggcggaggcggaagcactcagagatcggaatcggagaaagagggataggaggaaacggctagcgggagtagttgcccatgccgaagggagccaagggattcaagccgggtccgagggcgcggaggttcttgtggagcatcggcgaggaagacggcggcgtcgatgagcggcacggggcgtaaaccatagtatggaggcacgtgctgtctggtctggtggtggtgccggtgtatttgttcccttctcgttccctactccaatcgaatcggaattcgaccgccaggcagtctagaggaagtcggaattggggatcattgctagcctatcccgccgccgatctgcgtctgcctggtggtggtggtgggagcgagagccgagagggaagaggcaaaccctagaatttattatttaggaagaagaacaacaaatcagaatccaattcccatccttcttatttttgttttctgagacaaacttctatttgtggatggatagacagaattgcccccgagcggccaaaacggaaacgacccgagccgaccaagccagggttcgtcgggtgcccgtgctgctcagatgacgcaagaggtagcccatggactaggaaatggaggcccatgaagggcccacctagatttcattccgctacggttgcgacggacgatgattcccactccattttgttgcggtgcagaatcccacccgccggcaaaaaccctcttctccttcttctctccgccgccgccgccatggccgccgccgtcgcacgctcccgcgccgccgcggcgtgggtccgcctcctttccttgcgtccgcatagcctcgcgggttccaccgcactcccacgccacggccatcacctaggctcgcggatcacgccgccgcgccgccacctggcattctccgcctcatccggggacgccaggccccaccagaagttccagagcgagtgggtcgtgcacgagctgctcgctgaggtcgagcgcgagcgccagcgggagcgacaggaccgccgcgcaaaggacggcaaagaccaggaggaagagccggaggaagacgaagaggactacatgggcgtcaagccgctcattgagaagctcgagcgacgcaagaccaaggatatggccgccggcgaaggcttctgggagcccaccgactccgacagcgacgaggacgacgagcgctacacgcccgatgccatcaagcagcgcgtcgacgagttcgagcgcaagtgcaagcgccatgaggagttcctgcaatcattcgcagaggccgacaccctagacgaggctcacaaatggatgaccaaaatcaacaactttgaggagcgccatctcaagctgccactggagtacagggtcatcggcgacatgatgaaccgtctcaaggatgccacggggaaagagcgcttcgttctccttcagaagctcaaccgagccgtcaggatcatggaaatcaaggaagcctacgaccccagtaaccctgcaaactttgggatcatccagcaccagcaggttggttctcctgaggatgtcgtgctcaatgccggctttgataaggagaagcagatgatccaaggggcagaacttgaggatgtcgacgaggaattcaatgatgtgaaggagagggatgatattctcatagataaactcgatgctattgaaaagaagattgaggggaagctagaactgttggatcataccttcggtaagaaaggcagagctttggaggaggaaatcaaggatttggtggaggaacgcaattccctgtccgagaagagcaggagacctatgtacagaaaaggttttgatgtgaaagttatcgatgttaacaggacatgcaaagtcacaaagggaggccaaatagcaaaattcacagcgctattggccactggaaattacaatggtgttgttggcttcgctaaggctaaaggcccaacagccaagattgcaatacagagagcgtatgagaaatgcttccagaatctccactacatggagcgatacgaggatcacacaatcgctcatgctatccaggccaaatatgagaaaacaaaggactgttgagactgtgctgtacttggctggtttcagcaatgtcaagacaaagattatcggatcaaggaacccacttaatgtgattaaagctctcttcatagctttgaatgctattgaaaccccgaaggatgtccaacagaagtttgggcgtactgtcgtcgagtcatatttattgtgatcatcatgattgtttggaggacacagaggcgagcggagcctgtataggttttgccatgagaagaccaaagaggcaaatgccaggtccaaccaacgtgagccctctttgttttggacttttggtggtgatgttgaccagaccattgatgttgaagtggcaagaatgtcagtgtcaacagtaatcggataaatagatggtatttccctgaccctttgtttgtagaacttgaatgaacctggggacagaaacacatttgagggttcttgtataaatcaaggtcaagatcagaattgcctcgtcgtgcctttgttttgttaccatagcttcttctccctacatactgttgtttggatgataaatttaattgaatattaatttctcctgaactggttggacaggtgagaaagtagtaggacgggttattcatcccagaatgctacagctgtattgtcttgttaattgtggcatttacataccatccgtttggtttattggcaccacatctacatacaagtataagtagatacaaattagataaatgaacacgacgatttgtttatcgaggtttggttttaaagaacctagtcctcgttgaggagaccccaaaggtcaggtcta

SEQ ID NO: 53806 - DNA, 2713 bp, Zea Mays
cttcctctgtttggaacttatcttttgatctgattactacagggccattgaaggaccacatttatttgcatcaaaaccatctgccgcctgaggtactcaaagaaaggctccctggtatttctgaaactgctgctatttttgctggtgttgacgtcaccaaggagcccattccagttttgcctactgtgcactacaatatgggtggtatcccaacgaactaccataaggaggtagtggatatcaagggtgataatccagatgctgttatccctggtctaatggctgctggtgaagtagcctgtgcagcaccgcgttggtggatgatcgatcgtccagttgtatgtgactaaaacgccatgccttgtgcattagagaagatacagaatcgccatgccctgtataggacagtgagccaaattcttgttcattttgcactatgatacagattgattcattaggccctaggttagaggttgtgactgatgagttgggaagagattacttgattggtggtgtacaattcttggacaggatacaggtttcagtttttggtccattagttcaggaattgtttcatttacatgtatattcagtacactcgtataatggaaacaggtaaatctctatctcattctttgattatcgtgttattatacggttccgttgcaacgcacgggcactcacctagtaatctataagctgaaacagtcgtgcccttaatcgagtgggctgaaactccaacaatagagaatcggtccagcccaagactaaacaaagcaaacttgagttgtttggaggcggagggagcagagaaatcccccaaccaaaccaaaccctcgccgtgccgccgcctccgactcctgctccgtccgagcctaccaccacagggcaagggcttcatccagccgcgtgcgagcctgaccgcccagttagacgatgagccgcagcctcggtatcccggtgaagctgctgcatgaggcggcgggccacgtcgtcacggtcgagctcaagaccggcgaggtctaccgcggctccatggtcgagtgcgaggacaactggaactgccagctcgaaaacatcaccttcacggcaaaggacggcaaggtgtcgcagctggagcacgtcttcatcagggggagcagggtcaggttcatgattatacccgacatgctcaagaacgccccaatgttcaagcgccttgaggccaggattaggggtaaaggctcagctgttggtgtcggccgaggccgcgcggtcgccatgcgggctagggtaatcagctcttgctttctttccacaagcaccacttgttaatcttgaaggattttattcattcagtgaatccataaattttggatttacaagattcttagctcctgtgaataaatcttcaactgctttgtagatgtagtacgtgatgctggatgcagtccagcacatgcaacattatccaaattctagttctgggcatgcttttactaaagtcacagaacatcgtagagcaattcttcatatccaggcatgcctttgacagtgttgttcaatccctgttgccgcaattctcacacgtcactatttgcatgatcatttgaaccaaggcgagcagcttgaggcatctcttagctagactgttcgtgttccttacttattgcttctgcacatattagaatgtctttctcctgtagttgatctcgtgttaaatctgagacacggtgtttctaccattgaatgttctccttgcttaccgccctctcttcaagataggtaatagtctacttcctcttgagcttgtgaatttacactagaaacgaaaagagtatcttgtgttcaaagtcgccttctctgtttcaactgtttgatcttgaaatcttcctgtccagaaaatgtgtgagtgcagcatgaaatttagaacaaatgtatttacacagtctagtttattttgcacaagaaagcaagaaagaacatgaactgttctggctttgatcaaaacaaggcatgtatctcagttcatatgtcttgcctaccaatcagcaccttcacatatgggaatttgaacacacgggaaatttggaaatgtgaagcatctttgtatttgcatggatctgatatatgcctgcacacatttggatcttttcatttgtgtgcacttagaccaactccagcagtttatttatatccatacccatatggggtgggatgggtagattgactttccatagaattatgggtaacccaacgcgtcgtccagcagtttacccaaacggatacccatatgctggccgctatacatatatgttctaaccttctccctgccacttgatgtaggctgctgctggtcgtggcggtggtcctgttggacgaggtggtgcaccccctgtgaggaggtagatctgtcgcgctatgtggcaaatcaagcttttgccctagttgcaaaaactttgcttgagcagcgatgctatatggttgttaagggtagcttatcagcagcagttcatgtttacagcatagatgcaggactttgtgtaactttgcacgagaagactgtggacagtttcgacgatgctatattgctattgagggtctgatttggataatactccctccgtcccaaaatattccaaaatatgctcttgatttttatgtctatgtttaaataaacgataatgaatctagacacacatataaaataaatacattaataaacgaattgttt

SEQ ID NO: 53807 - DNA, 1567 bp, Zea Mays
cttcctctgtttggaacttatcttttgatctgattactacagggccattgaaggaccacatttatttgcatcaaaaccatctgccgcctgaggtactcaaagaaaggctccctggtatttctgaaactgctgctatttttgctggtgttgacgtcaccaaggagcccattccagttttgcctactgtgcactacaatatgggtggtatcccaacgaactaccataaggaggtagtggatatcaagggtgataatccagatgctgttatccctggtctaatggctgctggtgaagtagcctgtgcagcaccgcgttggtggatgatcgatcgtccagttgtatgtgactaaaacgccatgccttgtgcattagagaagatacagaatcgccatgccctgtataggacagtgagccaaattcttgttcattttgcactatgatacagattgattcattaggccctaggttagaggttgtgactgatgagttgggaagagattacttgattggtggtgtacaattcttggacaggatacaggtttcagtttttggtccattagttcaggaattgtttcatttacatgtatattcagtacactcgtataatggaaacagtcgtgcccttaatcgagtgggctgaaactccaacaatagagaatcggtccagcccaagactaaacaaagcaaacttgagttgtttggaggcggagggagcagagaaatcccccaaccaaaccaaaccctcgccgtgccgccgcctccgactcctgctccgtccgagcctaccaccacagggcaagggcttcatccagccgcgtgcgagcctgaccgcccagttagacgatgagccgcagcctcggtatcccggtgaagctgctgcatgaggcggcgggccacgtcgtcacggtcgagctcaagaccggcgaggtctaccgcggctccatggtcgagtgcgaggacaactggaactgccagctcgaaaacatcaccttcacggcaaaggacggcaaggtgtcgcagctggagcacgtcttcatcagggggagcagggtcaggttcatgattatacccgacatgctcaagaacgccccaatgttcaagcgccttgaggccaggattaggggtaaaggctcagctgttggtgtcggccgaggccgcgcggtcgccatgcgggctagggctgctgctggtcgtggcggtggtcctgttggacgaggtggtgcaccccctgtgaggaggtagatctgtcgcgctatgtggcaaatcaagcttttgccctagttgcaaaaactttgcttgagcagcgatgctatatggttgttaagggtagcttatcagcagcagttcatgtttacagcatagatgcaggactttgtgtaactttgcacgagaagactgtggacagtttcgacgatgctatattgctattgagggtctgatttggataatactccctccgtcccaaaatattccaaaatatgctcttgatttttatgtctatgtttaaataaacgataatgaatctagacacacatataaaataaatacattaataaacgaattgttt

SEQ ID NO: 53808 - DNA, 683 bp, Zea Mays
cggagacaaatgcatgttcaaagcaagcagtctcaaaatcaagtgatggcttccgtgtaagagggacttttcagggtctcttgctcatcatttagcatgcttgttatattttgagtcgaaacacgtgatctccaagaaccaggtctgtctctaccttacctgcatttagcatgcttgttatattttgacagaaataatggacgaatcagtgctaaaaagaataaagggctacatttacaaggtagtgaatgtttgccatcaccataattgtttctttatattcttgttccctttcagtttgttcactgtcagatttgattatttgctttagtttattctgttgttgttttcataatcggattttttctgtttctgtcagtaggcatgatttagtccttagtctctgtaagttagcgaggctagcttaactgttgcttgattttactgccttgctgatttagtcatcagatgtttgaatactgaccttcaaggggaatgctccaaaccttgagtttggggatcaaggagaggactccattatcttgtcaccgtggctgaaggagattagtactcctgaccgccctgctgccctccgtttcctaggggagaagtataataacctcatagagaggtacaagaagcaggtagtcaagtgttcctaggagtgtgaaccaagatataat

SEQ ID NO: 53809 - DNA, 2834 bp, Zea Mays
cggagacaaatgcatgttcaaagcaagcagtctcaaaatcaagtgatggcttccgtgtaagagggacttttcagggtctcttgctcatcatttagcatgcttgttatattttgagtcgaaacacgtgatctccaagaaccaggtctgtctctaccttacctgcatttagcatgcttgttatattttgacagaaataatggacgaatcagtgctaaaaagaataaagggctacatttacaaggtagtgaatgtttgccatcaccataattgtttctttatattcttgttccctttcagtttgttcactgtcagatttgattatttgctttagtttattctgttgttgttttcataatcggattttttctgtttctgtcagtaggcatgatttagtccttagtctctgtaagttagcgaggctagcttaactgttgcttgattttactgccttgctgatttagtcatcagatgtttgaatactgaccttcaaggggaatgctccaaaccttgtaagtaccctttataacaatatatccctgcttcctctaattttctttccaaaactcagtgctcaatctgtgtgtatttatttgaacacacaattgagcaaaccacttatgtttaatgctcattcagatataagaagtgtttgttatcctttttttgcaagtaatacaagtgaaagaataatgttaccacacttggttcgatgtttgacaatactgggatgcaaattttggcaatccagtgtccggaccataaattctaagtaacaactggtgttaatcggattgacctctccacattcacattacatgtcccaagtgtggtaacatgctgcataactgttgagatcattagcattttagatgttgaattccttgcttgcaaggagtgtcacgaatactgagactgttctcgcacatgctgaatcgtatcacattcctattccactgtctatttcaacccttctatttttgtttcctggtagtgttgttgtcatagtaatagtgtaaatatctcttgctttgtgtatcagtgtaaatatctcccgctaacaaatcctgaatgcaacacacatttaggccaaaattcttaaactgcttcaggccaaaaatcagccctgaggagaaataatcggaggatttgtgatgaggtgccttaccgatccgttcccgtaaaaaaacattagccatgagtgcaaccaaagctatatatatgtctggtctggtgtgatcttttgctcactatccaaacaatcctaataaattattacattcttgaattcatcactcatatataacactaacttggcatctgccattccagtatcatcatcatcatctaataacaatatgtcgagttatagtcaaaacagttagctacaattatttatggcattttgcagccagtggttgccggctaatccggccggtcacaaacaaccaagtagagctgcctcgtacttcatctcgcctggctatttttagtagcatggtactgaccgctgaagcaggcagatctggatctgtcatggctggccgctaaagaaaggttgtttacaaggcagcagaggcgatggctctttgtctttgtgcaatggtgactggtgcgaggtgtctggtttggttgcgcacaagaaccacgccaacagaagttgcctgcactgcatgcacaccatgacaccaatggcctctcatgactttttgatggaccctccattgtctctgcaaggaagctggagtgcgacctgggccttttgtctagatgcaagaagggctcgtgatagctcatttcgttctaggctttggctcatggcgcctgctattccaaggatgccatacatggaccgctagctagatttgaggttaaagaactctggtgttgttctagcctgtagacatcatcgctgatcaaagatcttacaatttgtttcagagtgaagttgtgagtaaaaagtggcgcaatatataaaatgccctattgattgggggtgaccaattcatgtcaatgctaatggagagttggagactaatatccaacatctcctcttacagataactttgagacaaatggaagctaaccgacaaatcgactaagtaaagtaattattatgcccttctgatccacagtggtgttctgaaatttattttctgcaagcaccaccagcatgcagactcttgcttgaagcagatcagcctgggtctgcactatgcagaatcaaagccagacttctcgccgattggctctgctctgctatatagtggagtaactgtggtcaaaatgaggccatgacccaatctttcgcgccataaagaaaagagacgccttgcttgacctgtgggttgccagcgtcgagagttccacccaataggatagataggatggggaagaagccgtggtcccatccatccgattggcgcccataaaaagaggtgcttgtgcttggagatttccatcgcacctgcttctcggggacccgtaaccatcgagcgtcacaagaactgtaacaaaatccatatggattggagaagattgggtggttttcaatccatagcaagtcaaaattcttcataatttttttcaattccttccaattcataagacatagaaatatggtagggctgttcgcttctgatttcattgtgttttttcttcaggagtttggggatcaaggagaggactccattatcttgtcaccgtggctgaaggagattagtactcctgaccgccctgctgccctccgtttcctaggggagaagtataataacctcatagagaggtacaagaagcaggtagtcaagtgttcctaggagtgtgaaccaagatataat

SEQ ID NO: 53810 - DNA, 813 bp, Zea Mays
cttgctgatggctccctgaggcgttcaggaatccatgcggcttggctcggcggcgaccaagcctgatggtcagccgacgcgtggggttctcaacctgcattgcctaatgctgtcatgccgaggtgcatggggatttgggaccatggttcaaagcaagcagtctcaaaatcaagtgatggcttccgtgtaagagggacttttcagggtctcttgctcatcatttagcatgcttgttatattttgagtcgaaacacgtgatctccaagaaccaggtctgtctctaccttacctgcatttagcatgcttgttatattttgacagaaataatggacgaatcagtgctaaaaagaataaagggctacatttacaaggtagtgaatgtttgccatcaccataattgtttctttatattcttgttccctttcagtttgttcactgtcagatttgattatttgctttagtttattctgttgttgttttcataatcggattttttctgtttctgtcagtaggcatgatttagtccttagtctctgtaagttagcgaggctagcttaactgttgcttgattttactgccttgctgatttagtcatcagatgtttgaatactgaccttcaaggggaatgctccaaaccttgagtttggggatcaaggagaggactccattatcttgtcaccgtggctgaaggagattagtactcctgaccgccctgctgccctccgtttcctaggggagaagtataataacctcatagagaggtacaagaagcaggtagtcaagtgttcctaggagtgtgaaccaagatataat

SEQ ID NO: 53811 - DNA, 2409 bp, Zea Mays
cttcctccttgcatccccatccccatcttccaccctcccttgctcactcaccagtcacccacacgcacactcctgcagtttgaaatccctattgtattgtttgaggtaaaaagccaagcattgccccaacagcaacatgtaacaagccaagcttcaccatcgccatcagctacccaagtgggagtgcagattgagtggcctgtgactacagtactggcatcacttcgcttccactcctgtccagcccgcccgcccgccatgcagtccggctacggcggcgtgtctgagttccagcagttcatcatggacggcggcttcgccatgtccgcgcctccgcagcagcagcagccgcccgccaccgcccaggagatgggtgggcccttcaggtgcggccgccggggggcaccaccacctccagctcttccacgagcagcagcaccaccacaagccccagccgccggcgagatgggcaccgcacccgcatcaccaccaccaccaccaccatctcggattcgacgtcgaggccgccgtgccggagagctcgggggcggcgggcggcgggagcgccggggcctcggccggcgccgcgccttcgggcgtgcccccgttcctggcagccgccatgaacttcaagctggcggtcgacgccggcggcggcagcggcgccacggaaggcaccgacgacggcggtggcgccgcgggcagcggcatgatgcttcacgttggcagcggtgggggcggcggcgacgaggccgccactgagagccgcctccgtcgttggaccggcgacgaggagacctccatcaaagaacccacctggcggcctctggacatcgactacttgcagagctcaagcagcagcaagaggacggggaaggagaaggtggccacgccggctgcccccgccaattacttcaagaaaggcgacgctgcggccgcgggcggcggcaactacaagctgttcagcgagctggaggccatctacaagccggggagcggtggcgcccagacgggctccggctcctgcctcaccggggacgacaatgccatcctcgagccggccgtggccgacctcccggccgtgggcccgcagcagctcaacacgtcggagacgtcggccggggaggaggcggccgcggtggtgcagccgcagcaacagccccaggcgtcggcggacgcggcgcggcgcaagcggaagcggcggcggcaggagcagctgagcgcgtcggcgtccttcttcgagcggctggtgcagcggctgatggagcaccaggagagcctccaccgtgggttcctggaggccatggagcggcgcgagcgggagcgcgccgcgcgcgacgaggcgtggcggcggcaggaggccgacaagttcgcccgcgaggccggcgcgcgcgcgcaggaccgcgccagcgccgcggcgcgggaggccgcaatcatcgcctacctggagaagatctcgggcgagtccatcacgctgccggccccgcccgccgccgcggcgtccggcgacgacgccacggcggccggcaaggagctggtgccgtacgacggcggggacgcgacagcggccgagggtggcggcgggtcgctgcacctcagcagcacgtcgcggtggcccaagcacgaggtggaggcgctgatccgggtgcggacgggacttgaggggcggttccaggagctcgggctcaagggcccgctgtgggaggaggtgagcgcgcgcatggcggcggcgggctacggccgcaacgccaagcgatgcaaggaaaagtgggagaacatcaacaagtacttccgcaaggccaaggagagcggcaagaagcggccggcgcacgccaagacgtgcccctacttcgacgagctggaccggctctactcccggtcggccgacggcgggggaggcgaggccaggcagctggggagctcagagctgctggacgcggtgatcaagtaccccgacgtgcgctacgggccgccggtgttcggtggcggcaatgctaataatgaaggtggagaggacgacgacagcgacggggaggaggaggaggaggaggaggaggacggcattggcaaggggagggccggggatgatcaggacgacgaggtggacaacgatgatgagtagctagctaacagtacccccacccctcgctcgcatgcatgtttgttgaacaaatttgcttagcaatctgtttaattttctttcttgcttgttactaaatcactgctagctagtagtggtaggtgttatcgctagtgcatttcaacacttgttattattttagctagcactccactgcttctgcttctagctctgctgttattattatgttgtatactatcataagatactgctaatctaatgaacaaattaagtaagtaatggtatgatatatgtagaatgaatattcc

SEQ ID NO: 53812 - DNA, 2040 bp, Zea Mays
cagacgtctgccctcctccctcgcctcccctgccctccattaaagacaaggacaaggccatcctcttcctccttgcatccccatccccatcttccaccctcccttgctcactcaccagtcacccacacgcacactcctgcagtttgaaatccctattgtattgtttgaggtaaaaagccaagcattgccccaacagcaacatgtaacaagccaagcttcaccatcgccatcagctacccaagtgggagtgcagattgagtggcctgtgactacagtactggcatcacttcgcttccactcctgtccagcccgcccgcccgccatgcagtccggctacggcggcgtgtctgagttccagcagttcatcatggacggcggcttcgccatgtccgcgcctccgcagcagcagcagccgcccgccaccgcccaggagatgggtgggcccttcaggcggcctctggacatcgactacttgcagagctcaagcagcagcaagaggacggggaaggagaaggtggccacgccggctgcccccgccaattacttcaagaaaggcgacgctgcggccgcgggcggcggcaactacaagctgttcagcgagctggaggccatctacaagccggggagcggtggcgcccagacgggctccggctcctgcctcaccggggacgacaatgccatcctcgagccggccgtggccgacctcccggccgtgggcccgcagcagctcaacacgtcggagacgtcggccggggaggaggcggccgcggtggtgcagccgcagcaacagccccaggcgtcggcggacgcggcgcggcgcaagcggaagcggcggcggcaggagcagctgagcgcgtcggcgtccttcttcgagcggctggtgcagcggctgatggagcaccaggagagcctccaccgtgggttcctggaggccatggagcggcgcgagcgggagcgcgccgcgcgcgacgaggcgtggcggcggcaggaggccgacaagttcgcccgcgaggccggcgcgcgcgcgcaggaccgcgccagcgccgcggcgcgggaggccgcaatcatcgcctacctggagaagatctcgggcgagtccatcacgctgccggccccgcccgccgccgcggcgtccggcgacgacgccacggcggccggcaaggagctggtgccgtacgacggcggggacgcgacagcggccgagggtggcggcgggtcgctgcacctcagcagcacgtcgcggtggcccaagcacgaggtggaggcgctgatccgggtgcggacgggacttgaggggcggttccaggagctcgggctcaagggcccgctgtgggaggaggtgagcgcgcgcatggcggcggcgggctacggccgcaacgccaagcgatgcaaggaaaagtgggagaacatcaacaagtacttccgcaaggccaaggagagcggcaagaagcggccggcgcacgccaagacgtgcccctacttcgacgagctggaccggctctactcccggtcggccgacggcgggggaggcgaggccaggcagctggggagctcagagctgctggacgcggtgatcaagtaccccgacgtgcgctacgggccgccggtgttcggtggcggcaatgctaataatgaaggtggagaggacgacgacagcgacggggaggaggaggaggaggaggaggaggacggcattggcaaggggagggccggggatgatcaggacgacgaggtggacaacgatgatgagtagctagctaacagtacccccacccctcgctcgcatgcatgtttgttgaacaaatttgcttagcaatctgtttaattttctttcttgcttgttactaaatcactgctagctagtagtggtaggtgttatcgctagtgcatttcaacacttgttattattttagctagcactccactgcttctgcttctagctctgctgttattattatgttgtatactatcataagatactgctaatctaatgaacaaattaagtaagtaatggtatgatatatgtagaatgaatattcc

SEQ ID NO: 53813 - DNA, 1503 bp, Zea Mays
gaaagctcaatccatcgcctgttgggcattgtgatactcttgataccaccgtgtagtatagctctcacaacaataacgatttggtgagatacatgaaaaagaaagccacagcccaaatactcgtagtaagcagcttaatgcagctagaaagcacacattgtagcggtttgtttttattgaacacgggtaccggatgctgctgctaggttgtggaaattgatgcaataattaattaatgaagagagacggtgatgtgatcatcagaggccgaggagctggcagttctcccagatggtcttggcggagcggcgcagtcgtttggcctcctcctcggtgagctccatctcggcgacgccctggacgccggcgcggccgagcctggcgggcaggctgaggaagacgtcgttcccgtcggggatgccgtggaaccccctggcgaggacggagaccgggtggatgcggcgctggtcccggagcagcgacgcggcgaggctggcgacggagtagccgatggcccaggaggtgtagcccttgaggctgatgacctcgtaggcgctgtcgacgacggcgcggcggatgccctccagcgcctcctcgtcgaagcagcggtggctctcctgcagcgacttgagcaccggcatccccgccacgctcacgctcgaccacaccgccaccgagctgtcgccgtgctcgccgaccatatgtcattactcctcacgaacctgtacgtcctgggcgttgacgtcgaggtgctcggcgagaaggaacctgaacctggacgagtcgaggttggtgccggatccgatgacgcggctggccgggaagcccgaaagcttccaggcgacgtaggtgagcacgtccacggggttggacacgacgagcagcagcgcgtcgtgggactgctccgccagcggcggcacgatcttgcggaacagcgccacgttccgctggagcaggtcgagcctcgtctcgccctggatctgccgcgccccggccgtcacgatgaccaggtccgagcccctggtcacggacatgtcggtgccggacacgaggcgcgtgcgcggcaggaacgccgccgcgtgctgcaggtccagcatctccccgcggagcttgtccgggaccgcgtccaccagcgcgatctcgtcggccaggtcgcgcgtgaggatggtctgcgcgatggccatccccacgttgcccgcgccgatgaccgacaccttggtcagcctccgccggtggtgctgcgacgtcggcgtcgacgagtcgccggacacagggcggaagaagcccgacgacgcgtcgccggcgtcgaagcccagctcggagagcgaagtggccttcttcatcttcttcttcccaccggtggtgctgctgttgcgggcggaatgggatgggattacgtgtgtgatatgatctggttgggtcaaatctccgcggatcggatttctctgtggaggaaggaaggaatggcaatgggcaatggctactcgactcgtgggaggggaa

SEQ ID NO: 53814 - DNA, 234 bp, Zea Mays
atgcccgcgtggccgtcgtcgtccttggagccgatgacgacgcgccatgcgccgtccgaggggtcgatccaggccgtggtggggtcgcggaagtccttgggcccgatgcccgggggcgggtacagcaccgggttgccctcgtacttggtccagttggtgagcagcgggtcggcgtcgtcggcgggcacggccaggcactgcacctggacggaggcgttggtggagcccgtgtag

SEQ ID NO: 53815 - DNA, 153 bp, Zea Mays
acgagcacccggagcgagagcgtggcctcgtcctccagcacggggacggcgctgccgacgacgcgcttgacgatgtcggtggcgctggaggagcgggactcgtcctggcagaagtgcgtggcgagggagccgtccaggcccttggccacgtag

SEQ ID NO: 53816 - DNA, 753 bp, Zea Mays
gtcaaacctgcgctgcacttcagcttgaggaagaaggcgcgctggtgctggagtacctcgccggcggcacgctggcggacgcgctccacggcacctccaccgccgtggtgcacggcgacgtgtcggcgtccaacgtgctcctcttcgacggcggcgcgcggctctgcgacctgggctccgcctgcgagggcttctcggcggccgtggcgccggcgcgcgccgccgtgggatcgccgggctacgccgaccccttcttcctccgcacgggcatcgtgtccaccaagtccgacgtgtacggcttcggcgtactgctgctcgaggccgtcaccggcctgccgccggcgtccgaggcccagaacctgacggcgcggatcctgccgcgggtcagggagcgcggggtggcggggctcgtcgacggcaggctcggggacggcgggctcgacgaggaggaggccgccagcgtggccgagctcgccgtggagtgcctggccgcgcagcccgggctccggccgtcgatggcgcaggtgcgcgccgccatcgcggagaaagcggcgaggtccatcgccaaggcgggttacggccaccatatccagctcagcaagctgctggagctcacatgattccttgcattgtccttgatgtttattagttaggggtacaaaatttaggattgtaagaaaaatggattagtcccgagacactatcctttgcattgtaccatgacctcaaaccatcaagacactatcgcccctc

SEQ ID NO: 53817 - DNA, 1055 bp, Zea Mays
caacaaaacattgccactaattattccctcattggaagattcatatttttctggtttgccaatttccattattgaatcatggtaccaacgagatggctatgtgaaatcaatgtctgacctaattgaaaaggagctctccgccttctccaatcctgaagaggttatgatattcttcagtgcacatggtgtgccacttacctatgttgaggatgctggagatccttacagagatcagatggaggattgtattgctttgatcatgggggagttaagatcaagaggaatcttaaatagtcacactttggcgtaccagagtcgggtggggccagttcaatggctgaagccatatactgatgaagttttagtagaacttggtcaaaagggtgtgaagagcctcctggctgttccagtaagctttgtgagtgagcacatcgagacattggaagaaattgacatggagtacaaggagttggctctggaatcaggcatcaagaactggggtcgggttcctgctcttggatgcacttcaacattcatctccgaccttgcagatgctgtcgtcgaagccctgccctctgcttcagcgctcgcgaccagaaagcctgacgacatcgattccagcatggacctgacgcattacctcaccaagatgctgtttggctcaatcttggcatttgtcctgctgctatcaccaaggctagtttccgccttccggagcaccatgctttaagtttttctccaaagcactaaatttgagattgagaatgagatatttcattttggacctttttttcctccttaatagaatgatgtgcagttcttctgctcgttccagagaaaaaaataactgctaggaactcacaaggtagtaggggattgcaaaagggatgtgaacagctgttttgatcgaagttgtctataaataccgtgctcacggactctgtattttaatggtttcttgtgctcgactaattttgttgttcttgtccaaggttttgcgaactctttctttttggttgtttttttcttcttggttgtattcacgatgtccggag

SEQ ID NO: 53818 - DNA, 1393 bp, Zea Mays
ctaagatctctcattagttatgatatcattcgactccctaggctcttcaggtttcttcaaagaccactggccaaacttatttctacttttagagctcctaagagtaaagaagggtatgcttcaattggtggtgggtcgccgttaaggaaaattactgatgaacaggcgaatgctttgaagattgccctggaaaagaaaaaattgaacgcaaacatatatgttgggatgcggtattggtaccctttcacagaagaggccattgatcaaattaaaaaggataagattaccaagctcgttgttcttcccctttaccctcagtactccatatcaacaagtgggtcaagcattcgtgttctccaagacattgtcaaggaagattcatatttttctggtttgccaatttccattattgaatcatggtaccaacgagatggctatgtgaaatcaatgtctgacctaattgaaaaggagctctccgccttctccaatcctgaagaggttatgatattcttcagtgcacatggtgtgccacttacctatgttgaggatgctggagatccttacagagatcagatggaggattgtattgctttgatcatgggggagttaagatcaagaggaatcttaaatagtcacactttggcgtaccagagtcgggtggggccagttcaatggctgaagccatatactgatgaagttttagtagaacttggtcaaaagggtgtgaagagcctcctggctgttccagtaagctttgtgagtgagcacatcgagacattggaagaaattgacatggagtacaaggagttggctctggaatcaggcatcaagaactggggtcgggttcctgctcttggatgcacttcaacattcatctccgaccttgcagatgctgtcgtcgaagccctgccctctgcttcagcgctcgcgaccagaaagcctgacgacatcgattccagcatggacctgacgcattacctcaccaagatgctgtttggctcaatcttggcatttgtcctgctgctatcaccaaggctagtttccgccttccggagcaccatgctttaagtttttctccaaagcactaaatttgagattgagaatgagatatttcattttggacctttttttcctccttaatagaatgatgtgcagttcttctgctcgttccagagaaaaaaataactgctaggaactcacaaggtagtaggggattgcaaaagggatgtgaacagctgttttgatcgaagttgtctataaataccgtgctcacggactctgtattttaatggtttcttgtgctcgactaattttgttgttcttgtccaaggttttgcgaactctttctttttggttgtttttttcttcttggttgtattcacgatgtccggag

SEQ ID NO: 53819 - DNA, 1805 bp, Zea Mays
ctcaaatcaagatatgttactggaaggtcatggggcaaaacaacctccacaagttttactggttctaccaccaaacatgagcagagcttgcatggaaatgttaagccgttgcaattggcggcaaatgaatcctctcgtttggcttacagaagtccagcacttaaaaaccagtggaatcttcctgctagttcttcctccactaatgtggttaccacctttgatgataacgaacacgtgtcttccagtgttattgaagaaaaagttggagtactgttattaaaccttggtggtccagagacacttgacgatgttcaaccatttttattcaacctatttgctgatccagatatcattcgactccctaggctcttcaggtttcttcaaagaccactggccaaacttatttctacttttagagctcctaagagtaaagaagggtatgcttcaattggtggtgggtcgccgttaaggaaaattactgatgaacaggcgaatgctttgaagattgccctggaaaagaaaaaattgaacgcaaacatatatgttgggatgcggtattggtaccctttcacagaagaggccattgatcaagtacatttttgcagccttcattgtttcagacggatcctctgtgattgaattcaaaaggagaataatttttttgagagaaattgacaaaattaaaaaggataagattaccaagctcgttgttcttcccctttaccctcagtactccatatcaacaagtgggtcaagcattcgtgttctccaagacattgtcaaggaagattcatatttttctggtttgccaatttccattattgaatcatggtaccaacgagatggctatgtgaaatcaatgtctgacctaattgaaaaggagctctccgccttctccaatcctgaagaggttatgatattcttcagtgcacatggtgtgccacttacctatgttgaggatgctggagatccttacagagatcagatggaggattgtattgctttgatcatgggggagttaagatcaagaggaatcttaaatagtcacactttggcgtaccagagtcgggtggggccagttcaatggctgaagccatatactgatgaagttttagtagaacttggtcaaaagggtgtgaagagcctcctggctgttccagtaagctttgtgagtgagcacatcgagacattggaagaaattgacatggagtacaaggagttggctctggaatcaggcatcaagaactggggtcgggttcctgctcttggatgcacttcaacattcatctccgaccttgcagatgctgtcgtcgaagccctgccctctgcttcagcgctcgcgaccagaaagcctgacgacatcgattccagcatggacctgacgcattacctcaccaagatgctgtttggctcaatcttggcatttgtcctgctgctatcaccaaggctagtttccgccttccggagcaccatgctttaagtttttctccaaagcactaaatttgagattgagaatgagatatttcattttggacctttttttcctccttaatagaatgatgtgcagttcttctgctcgttccagagaaaaaaataactgctaggaactcacaaggtagtaggggattgcaaaagggatgtgaacagctgttttgatcgaagttgtctataaataccgtgctcacggactctgtattttaatggtttcttgtgctcgactaattttgttgttcttgtccaaggttttgcgaactctttctttttggttgtttttttcttcttggttgtattcacgatgtccggag

SEQ ID NO: 53820 - DNA, 1833 bp, Zea Mays
aattccttatggaagctgaagaagtagcgtggatttgtcatctcgcgctgccacgtttgactttggacttgctgccacgtttggtagttgctacttgctacaccggaggaagaagaacaagtagtgcttttcttctcttgtcacgttcacggggcggccgatcgaccgttcacctcgcccgacggcccaagcagcccatgtcttcgtcgggcccctccccggcgacgggaatccacgcgtcgccgccgttgggccttttgccggcgacgggaacccatcacaccaggtcatggggcaaaacaacctccacaagttttactggttctaccaccaaacatgagcagagcttgcatggaaatgttaagccgttgcaattggcggcaaatgaatcctctcgtttggcttacagaagtccagcacttaaaaaccagtggaatcttcctgctagttcttcctccactaatgtggttaccacctttgatgataacgaacacgtgtcttccagtgttattgaagaaaaagttggagtactgttattaaaccttggtggtccagagacacttgacgatgttcaaccatttttattcaacctatttgctgatccagcgaatgctttgaagattgccctggaaaagaaaaaattgaacgcaaacatatatgttgggatgcggtattggtaccctttcacagaagaggccattgatcaaattaaaaaggataagattaccaagctcgttgttcttcccctttaccctcagtactccatatcaacaagtgggtcaagcattcgtgttctccaagacattgtcaaggaagattcatatttttctggtttgccaatttccattattgaatcatggtaccaacgagatggctatgtgaaatcaatgtctgacctaattgaaaaggagctctccgccttctccaatcctgaagaggttatgatattcttcagtgcacatggtgtgccacttacctatgttgaggatgctggagatccttacagagatcagatggaggattgtattgctttgatcatgggggagttaagatcaagaggaatcttaaatagtcacactttggcgtaccagagtcgggtggggccagttcaatggctgaagccatatactgatgaagttttagtagaacttggtcaaaagggtgtgaagagcctcctggctgttccagtaagctttgtgagtgagcacatcgagacattggaagaaattgacatggagtacaaggagttggctctggaatcaggcatcaagaactggggtcgggttcctgctcttggatgcacttcaacattcatctccgaccttgcagatgctgtcgtcgaagccctgccctctgcttcagcgctcgcgaccagaaagcctgacgacatcgattccagcatggacctgacgcattacctcaccaagatgctgtttggctcaatcttggcatttgtcctgctgctatcaccaaggctagtttccgccttccggagcaccatgctttaagtttttctccaaagcactaaatttgagattgagaatgagatatttcattttggacctttttttcctccttaatagaatgatgtgcagttcttctgctcgttccagagaaaaaaataactgctaggaactcacaaggtagtaggggattgcaaaagggatgtgaacagctgttttgatcgaagttgtctataaataccgtgctcacggactctgtattttaatggtttcttgtgctcgactaattttgttgttcttgtccaaggttttgcgaactctttctttttggttgtttttttcttcttggttgtattcacgatgtccggag

SEQ ID NO: 53821 - DNA, 1943 bp, Zea Mays
ccggtaggccatttggacttttacgtcgagctgctcagcatgtgagccgcccgttgctacttgctacaccggaggaagaagaacaagtagtgcttttcttctcttgtcacgttcacggggcggccgatcgaccgttcacctcgcccgacggcccaagcagcccatgtcttcgtcgggcccctccccggcgacgggaatccacgcgtcgccgccgttgggccttttgccggcgacgggaacccatcacaccaggtcatggggcaaaacaacctccacaagttttactggttctaccaccaaacatgagcagagcttgcatggaaatgttaagccgttgcaattggcggcaaatgaatcctctcgtttggcttacagaagtccagcacttaaaaaccagtggaatcttcctgctagttcttcctccactaatgtggttaccacctttgatgataacgaacacgtgtcttccagtgttattgaagaaaaagttggagtactgttattaaaccttggtggtccagagacacttgacgatgttcaaccatttttattcaacctatttgctgatccagatatcattcgactccctaggctcttcaggtttcttcaaagaccactggccaaacttatttctacttttagagctcctaagagtaaagaagggtatgcttcaattggtggtgggtcgccgttaaggaaaattactgatgaacaggcgaatgctttgaagattgccctggaaaagaaaaaattgaacgcaaacatatatgttgggatgcggtattggtaccctttcacagaagaggccattgatcaaattaaaaaggataagattaccaagctcgttgttcttcccctttaccctcagtactccatatcaacaagtgggtcaagcattcgtgttctccaagacattgtcaaggaagattcatatttttctggtttgccaatttccattattgaatcatggtaccaacgagatggctatgtgaaatcaatgtctgacctaattgaaaaggagctctccgccttctccaatcctgaagaggttatgatattcttcagtgcacatggtgtgccacttacctatgttgaggatgctggagatccttacagagatcagatggaggattgtattgctttgatcatgggggagttaagatcaagaggaatcttaaatagtcacactttggcgtaccagagtcgggtggggccagttcaatggctgaagccatatactgatgaagttttagtagaacttggtcaaaagggtgtgaagagcctcctggctgttccagtaagctttgtgagtgagcacatcgagacattggaagaaattgacatggagtacaaggagttggctctggaatcaggcatcaagaactggggtcgggttcctgctcttggatgcacttcaacattcatctccgaccttgcagatgctgtcgtcgaagccctgccctctgcttcagcgctcgcgaccagaaagcctgacgacatcgattccagcatggacctgacgcattacctcaccaagatgctgtttggctcaatcttggcatttgtcctgctgctatcaccaaggctagtttccgccttccggagcaccatgctttaagtttttctccaaagcactaaatttgagattgagaatgagatatttcattttggacctttttttcctccttaatagaatgatgtgcagttcttctgctcgttccagagaaaaaaataactgctaggaactcacaaggtagtaggggattgcaaaagggatgtgaacagctgttttgatcgaagttgtctataaataccgtgctcacggactctgtattttaatggtttcttgtgctcgactaattttgttgttcttgtccaaggttttgcgaactctttctttttggttgtttttttcttcttggttgtattcacgatgtccggag

SEQ ID NO: 53822 - DNA, 792 bp, Zea Mays
atctgcgacgagctcctgtcggattcattcacctacaaggagctcgagaacggcgtcctgtgggaggtcgagggaaagtgggtcacccaaggtcctgttgatgtagacattggtgccaatccatccgccgagggtggtgaggatgaaagcgttgatgacacagccgtgaaggtggttgatattgttgacacattccgtctacaggagcaacctccttttgacaagaaatcatttgtctcttacataaaaaaatacatcaagaatctcactgctgtgttggagccagagaaagcggatgagttcaaaaagggtgtcgagggtgcaaccaagtttctccttagcaagctgaaggaccttcaattttttgttggtgagagcatgaaggacgaagcgtccgtggtattcgcctattacaaggatggtgccactaatccgacattcctctatttctctcatggtcttaaggagatcaagtgctagattagttacccatgttgggtactatatatgttctattgttatagccacaactatagctgccctgcctgaactgaactcaggttttttttaagaaaaaactgtccaagattggattgcttgttaaagctaaatattgttattgacgtgttattgcttagttgtcattgtctttcagctagtcattttatatttttgttttttatctcttcgttaaaatcttatacttatttttgacgaaagtagatgtgagttaattattagtatttctatttggactaaagaattagatttgagttaattgttaatagataa

SEQ ID NO: 53823 - DNA, 606 bp, Zea Mays
ctctaaatgagcaacctccttttgacaagaaatcatttgtgtcttacatcaaaaaatacatcaagaatctcactgctgtgttggagccagagaaagcggatgagttcaaaaagggtgtcgagggtgcaaccaagtttctccttagcaagctgaaggacctccaattttttgttggtgagtccatgaaggatgatgcgtctgtggtattcgcctattacaaggatggtgccactaatccgacattcctctatttctctcatggtcttaaggagatcaagtgctaggcgtgcggcgaaattagttacccatgttgggtactatctatgtactattattatatccaaaactatagttgtcctggctgaattgaactcaaaagggtttgtttgagaaaaaattgtcccaagattggattgcttgttaaagctcaatattgttattgaagtgttattgcttagttgtgattgcctttcagttagtctttttatattttatatttttatctcttcattaaaatcttgtttttgacgaaagtagaagtgagtttattattagtatttctatttggactaaagaattggatatgagttaattgttaatagataa

SEQ ID NO: 53824 - DNA, 2673 bp, Zea Mays
atggccaagcgcccagctcccttgctcttgctgcccgccgtggccggctccctactgctctcgtctaggtcgccgctgtcgagttccctcaccgagtccttaccctgctcgctgtcacggccgccgtcaaatcgtcggagtcgctcaactcgccaattacatcttggccggtcgtcaattttctattcgccgtggtacaacacagctgttagatccagtctccaaaccgccacggcgtttgccggacttcgccgataaagttcgtcgtcgtcctctagtcccagcctgacccattcgtgctgctcgccccgtgtgcgctcgcttctcatccattgggtttcggcgtgttcgcgtttatcgtcgagtcgtcgaacccgtcatccccttctcgatccccacctcaccagctcgctccagactcgatctcgtcgtcgttccgtgcgtcatcaagaaatacaaatcgtcgggtaaagacgaagctagccgcgtgatatttaccaagtgctcggcgaaaggccagaacaagaatcatcgccgtttatgcgaagttctagttaatatggagagattccaagagtggtggatggaagagaaagtgaagctccgttctatactcgtcagttgtttgattgaagacttcaatcgaagactatcgtcgttctcgcaaatattgaatcgagttgataatggtgagccaaatcactatttttactattgattttatgatcatgaaataagacgcttagtttgcgtatgaagtttaagttagaaataccggtgatgcgaggtgtgcttcgaggagtttagttgccgagtatatttgaactagttctattttgcagagtgtagtattccggtgacgcgtagattaaatttagtattttatgcaattatcgataaatctatcgatgctagttgtgttcaatgcgcgtaaagtgaagtcgatgtccagcgctagtagttagtatcatctatgtgtgtgatcgaaaatgttggggtaggatatgatcgacgattttcttatctagtgattggtgtgatggtatattgtataaaatatgcttggtaaaatatatgtagtaatatgattctgttaagaaatcataaaagaaagtagagcgtgaatatatatatatatattattgttttgtgatatatgagatacctttgaatatgctagaaaagtgtaattattataattagtcttatatcgctagctgatacttgcttgtgattgattctaatgcgttgttgtaagtgtttcatcatcttcagcgtagattatttgttttatgctattcctctgtatatttatacatgtgcattgtgcatcccatgaggtacggaaattaatcgcgtgaggcggaagatgagtccagttgaccccgagcgcgggctactccgcatggtgatgctgatggacgaacctgcttgaacaaatgtcaagacaaaggatggtcatcaagcggacgtcgtctaacaacactaacctagtgttatccacgcaagccccggtgcatgcaaccccttctttgtgtttttaaatgatttttaaacactttaagtctagcgaaatgtgcattaggtttataggagttacttggaaaccctttgagcattgcctaccttgatatccatacctttatagatacttctgatgaagtatcaaaatatgatttacaaaaatgcttagccctgcttagatcttgtggatagaggttgtcttttgcattaaggcctagctcagggattatcctgaggaaggatgacttctacctgcaagaatattttccttgggagcgtggtgggaccttactgcaaagttccctataatgctcttttcatcctaaggaacacaaaacaatcctaaggatggaagtacttaaatcgagacttgggttaggaacaggtgatgttctacccaggttaattaaggattatagcgaatgtaggcttgatgaccgaggaccttttaactggtcacagcctcgtcatgggtaagctttacctcgggcagactaataccagaataaaagataacacgcaatgggagtggagagatggcgagagtagcgtgtaccctccgtggcaagaggttggacggtagtgtatttgtgctctcggttggcgtgaacctgatctgattttaagaaccccagtggcgagttgacatatgcaagggttaagtgctacatatgtcgtgtgattggagatccccagctgggtattaatcgattcggatcgccgttacttctcggacatgaagacttggtcactgccctgcaatctaagtcatggatggaatcataatgagcaaaaatcacgttgtattaattaatgtgatgatgaaattagactagatgcaaacaaggtctattaatacttaatctagcattaaaatgttgaaagtaaggatccacttatagtaagcttttctgcaaacagagtccttagtccttgattcttgataagccttaccttgaatccctttaaaaccagcatacccttgagagtgttttctttagtcgggtaagtcttgctgagtacttgcgtacttagggttttacccattgttgttgcaggttacgagtcacttgattgtgattagtgttaagcgccggtgggcacgaccttcttataagtctaagtacttcttctaaacttcttattgag

SEQ ID NO: 53825 - DNA, 772 bp, Zea Mays
ctgaaaatagcacagattacagagtggaggatgcaatcgagatcctggagcatgtgctgaaggtgagggaagagaagcttggcacggcgaacccagacgtggatgacgagaagaagcggctggcggagctcctgaaagaggcggggcggtctcggaaccggaagcagaagtcgctgcagaacctgttcgggaccaactcgcagcgggcgaagaaggaagccgggaggaggtggtccaactttgggttcagaagctgaggaagctgcactgttggtcgtcgtcgtcgtcgggcggttgtggcctttgtaacataaaggagggatgggaaaggaaaaaaaagcacgtgtaaagatgttgctgtaggttattattattaggaatgtgatggtggtgttggtttgctgtttgtgtatgtgtggcactgcattactgtgttacttgtcttgggttatattttcagtagcgattattgttaactgggtgctgttataccttgagaagagaacattggttttgtcgtggaggaatggtgttgactggtgggtgatgagaattacatgtgattgtttgttagtacattgcttccttccattgatcgagttgatgaggatccctgtgtgaccctgtcagggtttgttcggttattttcaattcatatggattggaggggattcatacggatcgggagggattttgacttactagggattaaaacaccctcaatccatatggattggggtaaaaccgaagaagcccttaggtggcacaaaat

SEQ ID NO: 53826 - DNA, 1728 bp, Zea Mays
aacaagtgatgtcttcccccatcgttggttgttagtcgttacacataaccgtggatctcggcattagaagtacctggcggaagcgcacgtgcaagctctgcagttcgacgaggcagagaagctgtgtcgcgaagccctccagatccaccgagagcacagcgctccggcatccctcgaggaggcctcggaccgccgcctgatggccctcgtcctggacgccaagggtgactacgacggcgcccttgagcacctcgtgcttgcctccatgaccatggttgccaatggccgtgacattgaggttgccaccattgacgtcgccataggcaacacgtacctcgccctcgcccgcttcgacgaggccgtcttctcctaccagaaggcactgactgttctcaaatcggcccgtggcgacgaccatccgacggttgcgtcggtctacgtccgccttgctgacctttaccaccggacaggcaggctccgtgagtctaaatcctactgcgagaacgccctgcgtgtctatgccaagcccgcgccaggtgctgcccctgatgagatcgctggaggcttaatggagattgctgccatctatgaggcgcttggcgatctcgatgaggccctgaagcttcttcagagggcactcaggttgctcgagggctcaccggggcagtggagcactgttgccggtattgaggcacagatgggtgttctgtactacatggttgggaggtatgcagattcgaggaactcgttcgagagtgcggttgcaaagttgagggccattggtgagaggaagtcggcatttttcggcgttctgttgaaccagatggggctagcttgcgtgcagctgttcaagatagacgaggctgcacagttgtttgaagaggcaagggcggttctggagcaggagtgtggcgcttctcatcctgatactcttggtgtgtacagcaaccttgctgcaatctatgatgctatgggaagagtggaggatgcaatcgagatcctggagcatgtgctgaaggtgagggaagagaagcttggcacggcgaacccagacgtggatgacgagaagaagcggctggcggagctcctgaaagaggcggggcggtctcggaaccggaagcagaagtcgctgcagaacctgttcgggaccaactcgcagcgggcgaagaaggaagccgggaggaggtggtccaactttgggttcagaagctgaggaagctgcactgttggtcgtcgtcgtcgtcgggcggttgtggcctttgtaacataaaggagggatgggaaaggaaaaaaaagcacgtgtaaagatgttgctgtaggttattattattaggaatgtgatggtggtgttggtttgctgtttgtgtatgtgtggcactgcattactgtgttacttgtcttgggttatattttcagtagcgattattgttaactgggtgctgttataccttgagaagagaacattggttttgtcgtggaggaatggtgttgactggtgggtgatgagaattacatgtgattgtttgttagtacattgcttccttccattgatcgagttgatgaggatccctgtgtgaccctgtcagggtttgttcggttattttcaattcatatggattggaggggattcatacggatcgggagggattttgacttactagggattaaaacaccctcaatccatatggattggggtaaaaccgaagaagcccttaggtggcacaaaat

SEQ ID NO: 53827 - DNA, 1822 bp, Zea Mays
tccgattcttttgcttcactacaagcagctcagcctcagctgtcaagcgagcccccgtcccgctcccttcctgctacctgctggccgctgccctttccttcccggaatggtatcgtgcgacctgtagtcgtcgccagccacctcgctccctcctagacgacacccagctagtgctcccttccacacccaggaaccagccacctaaccccgcccgccatgccgggcctcgccgcctccgacaactcgcccccggcgccggcgccgccgccgcgccggctctcgtcgccgctaccccgtcgcgcgccgtcgtccccgtcgccgtccgcctcctcgcgcgccaagcctcggaagccctcgccctctcccgcggccttccccaccgacgccgacgactcgctcgtcctggacgccaagggtgactacgacggcgcccttgagcacctcgtgcttgcctccatgaccatggttgccaatggccgtgacattgaggttgccaccattgacgtcgccataggcaacacgtacctcgccctcgcccgcttcgacgaggccgtcttctcctaccagaaggcactgactgttctcaaatcggcccgtggcgacgaccatccgacggttgcgtcggtctacgtccgccttgctgacctttaccaccggacaggcaggctccgtgagtctaaatcctactgcgagaacgccctgcgtgtctatgccaagcccgcgccaggtgctgcccctgatgagatcgctggaggcttaatggagattgctgccatctatgaggcgcttggcgatctcgatgaggccctgaagcttcttcagagggcactcaggttgctcgagggctcaccggggcagtggagcactgttgccggtattgaggcacagatgggtgttctgtactacatggttgggagatggggctagcttgcgtgcagctgttcaagatagacgaggctgcacagttgtttgaagaggcaagggcggttctggagcaggagtgtggcgcttctcatcctgatactcttggtgtgtacagcaaccttgctgcaatctatgatgctatgggaagagtggaggatgcaatcgagatcctggagcatgtgctgaaggtgagggaagagaagcttggcacggcgaacccagacgtggatgacgagaagaagcggctggcggagctcctgaaagaggcggggcggtctcggaaccggaagcagaagtcgctgcagaacctgttcgggaccaactcgcagcgggcgaagaaggaagccgggaggaggtggtccaactttgggttcagaagctgaggaagctgcactgttggtcgtcgtcgtcgtcgggcggttgtggcctttgtaacataaaggagggatgggaaaggaaaaaaaagcacgtgtaaagatgttgctgtaggttattattattaggaatgtgatggtggtgttggtttgctgtttgtgtatgtgtggcactgcattactgtgttacttgtcttgggttatattttcagtagcgattattgttaactgggtgctgttataccttgagaagagaacattggttttgtcgtggaggaatggtgttgactggtgggtgatgagaattacatgtgattgtttgttagtacattgcttccttccattgatcgagttgatgaggatccctgtgtgaccctgtcagggtttgttcggttattttcaattcatatggattggaggggattcatacggatcgggagggattttgacttactagggattaaaacaccctcaatccatatggattggggtaaaaccgaagaagcccttaggtggcacaaaat

SEQ ID NO: 53828 - DNA, 1056 bp, Zea Mays
ctgctaccttgggtcttcaacaggccttgccaaagcaaaaaaggaatcttgatttactgacatcaataattcgatcggggcagccttagctggacgagaaattttgagcctgggttctataatgcctgacaaagtccatttcaaaagataaaattgatatccagtgcccagtgcccatacatataaaagagaagcccattgctcctgttgtacctggagaaagtgaccgtccttgatacagaagtgttgctagtgggtttgttgcccaatggttcacagctgggaggttagttggctgaaatcccactactttaccttcttctgacatgaccacctaaaaattagcaatattctgcagaggaaattcctgggttctatcattttgttccaaatgagacatcttagtattaactggcactggctgggattgattttcttggctaagagtgtcaggatactgaaaagagccagaagcagcagcatcctcactactgattgccttgaagcagttaggtagttctccaacccatgctccaatgtgagaatcaaccattacatcaccagggcagccatacgagtctttcattttcttaacaagtgacatgcaataagcttgtacctgaagagtaaatcagacaaactatgcagcacacataaatattgaatagggtagttatgctacaatccagttatgcaggcatattaattcagtattccctagacaaatataacaagcttgacttcaactcaacttgtttaatatttataaatgaagtgtcacatcctgatagtactaattttcaaggggggcagaaacaaatgagatgcagcccgacagaatattcccgagttccaacttctgacagaagttaggtgcagtaggtgtttgtttggtcattgcgagaagtatgaataagcaattgagaaaaaaattaaactatgtaaaatggcatgaggaactttccttcaggtattagtcgaaatatcgttgcagtgtcaatgttatgtgaaatgtttatagcatatcacaagaagcactccaacactaaaattatc

SEQ ID NO: 53829 - DNA, 2777 bp, Zea Mays
gtgctgtaggaggttgagatgtctgctgtctcgcaagctgctgcctgcctcttatttatttgttctcttctaaaagcagggcacaagtttgccaaaccatttgttcattggaaccgcctgcattgcatacaagctgccttccttgtctaaccagctcttagacaacaagattctgcttccagaccaggatactacgcccgtttctgtctgtgtgcctccgttcaatgcacacgcttcatttggtttctgtcacttgttcatcacgctctaccgtctctagcgccatctccgtactagttttgatgactggacttatttgatgctcttgccgttctcgacttggggcgcgagccgatggatctcctccggatgaaacttctcctgccctccttcatcagctgccttcttctgatgcaggcagcactatgtgatggcgccgccgccaccaccaccaccaccggcgaaaacggaacggcaaactggacatgtgtgtgcgcagctcatcctctcggtgaaccagactccaacagcagcttgctgtccaattgctcttcctcctgccattgccaccgagcagatgagaacggcggcggcggcggcggcggcgcaggctcgtggaactgcacgtgtgcctctggtgatgagggccttcagaaggaagagcatgctgagctacgtgacgggagctgtttcacttcctgcaactgcacgtcgggtactggaacttcagaggaagggagaaagcgtgtctcaagcaaaacagtcatagctacgctcctggtctgcgtggttctcaccaccaccgctttcctcgtcaccaccgtatactacttccgccgcaaggacgccctctctccgcgatcgcagatatactccttcgatagatacactactagctggagcagcaggtcgaacctcgtcagcagtcgatcgtctccgcttccccagatgaaacccaaaccaaagcttggtggtctgaaagagtttctgtgcagctgcaatcttgtcatctgtgggggagagagcggcgcattccccggtgtcgtcgcccggttctcgtacgcagagctggagcaagcgaccgggagattctcggacgaccaccttatcggagtcggtgggtcaagcaaggtgtaccgcggccagctcggcgatggcagagtcgttgccgtgaagaagcttaggccgctaggaggcacggacgaagacttggagttcctgtcagagatcgagctgctgtcgaggctgaaccactgccacgtggtgccgttgctggggtactgctcggagagccagggccggcagctggagcggctgctggtgttcgagtgcatggccaacggcaacctgagggactgcctagacctgaagcgagggaggaagcccatggactggcagacgcgggtgagcgtcgcgctcggcgccgcgagggggctggagtacctgcacgaggcggcggcgccgcgcatcctccaccgcgacatcaagtccaccaacatcctcctggacgacaagttcagagccaagatcactgacctcggcatggccaagtgcctgatgaacgacggcgtgaccagctgctcgagctccccggcgcggatgctgggcacgttcggctacttcgcaccggagtacgccatcgtgggcaaggcgtcgctcaagtccgacgtcttcagcttcggcgtcgttgtgctggagctcatcaccggccggcagcccatccacaagtcgtcgtcgacgagggccgacgagagcctcgtactctgggcgacgtcgcggctgcgggacagcgggctggtggtcacggagctgccggacccgacgctgcagggcaagttcccggcggaggagatgcagatcatggcgcacctggcgcgggagtgcctgcagtgggaccccgaggccaggcccaccatgacggaggtcgtgcacatcctcgccaccatcgcaccactccagcacggcgccaagcgtcggaaccttcccatcgccaccgccttcaacctcacgccatcgccgcacgtcgggcggtgtgacccggagcctaaagacgacgacatcgagaggcagatgcagcagcaggagtgctcgccgacgacggctgtccagtggcaacaacaacaagcgcgctgcacccacgcgccaacgggccgcgcgtcgtggcccggcgacagggggaacgttgtgagcagaggcgcggcggtgtcgggcgagctggtgaacgggacggtgctgatgaacccccacgggcggggcagctggcggcggccgccgccgcttggcgacgaggaggcagtggacgtggatctgacggagccccggatggaggcgttcacgcagccggcggcgtttcagcctttcaggtgacggaaggattaggatcaggtggtggtggttctgattggtgcggcggcggcgggtgctgctgtacatcttcttgttcgtgcctccacgatccacaccaggatcatctgcttctgcatctgcgttcatgaatgtacagtacaggcaaatacatctagattggcaacgggaaaagaaaagaaaggcatcgagatcgttatgggatataggacctagattgaacacgagatcaatgcatgaatctgaatccacggcgcgcgtcattggacacatcactgttgtacacaagcaaacagacaatgagtgttcacagaagcaaaaaatataagaccgagttcaatgcatgaatctcaaaagcagctcttttcagctttgtgcttcgtggtcttcgggtcgttagaatatacgtgtcc

SEQ ID NO: 53830 - DNA, 2551 bp, Zea Mays
cttccttccagcttccacacgcaaaggcaaagctcagtactctacctgcttcgcatctcagcagcagtgctgtcagatgactggacttatttgatgctcttgccgttctcgacttggggcgcgagccgatggatctcctccggatgaaacttctcctgccctccttcatcagctgccttcttctgatgcaggcagcactatgtgatggcgccgccgccaccaccaccaccaccggcgaaaacggaacggcaaactggacatgtgtgtgcgcagctcatcctctcggtgaaccagactccaacagcagcttgctgtccaattgctcttcctcctgccattgccaccgagcagatgagaacggcggcggcggcggcggcggcgcaggctcgtggaactgcacgtgtgcctctggtgatgagggccttcagaaggaagagcatgctgagctacgtgacgggagctgtttcacttcctgcaactgcacgtcgggtactggaacttcagaggaagggagaaagcgtgtctcaagcaaaacagtcatagctacgctcctggtctgcgtggttctcaccaccaccgctttcctcgtcaccaccgtatactacttccgccgcaaggacgccctctctccgcgatcgcagatatactccttcgatagatacactactagctggagcagcaggtcgaacctcgtcagcagtcgatcgtctccgcttccccagatgaaacccaaaccaaagcttggtggtctgaaagagtttctgtgcagctgcaatcttgtcatctgtgggggagagagcggcgcattccccggtgtcgtcgcccggttctcgtacgcagagctggagcaagcgaccgggagattctcggacgaccaccttatcggagtcggtgggtcaagcaaggtgtaccgcggccagctcggcgatggcagagtcgttgccgtgaagaagcttaggccgctaggaggcacggacgaagacttggagttcctgtcagagatcgagctgctgtcgaggctgaaccactgccacgtggtgccgttgctggggtactgctcggagagccagggccggcagctggagcggctgctggtgttcgagtgcatggccaacggcaacctgagggactgcctagacctgaagcgagggaggaagcccatggactggcagacgcgggtgagcgtcgcgctcggcgccgcgagggggctggagtacctgcacgaggcggcggcgccgcgcatcctccaccgcgacatcaagtccaccaacatcctcctggacgacaagttcagagccaagatcactgacctcggcatggccaagtgcctgatgaacgacggcgtgaccagctgctcgagctccccggcgcggatgctgggcacgttcggctacttcgcaccggagtacgccatcgtgggcaaggcgtcgctcaagtccgacgtcttcagcttcggcgtcgttgtgctggagctcatcaccggccggcagcccatccacaagtcgtcgtcgacgagggccgacgagagcctcgtactctgggcgacgtcgcggctgcgggacagcgggctggtggtcacggagctgccggacccgacgctgcagggcaagttcccggcggaggagatgcagatcatggcgcacctggcgcgggagtgcctgcagtgggaccccgaggccaggcccaccatgacggaggtcgtgcacatcctcgccaccatcgcaccactccagcacggcgccaagcgtcggaaccttcccatcgccaccgccttcaacctcacgccatcgccgcacgtcgggcggtgtgacccggagcctaaagacgacgacatcgagaggcagatgcagcagcaggagtgctcgccgacgacggctgtccagtggcaacaacaacaagcgcgctgcacccacgcgccaacgggccgcgcgtcgtggcccggcgacagggggaacgttgtgagcagaggcgcggcggtgtcgggcgagctggtgaacgggacggtgctgatgaacccccacgggcggggcagctggcggcggccgccgccgcttggcgacgaggaggcagtggacgtggatctgacggagccccggatggaggcgttcacgcagccggcggcgtttcagcctttcaggtgacggaaggattaggatcaggtggtggtggttctgattggtgcggcggcggcgggtgctgctgtacatcttcttgttcgtgcctccacgatccacaccaggatcatctgcttctgcatctgcgttcatgaatgtacagtacaggcaaatacatctagattggcaacgggaaaagaaaagaaaggcatcgagatcgttatgggatataggacctagattgaacacgagatcaatgcatgaatctgaatccacggcgcgcgtcattggacacatcactgttgtacacaagcaaacagacaatgagtgttcacagaagcaaaaaatataagaccgagttcaatgcatgaatctcaaaagcagctcttttcagctttgtgcttcgtggtcttcgggtcgttagaatatacgtgtcc

SEQ ID NO: 53831 - DNA, 2646 bp, Zea Mays
gccaccgcacctcacctccttgcattgtgctagcagtactcggatccacgaccttctccctccctccgctgctgctccgtcaaggaagggaggaaagaaagggcaggggaatggaggtggaggaagacggccgagccgcccgagtgctgctgagctcccagtgtctctgtctctgatgagatgactggacttatttgatgctcttgccgttctcgacttggggcgcgagccgatggatctcctccggatgaaacttctcctgccctccttcatcagctgccttcttctgatgcaggcagcactatgtgatggcgccgccgccaccaccaccaccaccggcgaaaacggaacggcaaactggacatgtgtgtgcgcagctcatcctctcggtgaaccagactccaacagcagcttgctgtccaattgctcttcctcctgccattgccaccgagatgagaacggcggcggcggcggcggcggcgcaggctcgtggaactgcacgtgtgcctctggtgatgagggccttcagaaggaagagcatgctgagctacgtgacgggagctgtttcacttcctgcaactgcacgtcgggaacttcagaggaagggagaaagcgtgtctcaagcaaaacagtcatagctacgctcctggtctgcgtggttctcaccaccaccgctttcctcgtcaccaccgtatactacttccgccgcaaggacgccctctctccgcgatcgcagatatactccttcgatagatacactactagctggagcagcaggtcgaacctcgtcagcagtcgatcgtctccgcttccccagatgaaacccaaaccaaagcttggtggtctgaaagagtttctgtgcagctgcaatcttgtcatctgtgggggagagagcggcgcattccccggtgtcgtcgcccggttctcgtacgcagagctggagcaagcgaccgggagattctcggacgaccaccttatcggagtcggtgggtcaagcaaggtgtaccgcggccagctcggcgatggcagagtcgttgccgtgaagaagcttaggccgctaggaggcacggacgaagacttggagttcctgtcagagatcgagctgctgtcgaggctgaaccactgccacgtggtgccgttgctggggtactgctcggagagccagggccggcagctggagcggctgctggtgttcgagtgcatggccaacggcaacctgagggactgcctagacctgaagcgagggaggaagcccatggactggcagacgcgggtgagcgtcgcgctcggcgccgcgagggggctggagtacctgcacgaggcggcggcgccgcgcatcctccaccgcgacatcaagtccaccaacatcctcctggacgacaagttcagagccaagatcactgacctcggcatggccaagtgcctgatgaacgacggcgtgaccagctgctcgagctccccggcgcggatgctgggcacgttcggctacttcgcaccggagtacgccatcgtgggcaaggcgtcgctcaagtccgacgtcttcagcttcggcgtcgttgtgctggagctcatcaccggccggcagcccatccacaagtcgtcgtcgacgagggccgacgagagcctcgtactctgggcgacgtcgcggctgcgggacagcgggctggtggtcacggagctgccggacccgacgctgcagggcaagttcccggcggaggagatgcagatcatggcgcacctggcgcgggagtgcctgcagtgggaccccgaggccaggcccaccatgacggaggtcgtgcacatcctcgccaccatcgcaccactccagcacggcgccaagcgtcggaaccttcccatcgccaccgccttcaacctcacgccatcgccgcacgtcgggcggtgtgacccggagcctaaagacgacgacatcgagaggcagatgcagcagcaggagtgctcgccgacgacggctgtccagtggcaacaacaacaagcgcgctgcacccacgcgccaacgggccgcgcgtcgtggcccggcgacagggggaacgttgtgagcagaggcgcggcggtgtcgggcgagctggtgaacgggacggtgctgatgaacccccacgggcggggcagctggcggcggccgccgccgcttggcgacgaggaggcagtggacgtggatctgacggagccccggatggaggcgttcacgcagccggcggcgtttcagcctttcaggtgacggaaggattaggatcaggtggtggtggttctgattggtgcggcggcggcgggtgctgctgtacatcttcttgttcgtgcctccacgatccacaccaggatcatctgcttctgcatctgcgttcatgaatgtacagtacaggcaaatacatctagattggcaacgggaaaagaaaagaaaggcatcgagatcgttatgggatataggacctagattgaacacgagatcaatgcatgaatctgaatccacggcgcgcgtcattggacacatcactgttgtacacaagcaaacagacaatgagtgttcacagaagcaaaaaatataagaccgagttcaatgcatgaatctcaaaagcagctcttttcagctttgtgcttcgtggtcttcgggtcgttagaatatacgtgtcc

SEQ ID NO: 53832 - DNA, 5423 bp, Zea Mays
atgtccaacacttcaggaggatcattgatggacggagcagctggaggcaacctggcaagcaggaatgacagccagggcgtcattagtagctctcactcagggtcagaccacgtgaccaaagtgccgagcgtgaggaggcggacacatcctcccatgaggttggggagtgaggtgccagagccatccccgaagatgcggaaggtggtaaatgaggaggatacaccttgtggagcttcaaatacgggcaagatcagtgcttcaccttctgcggtgtcgagagatcccaacggaacttctacctccgaagaccatgctggagggcattcaagtgagtatgccacagttgggaatgctaggggctcaccaattaaacgaagatgtatgcagacaagtcactacttgggactatttacacccctaaaagggaaacacacagatgaagttgctaaatccaagcaatcaactgtttccacaaaaacaaagaagtttaaggaaattcaatttcagaaacttcagagattgccagatgggtgccatcctgattttgataatgatcatctgtgttctgtaaataatcatgacctgcttcctgaaatgagtactccaagtgctgaccttcatctacttactgagacaggagtggaaaacatgaggacacctaaaagtcttcacgctgaacttaagcgtgagctgtcaaagctaaatacggtgttaaagctaccagataatgtactctttctggccaaccagttccttgaatatcttttaaataatcatttagttgtgcgggagccacggagcatactgcatgcgttcaacatagccttgtgttggcgtgctgcttcttttctgaaatacactgagttggatcatcgagaatcacttgcccttgcttcagatggattgaattatgaatgcaatgaggagctcgcagaacttttctataaaaaaataggcatcctaaaagaaaaggttgcacataaaccaggtggaataatcaatggtagattatcaccacatgagagctcatctgctaacttgagaagtgaccacagtttccggaagcaggcaatggatcttcatggtaacttcacaaaaggcactgaagatagcccatctgccactgatcagatggtgatggtttcagatgaacaagaattgctatctgctccagatgctggtagagaacatctcttaagtgaagaatcttctagtagtgctgcaatgaaaagaatagatttatttaacagcatatttttctcaagagagagggatatcattgagaagcaacaacttgagatattaaatttaagaacactgagagacaatcaagttaagaaactgaaagaggtatgccatgcagttgttcaacacattcggataagtaacattgacgaagagatggaaattgaccaaataaagttagtaattcagtggttcactatgtttatgcattctttcttggcgcacatcaggctccagtttttcaaacttgatgcactgcattctacaacactggctgaagaggaactgatgaaggaaaaactcaaacaggaagtagtatcaggtgaattagaccaatttcctgatcattgcgttactctaccagattccaattctgtcattgaggaatttatccattttaagaaacaaaatgatgatagtcatgttgaccaaaaaatggctttggatggtgaccagcttatggatgacagaccgatggaaattactattttacgcagtttgttttcaccagaggcttgttctacacttgcagtgagaaatgagcctacagaagctcatttgaggtctggtgggagagcatcatcagaatatgtagatcttccagataacaataatcactgtatttctgttggaattgactaccaaggaggttgttctgctagttctattcctacaagtcatggttcaatcaatcagggaagtgcaacttctcttgtggtaatcaatgcagaaaatgatagtactgttgcagcagatccagaccacttggaatcacatattttggcttctgtcacgaccttgcagcatccaacatcagaagaaccgtctgatacattacatgcaatggcagttcaggatctgcaaactgagatgcaaacaacatgcccaacattgggtgctcaacatcagaaggtgtgccctgatgattctagtaaaatgaaccatgaaccagatacaacaactggaatgttgcaggaagggacaacttctgaccatttaggtgattccagtaaggtgaacgttgaaccagatataacaactggaatgtctcaggaagggaaaacttctgaccatttagatgattccagcactggagttaaagaaaaaaatattgacactgtcattgcagatccattgaattcagaaaatcaatcttatattgctatgccagaagcttgggtagctgaaattcagagtgatcagtcaagtatgcctgcacaacatagtacaagtcttcctactcagcggaagttaccagttttgggacatccaccagaagaagcaaatccatcaagtaatttggacacagaggctgcccagaagccagatattcaaccatcaagctcaacgttggatgctgacagctctgaaacaaggcatcagccagaaactacaacagttctgtcacaggtaggcagtaaaaatcacgatgttggcacttttcacgcacaaaaagcccaatcagactcaccaattttggctgccccacaaagcacagctatgttgtcacttcctttggaggctggaactcctgctaatgtatcaagtacgtcttccctgcaaagtaacggtgtatcttcaaggcacacacctgctgtttcagaatcatcaggtatgttgggcactcagccagaacaggatttgcatcatgacctggggccatccatgtcattgttgggtgttccacttcaaagaatgctcccagatgacaggagccaaacagtctgtcagccagatagaggaactgatttgtcagggaaaggcgaaactgaatatctagcttgtaccaccagcgatctgtccacccttccactttctggtgaagctgaaactgagaatggtcaagcaagtatgcctgcacaggaaatcacaagtccccatgcccaacatagtttagctttagcaacttcacagcatccagttggtgatttgcagccaccgacgttgattctgtctgaggaaacagaaagggctggtctcttgtgcacctcagcatctcaggatttgcaactgtcaatgataacacaggaggatgttccacttgaaagaactgatctgtcgggcatgcctgtgacacaaagtacaactgttctgcagagtgtggaaccttcatgtgatccacatgcagaagaggcaggtacttggggtatgttgtcagctccagatttgcagtccagaatgcagtcatcatctcaattgcaggatcaaattgcggaagcagaaggagcaggcatttttggcaccattccagctcagaacttgcagcctgaaacgtggtcatcaacctcagctcagcatatctcaccattgaggacacaccctgatgagagaattcaaataggtcttcagccaaatacgacaccggttcctgagctgctaggccaactatctacattgacacctgcaggtctattgtctagtaacgaaccactaatgaatgagcttgaaaaactgaaatactgcaacgccgtgctctgtaaaaaccatgaacagaagaaatcacaacttcaaacagagtgcaaccaagaaatagagaaggtaaaggagaagtatgagttgttacgtcaagaggaagattctgtgtatcatcgattgaccacagaccttaaccgtatctacacgaaagttcttgtaaatcaatcactagctgaattctttaaagcatctctagttcaagagagatctgcaaggcccacaatttggcaggcaccccagtcctctcagcatgctccgtgtgggacaacagcagctcaagccacactattaccggttgcctcatctttagccactcgaccaacagttttgatgtcatatcatacaacaggacctcacctcccaccttcacaggtggctcggccaccggcttctggggctatccaactgcaacctgttttacctggaaaccattccagagcagcaccatcacctgttggttcaatgcatccacgacatggaatctacagagctgttggagcacaatcacgtgggcctgctcctcatctccagcaactcaggatgccagcaccgtttgcaatggttcacagagatggacagcatccacccagtatcatgaatcccggggttataccatcgagacagtctgtccatggtaattttgaaagctctgcttctggcaatgcactggcaggtatctcatttgcatccatggcaccaagttcaggtcaccaggcgatgtcgtccacatcagactcacatccagttttcccagcatcctcgcttctaccaggttcaggtccagggtcgatgacaaactttgtgcggtcaagtaccagaatccctgttgtcatggcgagcgaacaagcaccacgcctgaatccatatgttcaccacatcggaggtggtccactgaacgctgcaccagcaggaattcagcaagctagagctcatataggacgcactcctcaggctgcctcagatcagagtcaggacgtgctgcatcgcctactactacagttgcccgaagtcatggcgccaagcttagctcagccaaccgcatcaagctcacacccggctcccatggcagcccggcagcaagcagggctactgaatccagctcctgacaacgtggcatgtccactgaacgcagtggctggagttgggcgccccggagcccgcataggcagccagtcgtaccaggtatcggcttcgttgctcgagtgggaggcgacgctcagggttggcctgattcgtggacaccaaggcacgtaccccttgggacagggatgttctgacctggctggaggaccccccggcacatccgctgcccagggatgcggctccggcgccagcagagaggtggtgtgcctatctgatgacgaggagtagcatagcgtagagagtagtagttttttttttgggctgggctggtctgtgcaacgtagatgtgcatgggttggataggcaacagtagagcggcacgatatcgtcgcccccttttagcagcagcggcatccttggaagcaggagatgtctggctctgatgagggtagtatgtcgtatttttggggggtgggggactggtggcgtggcgtggcggcagcagcatattagtgaatagtgatagcatatgaaccctaattctgatatatagtcttgtcgtttcatagcctggtggtgattgtttggtgtggggctggaatgatcatatattattatta

SEQ ID NO: 53833 - DNA, 5422 bp, Zea Mays
ctccacctcgcctacgcgtcgtctgcccaagctcgccggcgcccgagctcgtcacgcgcgtaaccctactgccgccacctccgccacattccccgtcgcacactccctcgcccggccaccggagaatgtccaacacttcaggaggatcattgatggacggagcagctggaggcaacctggcaagcaggaatgacagccagggcgtcattagtagctctcactcagggtcagaccacgtgaccaaagtgccgagcgtgaggaggcggacacatcctcccatgaggttggggagtgaggtgccagagccatccccgaagatgcggaaggtggtaaatgaggaggatacaccttgtggagcttcaaatacgggcaagatcagtgcttcaccttctgcggtgtcgagagatcccaacggaacttctacctccgaagaccatgctggagggcattcaagtgagtatgccacagttgggaatgctaggggctcaccaattaaacgaagatgtatgcagacaagtcactacttgggactatttacacccctaaaagggaaacacacagatgaagttgctaaatccaagcaatcaactgtttccacaaaaacaaagaagtttaaggaaattcaatttcagaaacttcagagattgccagatgggtgccatcctgattttgataatgatcatctgtgttctgtaaataatcatgacctgcttcctgaaatgagtactccaagtgctgaccttcatctacttactgagacaggagtggaaaacatgaggacacctaaaagtcttcacgctgaacttaagcgtgagctgtcaaagctaaatacggtgttaaagctaccagataatgtactctttctggccaaccagttccttgaatatcttttaaataatcatttagttgtgcgggagccacggagcatactgcatgcgttcaacatagccttgtgttggcgtgctgcttcttttctgaaatacactgagttggatcatcgagaatcacttgcccttgcttcagatggattgaattatgaatgcaatgaggagctcgcagaacttttctataaaaaaataggcatcctaaaagaaaaggttgcacataaaccaggtggaataatcaatggtagattatcaccacatgagagctcatctgctaacttgagaagtgaccacagtttccggaagcaggcaatggatcttcatggtaacttcacaaaaggcactgaagatagcccatctgccactgatcagatggtgatggtttcagatgaacaagaattgctatctgctccagatgctggtagagaacatctcttaagtgaagaatcttctagtagtgctgcaatgaaaagaatagatttatttaacagcatatttttctcaagagagagggatatcattgagaagcaacaacttgagatattaaatttaagaacactgagagacaatcaagttaagaaactgaaagaggctccagtttttcaaacttgatgcactgcattctacaacactggctgaagaggaactgatgaaggaaaaactcaaacaggaagtagtatcaggtgaattagaccaatttcctgatcattgcgttactctaccagattccaattctgtcattgaggaatttatccattttaagaaacaaaatgatgatagtcatgttgaccaaaaaatggctttggatggtgaccagcttatggatgacagaccgatggaaattactattttacgcagtttgttttcaccagaggcttgttctacacttgcagtgagaaatgagcctacagaagctcatttgaggtctggtgggagagcatcatcagaatatgtagatcttccagataacaataatcactgtatttctgttggaattgactaccaaggaggttgttctgctagttctattcctacaagtcatggttcaatcaatcaggaagtgcaacttctcttgtggtaatcaatgcagaaaatgatagtactgttgcagcagatccagaccacttggaatcacatattttggcttctgtcacgaccttgcagcatccaacatcagaagaaccgtctgatacattacatgcaatggcagttcaggatctgcaaactgagatgcaaacaacatgcccaacattgggtgctcaacatcagaaggtgtgccctgatgattctagtaaaatgaaccatgaaccagatacaacaactggaatgttgcaggaagggacaacttctgaccatttaggtgattccagtaaggtgaacgttgaaccagatataacaactggaatgtctcaggaagggaaaacttctgaccatttagatgattccagcactggagttaaagaaaaaaatattgacactgtcattgcagatccattgaattcagaaaatcaatcttatattgctatgccagaagcttgggtagctgaaattcagagtgatcagtcaagtatgcctgcacaacatagtacaagtcttcctactcagcggaagttaccagttttgggacatccaccagaagaagcaaatccatcaagtaatttggacacagaggctgcccagaagccagatattcaaccatcaagctcaacgttggatgctgacagctctgaaacaaggcatcagccagaaactacaacagttctgtcacaggtaggcagtaaaaatcacgatgttggcacttttcacgcacaaaaagcccaatcagactcaccaattttggctgccccacaaagcacagctatgttgtcacttcctttggaggctggaactcctgctaatgtatcaagtacgtcttccctgcaaagtaacggtgtatcttcaaggcacacacctgctgtttcagaatcatcaggtatgttgggcactcagccagaacaggatttgcatcatgacctggggccatccatgtcattgttgggtgttccacttcaaagaatgctcccagatgacaggagccaaacagtctgtcagccagatagaggaactgatttgtcagggaaaggcgaaactgaatatctagcttgtaccaccagcgatctgtccacccttccactttctggtgaagctgaaactgagaatggtcaagcaagtatgcctgcacaggaaatcacaagtccccatgcccaacatagtttagctttagcaacttcacagcatccagttggtgatttgcagccaccgacgttgattctgtctgaggaaacagaaagggctggtctcttgtgcacctcagcatctcaggatttgcaactgtcaatgataacacaggaggatgttccacttgaaagaactgatctgtcgggcatgcctgtgacacaaagtacaactgttctgcagagtgtggaaccttcatgtgatccacatgcagaagaggcaggtacttggggtatgttgtcagctccagatttgcagtccagaatgcagtcatcatctcaattgcaggatcaaattgcggaagcagaaggagcaggcatttttggcaccattccagctcagaacttgcagcctgaaacgtggtcatcaacctcagctcagcatatctcaccattgaggacacaccctgatgagagaattcaaataggtcttcagccaaatacgacaccggttcctgagctgctaggccaactatctacattgacacctgcaggtctattgtctagtaacgaaccactaatgaatgagcttgaaaaactgaaatactgcaacgccgtgctctgtaaaaaccatgaacagaagaaatcacaacttcaaacagagtgcaaccaagaaatagagaaggtaaaggagaagtatgagttgttacgtcaagaggaagattctgtgtatcatcgattgaccacagaccttaaccgtatctacacgaaagttcttgtaaatcaatcactagctgaattctttaaagcatctctagttcaagagagatctgcaaggcccacaatttggcaggcaccccagtcctctcagcatgctccgtgtgggacaacagcagctcaagccacactattaccggttgcctcatctttagccactcgaccaacagttttgatgtcatatcatacaacaggacctcacctcccaccttcacaggtggctcggccaccggcttctggggctatccaactgcaacctgttttacctggaaaccattccagagcagcaccatcacctgttggttcaatgcatccacgacatggaatctacagagctgttggagcacaatcacgtgggcctgctcctcatctccagcaactcaggatgccagcaccgtttgcaatggttcacagagatggacagcatccacccagtatcatgaatcccggggttataccatcgagacagtctgtccatggtaattttgaaagctctgcttctggcaatgcactggcaggtatctcatttgcatccatggcaccaagttcaggtcaccaggcgatgtcgtccacatcagactcacatccagttttcccagcatcctcgcttctaccaggttcaggtccagggtcgatgacaaactttgtgcggtcaagtaccagaatccctgttgtcatggcgagcgaacaagcaccacgcctgaatccatatgttcaccacatcggaggtggtccactgaacgctgcaccagcaggaattcagcaagctagagctcatataggacgcactcctcaggctgcctcagatcagagtcaggacgtgctgcatcgcctactactacagttgcccgaagtcatggcgccaagcttagctcagccaaccgcatcaagctcacacccggctcccatggcagcccggcagcaagcagggctactgaatccagctcctgacaacgtggcatgtccactgaacgcagtggctggagttgggcgccccggagcccgcataggcagccagtcgtaccaggtatcggcttcgttgctcgagtgggaggcgacgctcagggttggcctgattcgtggacaccaaggcacgtaccccttgggacagggatgttctgacctggctggaggaccccccggcacatccgctgcccagggatgcggctccggcgccagcagagaggtggtgtgcctatctgatgacgaggagtagcatagcgtagagagtagtagttttttttttgggctgggctggtctgtgcaacgtagatgtgcatgggttggataggcaacagtagagcggcacgatatcgtcgcccccttttagcagcagcggcatccttggaagcaggagatgtctggctctgatgagggtagtatgtcgtatttttggggggtgggggactggtggcgtggcgtggcggcagcagcatattagtgaatagtgatagcatatgaaccctaattctgatatatagtcttgtcgtttcatagcctggtggtgattgtttggtgtggggctggaatgatcatatattattatta

SEQ ID NO: 53834 - DNA, 5683 bp, Zea Mays
cgacggagtgcaggtgggaagaggaggaccagaggagggctacgccaccgccaaccgtccctccacctcgcctacgcgtcgtctgcccaagctcgccggcgcccgagctcgtcacgcgcgtaaccctactgccgccacctccgccacattccccgtcgcacactccctcgcccggccaccggagaatgtccaacacttcaggaggatcattgatggacggagcagctggaggcaacctggcaagcaggaatgacagccagggcgtcattagtagctctcactcagggtcagaccacgtgaccaaagtgccgagcgtgaggaggcggacacatcctcccatgaggttggggagtgaggtgccagagccatccccgaagatgcggaaggtggtaaatgaggaggatacaccttgtggagcttcaaatacgggcaagatcagtgcttcaccttctgcggtgtcgagagatcccaacggaacttctacctccgaagaccatgctggagggcattcaagtgagtatgccacagttgggaatgctaggggctcaccaattaaacgaagatgtatgcagacaagtcactacttgggactatttacacccctaaaagggaaacacacagatgaagttgctaaatccaagcaatcaactgtttccacaaaaacaaagaagtttaaggaaattcaatttcagaaacttcagagattgccagatgggtgccatcctgattttgataatgatcatctgtgttctgtaaataatcatgacctgcttcctgaaatgagtactccaagtgctgaccttcatctacttactgagacaggagtggaaaacatgaggacacctaaaagtcttcacgctgaacttaagcgtgagctgtcaaagctaaatacggtgttaaagctaccagataatgtactctttctggccaaccagttccttgaatatcttttaaataatcatttagttgtgcgggagccacggagcatactgcatgcgttcaacatagccttgtgttggcgtgctgcttcttttctgaaatacactgagttggatcatcgagaatcacttgcccttgcttcagatggattgaattatgaatgcaatgaggagctcgcagaacttttctataaaaaaataggcatcctaaaagaaaaggttgcacataaaccaggtggaataatcaatggtagattatcaccacatgagagctcatctgctaacttgagaagtgaccacagtttccggaagcaggcaatggatcttcatggtaacttcacaaaaggcactgaagatagcccatctgccactgatcagatggtgatggtttcagatgaacaagaattgctatctgctccagatgctggtagagaacatctcttaagtgaagaatcttctagtagtgctgcaatgaaaagaatagatttatttaacagcatatttttctcaagagagagggatatcattgagaagcaacaacttgagatattaaatttaagaacactgagagacaatcaagttaagaaactgaaagaggtatgccatgcagttgttcaacacattcggataagtaacattgacgaagagatggaaattgaccaaataaagttagtaattcagtggttcactatgtttatgcattctttcttggcgcacatcaggctccagtttttcaaacttgatgcactgcattctacaacactggctgaagaggaactgatgaaggaaaaactcaaacaggaagtagtatcaggtgaattagaccaatttcctgatcattgcgttactctaccagattccaattctgtcattgaggaatttatccattttaagaaacaaaatgatgatagtcatgttgaccaaaaaatggctttggatggtgaccagcttatggatgacagaccgatggaaattactattttacgcagtttgttttcaccagaggcttgttctacacttgcagtgagaaatgagcctacagaagctcatttgaggtctggtgggagagcatcatcagaatatgtagatcttccagataacaataatcactgtatttctgttggaattgactaccaaggaggttgttctgctagttctattcctacaagtcatggttcaatcaatcaggaattttcgactggtgatgacagaaatattgaacatgccaagggtgacattattgctaatccaagtatggttccaggaagtgcaacttctcttgtggtaatcaatgcagaaaatgatagtactgttgcagcagatccagaccacttggaatcacatattttggcttctgtcacgaccttgcagcatccaacatcagaagaaccgtctgatacattacatgcaatggcagttcaggatctgcaaactgagatgcaaacaacatgcccaacattgggtgctcaacatcagaaggtgtgccctgatgattctagtaaaatgaaccatgaaccagatacaacaactggaatgttgcaggaagggacaacttctgaccatttaggtgattccagtaaggtgaacgttgaaccagatataacaactggaatgtctcaggaagggaaaacttctgaccatttagatgattccagcactggagttaaagaaaaaaatattgacactgtcattgcagatccattgaattcagaaaatcaatcttatattgctatgccagaagcttgggtagctgaaattcagagtgatcagtcaagtatgcctgcacaacatagtacaagtcttcctactcagcggaagttaccagttttgggacatccaccagaagaagcaaatccatcaagtaatttggacacagaggctgcccagaagccagatattcaaccatcaagctcaacgttggatgctgacagctctgaaacaaggcatcagccagaaactacaacagttctgtcacaggtaggcagtaaaaatcacgatgttggcacttttcacgcacaaaaagcccaatcagactcaccaattttggctgccccacaaagcacagctatgttgtcacttcctttggaggctggaactcctgctaatgtatcaagtacgtcttccctgcaaagtaacggtgtatcttcaaggcacacacctgctgtttcagaatcatcaggtatgttgggcactcagccagaacaggatttgcatcatgacctggggccatccatgtcattgttgggtgttccacttcaaagaatgctcccagatgacaggagccaaacagtctgtcagccagatagaggaactgatttgtcagggaaaggcgaaactgaatatctagcttgtaccaccagcgatctgtccacccttccactttctggtgaagctgaaactgagaatggtcaagcaagtatgcctgcacaggaaatcacaagtccccatgcccaacatagtttagctttagcaacttcacagcatccagttggtgatttgcagccaccgacgttgattctgtctgaggaaacagaaagggctggtctcttgtgcacctcagcatctcaggatttgcaactgtcaatgataacacaggaggatgttccacttgaaagaactgatctgtcgggcatgcctgtgacacaaagtacaactgttctgcagagtgtggaaccttcatgtgatccacatgcagaagaggcaggtacttggggtatgttgtcagctccagatttgcagtccagaatgcagtcatcatctcaattgcaggatcaaattgcggaagcagaaggagcaggcatttttggcaccattccagctcagaacttgcagcctgaaacgtggtcatcaacctcagctcagcatatctcaccattgaggacacaccctgatgagagaattcaaataggtcttcagccaaatacgacaccggttcctgagctgctaggccaactatctacattgacacctgcaggtctattgtctagtaacgaaccactaatgaatgagcttgaaaaactgaaatactgcaacgccgtgctctgtaaaaaccatgaacagaagaaatcacaacttcaaacagagtgcaaccaagaaatagagaaggtaaaggagaagtatgagttgttacgtcaagaggaagattctgtgtatcatcgattgaccacagaccttaaccgtatctacacgaaagttcttgtaaatcaatcactagctgaattctttaaagcatctctagttcaagagagatctgcaaggcccacaatttggcaggcaccccagtcctctcagcatgctccgtgtgggacaacagcagctcaagccacactattaccggttgcctcatctttagccactcgaccaacagttttgatgtcatatcatacaacaggacctcacctcccaccttcacaggtggctcggccaccggcttctggggctatccaactgcaacctgttttacctggaaaccattccagagcagcaccatcacctgttggttcaatgcatccacgacatggaatctacagagctgttggagcacaatcacgtgggcctgctcctcatctccagcaactcaggatgccagcaccgtttgcaatggttcacagagatggacagcatccacccagtatcatgaatcccggggttataccatcgagacagtctgtccatggtaattttgaaagctctgcttctggcaatgcactggcaggtatctcatttgcatccatggcaccaagttcaggtcaccaggcgatgtcgtccacatcagactcacatccagttttcccagcatcctcgcttctaccaggttcaggtccagggtcgatgacaaactttgtgcggtcaagtaccagaatccctgttgtcatggcgagcgaacaagcaccacgcctgaatccatatgttcaccacatcggaggtggtccactgaacgctgcaccagcaggaattcagcaagctagagctcatataggacgcactcctcaggctgcctcagatcagagtcaggacgtgctgcatcgcctactactacagttgcccgaagtcatggcgccaagcttagctcagccaaccgcatcaagctcacacccggctcccatggcagcccggcagcaagcagggctactgaatccagctcctgacaacgtggcatgtccactgaacgcagtggctggagttgggcgccccggagcccgcataggcagccagtcgtaccaggtatcggcttcgttgctcgagtgggaggcgacgctcagggttggcctgattcgtggacaccaaggcacgtaccccttgggacagggatgttctgacctggctggaggaccccccggcacatccgctgcccagggatgcggctccggcgccagcagagaggtggtgtgcctatctgatgacgaggagtagcatagcgtagagagtagtagttttttttttgggctgggctggtctgtgcaacgtagatgtgcatgggttggataggcaacagtagagcggcacgatatcgtcgcccccttttagcagcagcggcatccttggaagcaggagatgtctggctctgatgagggtagtatgtcgtatttttggggggtgggggactggtggcgtggcgtggcggcagcagcatattagtgaatagtgatagcatatgaaccctaattctgatatatagtcttgtcgtttcatagcctggtggtgattgtttggtgtggggctggaatgatcatatattattatta

SEQ ID NO: 53835 - DNA, 5606 bp, Zea Mays
cgacggagtgcaggtgggaagaggaggaccagaggagggctacgccaccgccaaccgtccctccacctcgcctacgcgtcgtctgcccaagctcgccggcgcccgagctcgtcacgcgcgtaaccctactgccgccacctccgccacattccccgtcgcacactccctcgcccggccaccggaggcagaatgtccaacacttcaggaggatcattgatggacggagcagctggaggcaacctggcaagcaggaatgacagccagggcgtcattagtagctctcactcagggtcagaccacgtgaccaaagtgccgagcgtgaggaggcggacacatcctcccatgaggttggggagtgaggtgccagagccatccccgaagatgcggaaggtggtaaatgaggaggatacaccttgtggagcttcaaatacgggcaagatcagtgcttcaccttctgcggtgtcgagagatcccaacggaacttctacctccgaagaccatgctggagggcattcaagtgagtatgccacagttgggaatgctaggggctcaccaattaaacgaagatgtatgcagacaagtcactacttgggactatttacacccctaaaagggaaacacacagatgaagttgctaaatccaagcaatcaactgtttccacaaaaacaaagaagtttaaggaaattcaatttcagaaacttcagagattgccagatgggtgccatcctgattttgataatgatcatctgtgttctgtaaataatcatgacctgcttcctgaaatgagtactccaagtgctgaccttcatctacttactgagacaggagtggaaaacatgaggacacctaaaagtcttcacgctgaacttaagcgtgagctgtcaaagctaaatacggtgttaaagctaccagataatgtactctttctggccaaccagttccttgaatatcttttaaataatcatttagttgtgcgggagccacggagcatactgcatgcgttcaacatagccttgtgttggcgtgctgcttcttttctgaaatacactgagttggatcatcgagaatcacttgcccttgcttcagatggattgaattatgaatgcaatgaggagctcgcagaacttttctataaaaaaataggcatcctaaaagaaaaggttgcacataaaccaggtggaataatcaatggtagattatcaccacatgagagctcatctgctaacttgagaagtgaccacagtttccggaagcaggcaatggatcttcatggtaacttcacaaaaggcactgaagatagcccatctgccactgatcagatggtgatggtttcagatgaacaagaattgctatctgctccagatgctggtagagaacatctcttaagtgaagaatcttctagtagtgctgcaatgaaaagaatagatttatttaacagcatatttttctcaagagagagggatatcattgagaagcaacaacttgagatattaaatttaagaacactgagagacaatcaagttaagaaactgaaagaggtatgccatgcagttgttcaacacattcggataagtaacattgacgaagagatggaaattgaccaaataaagttagtaattcagtggttcactatgtttatgcattctttcttggcgcacatcaggctccagtttttcaaacttgatgcactgcattctacaacactggctgaagaggaactgatgaaggaaaaactcaaacaggaagtagtatcaggtgaattagaccaatttcctgatcattgcgttactctaccagattccaattctgtcattgaggaatttatccattttaagaaacaaaatgatgatagtcatgttgaccaaaaaatggctttggatggtgaccagcttatggatgacagaccgatggaaattactattttacgcagtttgttttcaccagaggcttgttctacacttgcagtgagaaatgagcctacagaagctcatttgaggtctggtgggagagcatcatcagaatatgtagatcttccagataacaataatcactgtatttctgttggaattgactaccaaggaggttgttctgctagttctattcctacaagtcatggttcaatcaatcaggaattttcgactggtgatgacagaaatattgaacatgccaagggtgacattattgctaatccaagtatggttccaggaagtgcaacttctcttgtggtaatcaatgcagaaaatgatagtactgttgcagcagatccagaccacttggaatcacatattttggcttctgtcacgaccttgcagcatccaacatcagaagaaccgtctgatacattacatgcaatggcagttcaggatctgcaaactgagatgcaaacaacatgcccaacattgggtgctcaacatcagaaggtgtgccctgatgattctagtaaaatgaaccatgaaccagatacaacaactggaatgttgcaggaagggacaacttctgaccatttaggtgattccagtaaggtgaacgttgaaccagatataacaactggaatgtctcaggaagggaaaacttctgaccatttagatgattccagcactggagttaaagaaaaaaatattgacactgtcattgcagatccattgaattcagaaaatcaatcttatattgctatgccagaagcttgggtagctgaaattcagagtgatcagtcaagtatgcctgcacaacatagtacaagtcttcctactcagcggaagttaccagttttgggacatccaccagaagaagcaaatccatcaagtaatttggacacagaggctgcccagaagccagatattcaaccatcaagctcaacgttggatgctgacagctctgaaacaaggcatcagccagaaactacaacagttctgtcacaggtaggcagtaaaaatcacgatgttggcacttttcacgcacaaaaagcccaatcagactcaccaattttggctgccccacaaagcacagctatgttgtcacttcctttggaggctggaactcctgctaatgtatcaagtacgtcttccctgcaaagtaacggtgtatcttcaaggcacacacctgctgtttcagaatcatcaggtatgttgggcactcagccagaacaggatttgcatcatgacctggggccatccatgtcattgttgggtgttccacttcaaagaatgctcccagatgacaggagccaaacagtctgtcagccagatagaggaactgatttgtcagggaaaggcgaaactgaatatctagcttgtaccaccagcgatctgtccacccttccactttctggtgaagctgaaactgagaatggtcaagcaagtatgcctgcacaggaaatcacaagtccccatgcccaacatagtttagctttagcaacttcacagcatccagttggtgatttgcagccaccgacgttgattctgtctgaggaaacagaaagggctggtctcttgtgcacctcagcatctcaggatttgcaactgtcaatgataacacaggaggatgttccacttgaaagaactgatctgtcgggcatgcctgtgacacaaagtacaactgttctgcagagtgtggaaccttcatgtgatccacatgcagaagaggcaggtacttggggtatgttgtcagctccagatttgcagtccagaatgcagtcatcatctcaattgcaggatcaaattgcggaagcagaaggagcaggcatttttggcaccattccagctcagaacttgcagcctgaaacgtggtcatcaacctcagctcagcatatctcaccattgaggacacaccctgatgagagaattcaaataggtcttcagccaaatacgacaccggttcctgagctgctaggccaactatctacattgacacctgcaggtctattgtctagtaacgaaccactaatgaatgagcttgaaaaactgaaatactgcaacgccgtgctctgtaaaaaccatgaacagaagaaatcacaacttcaaacagagtgcaaccaagaaatagagaaggtaaaggagaagtatgagttgttacgtcaagaggaagattctgtgtatcatcgattgaccacagaccttaaccgtatctacacgaaagttcttgtaaatcaatcactagctgaattctttaaagcatctctagttcaagagagatctgcaaggcccacaatttggcaggcaccccagtcctctcagcatgctccgtgtgggacaacagcagctcaagccacactattaccggttgcctcatctttagccactcgaccaacagttttgatgtcatatcatacaacaggacctcacctcccaccttcacaggtggctcggccaccggcttctggggctatccaactgcaacctgttttacctggaaaccattccagagcagcaccatcacctgttggttcaatgcatccacgacatggaatctacagagctgttggagcacaatcacgtgggcctgctcctcatctccagcaactcaggatgccagcaccgtttgcaatggttcacagagatggacagcatccacccagtatcatgaatcccggggttataccatcgagacagtctgtccatggtaattttgaaagctctgcttctggcaatgcactggcagcatcctcgcttctaccaggttcaggtccagggtcgatgacaaactttgtgcggtcaagtaccagaatccctgttgtcatggcgagcgaacaagcaccacgcctgaatccatatgttcaccacatcggaggtggtccactgaacgctgcaccagcaggaattcagcaagctagagctcatataggacgcactcctcaggctgcctcagatcagagtcaggacgtgctgcatcgcctactactacagttgcccgaagtcatggcgccaagcttagctcagccaaccgcatcaagctcacacccggctcccatggcagcccggcagcaagcagggctactgaatccagctcctgacaacgtggcatgtccactgaacgcagtggctggagttgggcgccccggagcccgcataggcagccagtcgtaccaggtatcggcttcgttgctcgagtgggaggcgacgctcagggttggcctgattcgtggacaccaaggcacgtaccccttgggacagggatgttctgacctggctggaggaccccccggcacatccgctgcccagggatgcggctccggcgccagcagagaggtggtgtgcctatctgatgacgaggagtagcatagcgtagagagtagtagttttttttttgggctgggctggtctgtgcaacgtagatgtgcatgggttggataggcaacagtagagcggcacgatatcgtcgcccccttttagcagcagcggcatccttggaagcaggagatgtctggctctgatgagggtagtatgtcgtatttttggggggtgggggactggtggcgtggcgtggcggcagcagcatattagtgaatagtgatagcatatgaaccctaattctgatatatagtcttgtcgtttcatagcctggtggtgattgtttggtgtggggctggaatgatcatatattattatta

SEQ ID NO: 53836 - DNA, 603 bp, Zea Mays
gcgtcgttctctcttcctggtccaagtgatcttgccaagttacgagcagcaagcagagatcagatcatccatcggcaatgtcgaacatcgggcagtccttccaggccggcaaggcggaggcccagggcgagtaccaggcggagcacgcggcgcagtgcgtcaaggacaccgccggagccgcggccgacagcgcgcagctgcagcagcaccgcgccaccggcaccgttgagcaggtggcgcagacgggccagggcgtggcggcaggcgtcaaggacacggtggcgggcgcggcggttggcgtcaccaacacggtggcgggcgtggcggcgggcgtcacgaacacggtgaccggcgcggtggcgggcgtcacgaacacggtgaccggcgcggcggcgggtgtcaaggacaccgtgaccggcggccactgatcgacgacccacccaagaatgctgcatgcatggccaagtgttgagggtttgagcccaaagatggcttgaatttccgtccttttttgctttattttttgacattattgttttaacatgtttcattcacccgtctctgattgggattgtgatcacgaccgcctgcaataaaaaaagg

SEQ ID NO: 53837 - DNA, 3748 bp, Zea Mays
ctacatcaaaatgttatgctatactttcttttatgtcaatcatatgtttcttttggcatccatttggtcccttgttcaccatacaagatttcggattttattatttaagtgtcagttttatgcaatccctttcccagtggcagcatacattgattgctctcccaatggtgaggattgtatctaagttcggtggaaacttctacatccaaaattgaatgacttctcagcaaagctattttgcctgcccaaccattccttgtcttgaagatatcgtatctttttagtcatattttgatttattgtgcatgtaatgcttatctatggattattgctatgatgactcctattagggtttagggttactgaagggattgtatcccatctgattataccaaaaccgaatatggtttttgagcaaatccagccatattgtcgaagaacccaactaatgatttactccattttgattaaccaaattgatgtaattatattcatcgcttccttagtggcagcaatattatagaatcagaatcgccttgtctatttcctagcacaatttcttcttctcttctgggtcatgcttgttctccttttgtcgtgatcttaaaatggtgcctctttttttattacatccaatctgaatgaggttctgagcaaaccaggtgttctcctcttttgatcggcaagcactgtactagctgagatctacatcaaaatgctatgttgtactttattttatgtcaatcatatgtttcttttggcatccacttggtcccttgttcccaaccatacaagatttcagattttattatttaagtgccagttttatgcaatccctttcccaaccatacattgattgctctcccagtggtgaggattgtatctaagttcggtggacttattttccttacttttacatccaaaattgaatgacttctcaacaaagctattttgcctgcccaaccattccttgtcttgaagatatctttttagtcatattttgatttattgtagatgtaatgcttatctatggatgagtgctataatggttcctattagggtttagggttaccgaagggattgcatcccatctgattataccaaaaccgaatattgtttctgagcaaatccatccatattgtcaaagaaccaaaccaatgatttactccattttgattaaccaaattgatgtaattatattcatcgctttcttggtggcaacattattatagaatcggaatcgccttgtctatttcctagcacaatttttttcttcttctcttttgggtcatgcttgttctccttttgccgtgatcttaaggggatgacttaaatgtgctccttctgattataccaaaactgaatctggttactgggcaaatccaccataccattgtagaactcagttacttagccaatgttttctctctctttgatcaacctgattgatgtagttacattcttcaatttctctatgccaacattattatggcatcaggattgccatatttgatttcctagaacagttgtcttcttctatgtcttttactctttttttggatcatccttgctctgtaagactatattttccatgatgactactattaagacggtatctaaaaggggtagcttttaattgtacctcttctgattgtaccgagactgaatcagtgttttcagaacgttcgattagtcgcgattaatcggctgataataactccagagccgagcaagggtaacgacgcgatcagggcgatcagatatctgatcgtccgattagttgaacgatcagcctggctggttggattgaaatttcggcccagtggcccagcccagcttcctttttcccattcccaccacgtgagcagaagctgcacaaccaagagccaacagagcaacgcccaggcacacacgacacgaaccaggcaaccagctgccgagggaggaccggaggaaccctagcggaacactgtgcaggtgacggcggcgcgctaccggtgacgggggatacggcggcatcgtccccctcggcccttcctccatccccggcgcggcggcgccagtagccggcctgcaggatgatcaatcaccacgaaatagtgcagtttgggaagctgtacaatagagacatggaatcagctcctgctcatacccctcttatacatggtcttcctgatgaggtagctctcatttgcttggcaagagttcctcggcggtatcataatattctcaggcgtgtctcaaggagatggagagctctgttatgcagtgaagaatggcacttgtgccgcaagaggaataacttggacgagccgtggatctatgtaatctgtagggaagcaggcatcaaatgctatgtgttggctccagatcctccaagccggtgctttcgaatcatgcatgtcattgaacccccatgctcagggaggaaaggtgttaccattgaagctttagacaaaaagctatttcttctgggtggctgcagttccgtgtatgatgctacggatgaagtatattgttatgacgcatcctcaaatcgctggagctcagctgctccaatgcctacagcaaggtgctattttgtgtctgcatcccttaaggagaagttgtacataactgatggatacggcttgacggacaagtcaccaaattcatgggacatctatgacccggccacggactcgtggtgcacccacaagaacccgttgctcacccctgacatagtgaaattcgtcgcattgggggaggagctggtgaccattcaccgagcggcgtggcacaggatgtactttgccggcgtatacgacccgctggaacgcacctggaggggcagagggaacgagatcgctctctgctactcgagcccgacggtggtcgtggacgggacgctgtacatgctggagcagtccatgggcacgaagctgatggtgtggcgggaggacgccaaggagtgggccatgctcggcaggctctccgacaaggtcactagacccccctgcgcgctcgtggccatcggcaggaagattcatgtggtcggaagagggctgagcatggtcaccgtggatgtggacacggcggcaagggtggacgggttcctggttaccacctctgtaggcccgttggtggaggaagacctgaccccggagaggtgcgtggtgatcaccatctgaaggggtgggcgtgtccaagcttccttgacgccgggtgtattgtggtaactgtgactgactatcgtcgctggcgccgaacatttggctagctagcgtggatgatatatactgcgatgtgagtgaattcaataagaggcttggctctccatacagccaataactatagttagcatttgtatctcgtgttgtttgggctgcttttgtcgactgctggctgtaagaacaatatttgagcttcgtttgttgagtactgtgcgtcccagatggatgggattaatacaagctaatgtgatcctcgtcctggcacttttgttattgtctatttgattgatcgatcaagcgttcgatttctgcagacatggatggcgatgtgcatcgacatttgagggtttcggttttttcttttactgtcggtgtaatggttttggatgctgtgcgtcggtagctttacgatttgtgttcgctacatgcgtaatgatctgattgagatgtgtggtgtactggtgtgtgtaaaataaagcaaaaagaaaaatatatattatcagaggcaggtttcgatcctgcgacctgtgggttat

SEQ ID NO: 53838 - DNA, 2502 bp, Zea Mays
catcctcctcagcaagcataaagaagatcgtccttcgcagtcgcagcaagcattccggctctgcatctggcccagctctgggttgcgcgaacagtcggaaccctaattccctccccggcgccggcgccggcgccccctagctgcgcccccacgaccagcagaatccagatcgaagttttgctcttgccgcggccccgcctaaactccaaaagtgcgaaccccctaactcatcgatcccagcctgcctccgcctacgcgcctcgtgacggcgtggacccctcccctatctgcgtgctgcgcgcatccgcctgcggcctgtcccgtgcagccgtgcctcctccgcgcacatctccagggtctagccgagagcagaccgccgtgacgccaccactcgcgctcgcgctcctgacatcgttgtctgccttctctgtctaagatcagagcagagctccatcgaaagcgtcgcccgcctgcttgagccgagcaagggtaacgacgcgatcagggcgatcagatatctgatcgtccgattagttgaacgatcagcctggctggttggattgaaatttcggcccagtggcccagcccagcttcctttttcccattcccaccacgtgagcagaagctgcacaaccaagagccaacagagcaacgcccaggcacacacgacacgaaccaggcaaccagctgccgagggaggaccggaggaaccctagcggaacactgtgcaggtgacggcggcgcgctaccggtgacgggggatacggcggcatcgtccccctcggcccttcctccatccccggcgcggcggcgccagtagccggcctgcaggatgatcaatcaccacgaaatagtgcagtttgggaagctgtacaatagagacatggaatcagctcctgctcatacccctcttatacatggtcttcctgatgaggtagctctcatttgcttggcaagagttcctcggcggtatcataatattctcaggcgtgtctcaaggagatggagagctctgttatgcagtgaagaatggcacttgtgccgcaagaggaataacttggacgagccgtggatctatgtaatctgtagggaagcaggcatcaaatgctatgtgttggctccagatcctccaagccggtgctttcgaatcatgcatgtcattgaacccccatgctcagggaggaaaggtgttaccattgaagctttagacaaaaagctatttcttctgggtggctgcagttccgtgtatgatgctacggatgaagtatattgttatgacgcatcctcaaatcgctggagctcagctgctccaatgcctacagcaaggtgctattttgtgtctgcatcccttaaggagaagttgtacataactgatggatacggcttgacggacaagtcaccaaattcatgggacatctatgacccggccacggactcgtggtgcacccacaagaacccgttgctcacccctgacatagtgaaattcgtcgcattgggggaggagctggtgaccattcaccgagcggcgtggcacaggatgtactttgccggcgtatacgacccgctggaacgcacctggaggggcagagggaacgagatcgctctctgctactcgagcccgacggtggtcgtggacgggacgctgtacatgctggagcagtccatgggcacgaagctgatggtgtggcgggaggacgccaaggagtgggccatgctcggcaggctctccgacaaggtcactagacccccctgcgcgctcgtggccatcggcaggaagattcatgtggtcggaagagggctgagcatggtcaccgtggatgtggacacggcggcaagggtggacgggttcctggttaccacctctgtaggcccgttggtggaggaagacctgaccccggagaggtgcgtggtgatcaccatctgaaggggtgggcgtgtccaagcttccttgacgccgggtgtattgtggtaactgtgactgactatcgtcgctggcgccgaacatttggctagctagcgtggatgatatatactgcgatgtgagtgaattcaataagaggcttggctctccatacagccaataactatagttagcatttgtatctcgtgttgtttgggctgcttttgtcgactgctggctgtaagaacaatatttgagcttcgtttgttgagtactgtgcgtcccagatggatgggattaatacaagctaatgtgatcctcgtcctggcacttttgttattgtctatttgattgatcgatcaagcgttcgatttctgcagacatggatggcgatgtgcatcgacatttgagggtttcggttttttcttttactgtcggtgtaatggttttggatgctgtgcgtcggtagctttacgatttgtgttcgctacatgcgtaatgatctgattgagatgtgtggtgtactggtgtgtgtaaaataaagcaaaaagaaaaatatatattatcagaggcaggtttcgatcctgcgacctgtgggttat

SEQ ID NO: 53839 - DNA, 2183 bp, Zea Mays
aatgaccatcctcctcagcaagcataaagaagatcgtccttcgcagtcgcagcaagcattccggctctgcatctggcccagctctgggttgcgcgaacagtcggaaccctaattccctccccggcgccggcgccggcgccccctagctgcgcccccacgaccagcagaatccagatcgaagttttgctcttgccgcggccccgcctaaactccaaaagtgcgaaccccctaactcatcgatcccagcctgcctccgcctacgcgcctcgtgacggcgtggacccctcccctatctgcgtgctgcgcgcatccgcctgcggcctgtcccgtgcagccgtgcctcctccgcgcacatctccagggtctagccgagagcagaccgccgtgacgccaccactcgcgctcgcgctcctgacatcgttgtctgccttctctgtctaagatcagagcagagctccatcgaaagcgtcgcccgcctgcttggatgatcaatcaccacgaaatagtgcagtttgggaagctgtacaatagagacatggaatcagctcctgctcatacccctcttatacatggtcttcctgatgaggtagctctcatttgcttggcaagagttcctcggcggtatcataatattctcaggcgtgtctcaaggagatggagagctctgttatgcagtgaagaatggcacttgtgccgcaagaggaataacttggacgagccgtggatctatgtaatctgtagggaagcaggcatcaaatgctatgtgttggctccagatcctccaagccggtgctttcgaatcatgcatgtcattgaacccccatgctcagggaggaaaggtgttaccattgaagctttagacaaaaagctatttcttctgggtggctgcagttccgtgtatgatgctacggatgaagtatattgttatgacgcatcctcaaatcgctggagctcagctgctccaatgcctacagcaagttccttatgctccgccgccttcctttcaggtgctattttgtgtctgcatcccttaaggagaagttgtacataactgatggatacggcttgacggacaagtcaccaaattcatgggacatctatgacccggccacggactcgtggtgcacccacaagaacccgttgctcacccctgacatagtgaaattcgtcgcattgggggaggagctggtgaccattcaccgagcggcgtggcacaggatgtactttgccggcgtatacgacccgctggaacgcacctggaggggcagagggaacgagatcgctctctgctactcgagcccgacggtggtcgtggacgggacgctgtacatgctggagcagtccatgggcacgaagctgatggtgtggcgggaggacgccaaggagtgggccatgctcggcaggctctccgacaaggtcactagacccccctgcgcgctcgtggccatcggcaggaagattcatgtggtcggaagagggctgagcatggtcaccgtggatgtggacacggcggcaagggtggacgggttcctggttaccacctctgtaggcccgttggtggaggaagacctgaccccggagaggtgcgtggtgatcaccatctgaaggggtgggcgtgtccaagcttccttgacgccgggtgtattgtggtaactgtgactgactatcgtcgctggcgccgaacatttggctagctagcgtggatgatatatactgcgatgtgagtgaattcaataagaggcttggctctccatacagccaataactatagttagcatttgtatctcgtgttgtttgggctgcttttgtcgactgctggctgtaagaacaatatttgagcttcgtttgttgagtactgtgcgtcccagatggatgggattaatacaagctaatgtgatcctcgtcctggcacttttgttattgtctatttgattgatcgatcaagcgttcgatttctgcagacatggatggcgatgtgcatcgacatttgagggtttcggttttttcttttactgtcggtgtaatggttttggatgctgtgcgtcggtagctttacgatttgtgttcgctacatgcgtaatgatctgattgagatgtgtggtgtactggtgtgtgtaaaataaagcaaaaagaaaaatatatattatcagaggcaggtttcgatcctgcgacctgtgggttat

SEQ ID NO: 53840 - DNA, 5761 bp, Zea Mays
gtgaataatgaccatcctcctcagcaagcataaagaagatcgtccttcgcagtcgcagcaagcattccggctctgcatctggcccagctctgggttgcgcgaacagtcggaaccctaattccctccccggcgccggcgccggcgccccctagctgcgcccccacgaccagcagaatccagatcgaagttttgctcttgccgcggccccgcctaaactccaaaagtgcgaaccccctaactcatcgatcccagcctgcctccgcctacgcgcctcgtgacggcgtggacccctcccctatctgcgtgctgcgcgcatccgcctgcggcctgtcccgtgcagccgtgcctcctccgcgcacatctccagggtctagccgagagcagaccgccgtgacgccaccactcgcgctcgcgctcctgacatcgttgtctgccttctctgtctaagatcagagcagagctccatcgaaagcgtcgcccgcctgcttgcatctccttgaaatctgccatacctcaaattttatgcgtcctccgtctctgctcattcctgttttatggccctgtgtctgtatccttgtcggtagatgacgtattctctttggatcattgccgccattgtccattgtgtggccacgttaggtgcattcgcttatgaattggtttcgggtatggagtagtggttgtactgcactgcaagccttgattttaggaggtagtcaggtgtagatttactgtgtggtttgtttttgcgctggaaatcgatgtgatgacttacaaaggaccgtatctgggcgaggcaactattcgcgcatgattataactgatctgagacaaatgtctgagcaagtatgatcctagtgctttatcctctccgcctgatgtttgatcgaaaatgctgtgatggagtttcattctttccctgtttccttatttgctatgatgacatctacaaggacgacgtttgagtaaggtggctcttaaaatggtgcctctttgcatccaatctgaatgagattctgagcaagaccggtgctctcctctgttgatcgtcaagcactatactagctgaactctacatcaaaatgatatgctatactttcttttatgtcaaccatatatttcttttggcatccatttggtcccttgttcacattcaaacaagctttcaattttttctactatataaagcaccaatttccacggtttccatagtcgtcgcgctactccacatttaaatggtaaaaaagttaaaattatgcacaaatgatgatttgaacaatggttgttggctccacgcacattcacacccacctaaccaacataatacacatgtctttatgttttatactttacactcataaattgaaaccgtagcaatgtacacacactttggtatttaagtgtcagttttatgcaatccctttcccagtggcagcatacattgatcactctcccagtggtgaggattgtatctaagttcagtggaattgttttcctaacttttatatccaaaattgaatgacttctcagtaaaactattttgtctgcacaaccattccttgtctttaagatatcgtagattttagcaatattttgatttattgtacatgtaatgcttatttatggatgattgttatgatgactcctattagggtatagggttactgaagggattgcatcccatctgattataccaaaaaccgaatatggtttctgatcaaatccagccatactgtcgaagaacccaaccaatgatttactccattttgattaaccaaattgatgtaattatattcatcgctttcttagtggcagcattattatagaatcggaattgccttgcctatttcctagcacaattttttcttcttctcttttgggtcatgcttgttctccctttgccgtaatcttaaaatggtgcatctttttttttattacatccaatctgaatgagattctgagcaaaccaggtgctctcctcttttgatcggcaagcactgtactagctaagatctacatcaaaatgttatgctatactttcttttatgtcaatcatatgtttcttttggcatccatttggtcccttgttcaccatacaagatttcggattttattatttaagtgtcagttttatgcaatccctttcccagtggcagcatacattgattgctctcccaatggtgaggattgtatctaagttcggtggaaacttctacatccaaaattgaatgacttctcagcaaagctattttgcctgcccaaccattccttgtcttgaagatatcgtatctttttagtcatattttgatttattgtgcatgtaatgcttatctatggattattgctatgatgactcctattagggtttagggttactgaagggattgtatcccatctgattataccaaaaccgaatatggtttttgagcaaatccagccatattgtcgaagaacccaactaatgatttactccattttgattaaccaaattgatgtaattatattcatcgcttccttagtggcagcaatattatagaatcagaatcgccttgtctatttcctagcacaatttcttcttctcttctgggtcatgcttgttctccttttgtcgtgatcttaaaatggtgcctctttttttattacatccaatctgaatgaggttctgagcaaaccaggtgttctcctcttttgatcggcaagcactgtactagctgagatctacatcaaaatgctatgttgtactttattttatgtcaatcatatgtttcttttggcatccacttggtcccttgttcccaaccatacaagatttcagattttattatttaagtgccagttttatgcaatccctttcccaaccatacattgattgctctcccagtggtgaggattgtatctaagttcggtggacttattttccttacttttacatccaaaattgaatgacttctcaacaaagctattttgcctgcccaaccattccttgtcttgaagatatctttttagtcatattttgatttattgtagatgtaatgcttatctatggatgagtgctataatggttcctattagggtttagggttaccgaagggattgcatcccatctgattataccaaaaccgaatattgtttctgagcaaatccatccatattgtcaaagaaccaaaccaatgatttactccattttgattaaccaaattgatgtaattatattcatcgctttcttggtggcaacattattatagaatcggaatcgccttgtctatttcctagcacaatttttttcttcttctcttttgggtcatgcttgttctccttttgccgtgatcttaaggggatgacttaaatgtgctccttctgattataccaaaactgaatctggttactgggcaaatccaccataccattgtagaactcagttacttagccaatgttttctctctctttgatcaacctgattgatgtagttacattcttcaatttctctatgccaacattattatggcatcaggattgccatatttgatttcctagaacagttgtcttcttctatgtcttttactctttttttggatcatccttgctctgtaagactatattttccatgatgactactattaagacggtatctaaaaggggtagcttttaattgtacctcttctgattgtaccgagactgaatcagtgttttcagaacgttcgattagtcgcgattaatcggctgataataactccagagccgagcaagggtaacgacgcgatcagggcgatcagatatctgatcgtccgattagttgaacgatcagcctggctggttggattgaaatttcggcccagtggcccagcccagcttcctttttcccattcccaccacgtgagcagaagctgcacaaccaagagccaacagagcaacgcccaggcacacacgacacgaaccaggcaaccagctgccgagggaggaccggaggaaccctagcggaacactgtgcaggtgacggcggcgcgctaccggtgacgggggatacggcggcatcgtccccctcggcccttcctccatccccggcgcggcggcgccagtagccggcctgcaggatgatcaatcaccacgaaatagtgcagtttgggaagctgtacaatagagacatggaatcagctcctgctcatacccctcttatacatggtcttcctgatgaggtagctctcatttgcttggcaagagttcctcggcggtatcataatattctcaggcgtgtctcaaggagatggagagctctgttatgcagtgaagaatggcacttgtgccgcaagaggaataacttggacgagccgtggatctatgtaatctgtagggaagcaggcatcaaatgctatgtgttggctccagatcctccaagccggtgctttcgaatcatgcatgtcattgaacccccatgctcagggaggaaaggtgttaccattgaagctttagacaaaaagctatttcttctgggtggctgcagttccgtgtatgatgctacggatgaagtatattgttatgacgcatcctcaaatcgctggagctcagctgctccaatgcctacagcaaggtgctattttgtgtctgcatcccttaaggagaagttgtacataactgatggatacggcttgacggacaagtcaccaaattcatgggacatctatgacccggccacggactcgtggtgcacccacaagaacccgttgctcacccctgacatagtgaaattcgtcgcattgggggaggagctggtgaccattcaccgagcggcgtggcacaggatgtactttgccggcgtatacgacccgctggaacgcacctggaggggcagagggaacgagatcgctctctgctactcgagcccgacggtggtcgtggacgggacgctgtacatgctggagcagtccatgggcacgaagctgatggtgtggcgggaggacgccaaggagtgggccatgctcggcaggctctccgacaaggtcactagacccccctgcgcgctcgtggccatcggcaggaagattcatgtggtcggaagagggctgagcatggtcaccgtggatgtggacacggcggcaagggtggacgggttcctggttaccacctctgtaggcccgttggtggaggaagacctgaccccggagaggtgcgtggtgatcaccatctgaaggggtgggcgtgtccaagcttccttgacgccgggtgtattgtggtaactgtgactgactatcgtcgctggcgccgaacatttggctagctagcgtggatgatatatactgcgatgtgagtgaattcaataagaggcttggctctccatacagccaataactatagttagcatttgtatctcgtgttgtttgggctgcttttgtcgactgctggctgtaagaacaatatttgagcttcgtttgttgagtactgtgcgtcccagatggatgggattaatacaagctaatgtgatcctcgtcctggcacttttgttattgtctatttgattgatcgatcaagcgttcgatttctgcagacatggatggcgatgtgcatcgacatttgagggtttcggttttttcttttactgtcggtgtaatggttttggatgctgtgcgtcggtagctttacgatttgtgttcgctacatgcgtaatgatctgattgagatgtgtggtgtactggtgtgtgtaaaataaagcaaaaagaaaaatatatattatcagaggcaggtttcgatcctgcgacctgtgggttat

SEQ ID NO: 53841 - DNA, 2566 bp, Zea Mays
aggggattggtgaataatgaccatcctcctcagcaagcataaagaagatcgtccttcgcagtcgcagcaagcattccggctctgcatctggcccagctctgggttgcgcgaacagtcggaaccctaattccctccccggcgccggcgccggcgccccctagctgcgcccccacgaccagcagaatccagatcgaagttttgctcttgccgcggccccgcctaaactccaaaagtgcgaaccccctaactcatcgatcccagcctgcctccgcctacgcgcctcgtgacggcgtggacccctcccctatctgcgtgctgcgcgcatccgcctgcggcctgtcccgtgcagccgtgcctcctccgcgcacatctccagggtctagccgagagcagaccgccgtgacgccaccactcgcgctcgcgctcctgacatcgttgtctgccttctctgtctaagatcagagcagagctccatcgaaagcgtcgcccgcctgcttgaacgttcgattagtcgcgattaatcggctgataataactccagagccgagcaagggtaacgacgcgatcagggcgatcagatatctgatcgtccgattagttgaacgatcagcctggctggttggattgaaatttcggcccagtggcccagcccagcttcctttttcccattcccaccacgtgagcagaagctgcacaaccaagagccaacagagcaacgcccaggcacacacgacacgaaccaggcaaccagctgccgagggaggaccggaggaaccctagcggaacactgtgcaggtgacggcggcgcgctaccggtgacgggggatacggcggcatcgtccccctcggcccttcctccatccccggcgcggcggcgccagtagccggcctgcaggatgatcaatcaccacgaaatagtgcagtttgggaagctgtacaatagagacatggaatcagctcctgctcatacccctcttatacatggtcttcctgatgaggtagctctcatttgcttggcaagagttcctcggcggtatcataatattctcaggcgtgtctcaaggagatggagagctctgttatgcagtgaagaatggcacttgtgccgcaagaggaataacttggacgagccgtggatctatgtaatctgtagggaagcaggcatcaaatgctatgtgttggctccagatcctccaagccggtgctttcgaatcatgcatgtcattgaacccccatgctcagggaggaaaggtgttaccattgaagctttagacaaaaagctatttcttctgggtggctgcagttccgtgtatgatgctacggatgaagtatattgttatgacgcatcctcaaatcgctggagctcagctgctccaatgcctacagcaaggtgctattttgtgtctgcatcccttaaggagaagttgtacataactgatggatacggcttgacggacaagtcaccaaattcatgggacatctatgacccggccacggactcgtggtgcacccacaagaacccgttgctcacccctgacatagtgaaattcgtcgcattgggggaggagctggtgaccattcaccgagcggcgtggcacaggatgtactttgccggcgtatacgacccgctggaacgcacctggaggggcagagggaacgagatcgctctctgctactcgagcccgacggtggtcgtggacgggacgctgtacatgctggagcagtccatgggcacgaagctgatggtgtggcgggaggacgccaaggagtgggccatgctcggcaggctctccgacaaggtcactagacccccctgcgcgctcgtggccatcggcaggaagattcatgtggtcggaagagggctgagcatggtcaccgtggatgtggacacggcggcaagggtggacgggttcctggttaccacctctgtaggcccgttggtggaggaagacctgaccccggagaggtgcgtggtgatcaccatctgaaggggtgggcgtgtccaagcttccttgacgccgggtgtattgtggtaactgtgactgactatcgtcgctggcgccgaacatttggctagctagcgtggatgatatatactgcgatgtgagtgaattcaataagaggcttggctctccatacagccaataactatagttagcatttgtatctcgtgttgtttgggctgcttttgtcgactgctggctgtaagaacaatatttgagcttcgtttgttgagtactgtgcgtcccagatggatgggattaatacaagctaatgtgatcctcgtcctggcacttttgttattgtctatttgattgatcgatcaagcgttcgatttctgcagacatggatggcgatgtgcatcgacatttgagggtttcggttttttcttttactgtcggtgtaatggttttggatgctgtgcgtcggtagctttacgatttgtgttcgctacatgcgtaatgatctgattgagatgtgtggtgtactggtgtgtgtaaaataaagcaaaaagaaaaatatatattatcagaggcaggtttcgatcctgcgacctgtgggttat

SEQ ID NO: 53842 - DNA, 2581 bp, Zea Mays
tttgaaaggggattggtgaataatgaccatcctcctcagcaagcataaagaagatcgtccttcgcagtcgcagcaagcattccggctctgcatctggcccagctctgggttgcgcgaacagtcggaaccctaattccctccccggcgccggcgccggcgccccctagctgcgcccccacgaccagcagaatccagatcgaagttttgctcttgccgcggccccgcctaaactccaaaagtgcgaaccccctaactcatcgatcccagcctgcctccgcctacgcgcctcgtgacggcgtggacccctcccctatctgcgtgctgcgcgcatccgcctgcggcctgtcccgtgcagccgtgcctcctccgcgcacatctccagggtctagccgagagcagaccgccgtgacgccaccactcgcgctcgcgctcctgacatcgttgtctgccttctctgtctaagatcagagcagagctccatcgaaagcgtcgcccgcctgcttgtgttttcagaacgttcgattagtcgcgattaatcggctgataataactccagagccgagcaagggtaacgacgcgatcagggcgatcagatatctgatcgtccgattagttgaacgatcagcctggctggttggattgaaatttcggcccagtggcccagcccagcttcctttttcccattcccaccacgtgagcagaagctgcacaaccaagagccaacagagcaacgcccaggcacacacgacacgaaccaggcaaccagctgccgagggaggaccggaggaaccctagcggaacactgtgcaggtgacggcggcgcgctaccggtgacgggggatacggcggcatcgtccccctcggcccttcctccatccccggcgcggcggcgccagtagccggcctgcaggatgatcaatcaccacgaaatagtgcagtttgggaagctgtacaatagagacatggaatcagctcctgctcatacccctcttatacatggtcttcctgatgaggtagctctcatttgcttggcaagagttcctcggcggtatcataatattctcaggcgtgtctcaaggagatggagagctctgttatgcagtgaagaatggcacttgtgccgcaagaggaataacttggacgagccgtggatctatgtaatctgtagggaagcaggcatcaaatgctatgtgttggctccagatcctccaagccggtgctttcgaatcatgcatgtcattgaacccccatgctcagggaggaaaggtgttaccattgaagctttagacaaaaagctatttcttctgggtggctgcagttccgtgtatgatgctacggatgaagtatattgttatgacgcatcctcaaatcgctggagctcagctgctccaatgcctacagcaaggtgctattttgtgtctgcatcccttaaggagaagttgtacataactgatggatacggcttgacggacaagtcaccaaattcatgggacatctatgacccggccacggactcgtggtgcacccacaagaacccgttgctcacccctgacatagtgaaattcgtcgcattgggggaggagctggtgaccattcaccgagcggcgtggcacaggatgtactttgccggcgtatacgacccgctggaacgcacctggaggggcagagggaacgagatcgctctctgctactcgagcccgacggtggtcgtggacgggacgctgtacatgctggagcagtccatgggcacgaagctgatggtgtggcgggaggacgccaaggagtgggccatgctcggcaggctctccgacaaggtcactagacccccctgcgcgctcgtggccatcggcaggaagattcatgtggtcggaagagggctgagcatggtcaccgtggatgtggacacggcggcaagggtggacgggttcctggttaccacctctgtaggcccgttggtggaggaagacctgaccccggagaggtgcgtggtgatcaccatctgaaggggtgggcgtgtccaagcttccttgacgccgggtgtattgtggtaactgtgactgactatcgtcgctggcgccgaacatttggctagctagcgtggatgatatatactgcgatgtgagtgaattcaataagaggcttggctctccatacagccaataactatagttagcatttgtatctcgtgttgtttgggctgcttttgtcgactgctggctgtaagaacaatatttgagcttcgtttgttgagtactgtgcgtcccagatggatgggattaatacaagctaatgtgatcctcgtcctggcacttttgttattgtctatttgattgatcgatcaagcgttcgatttctgcagacatggatggcgatgtgcatcgacatttgagggtttcggttttttcttttactgtcggtgtaatggttttggatgctgtgcgtcggtagctttacgatttgtgttcgctacatgcgtaatgatctgattgagatgtgtggtgtactggtgtgtgtaaaataaagcaaaaagaaaaatatatattatcagaggcaggtttcgatcctgcgacctgtgggttat

SEQ ID NO: 53843 - DNA, 2200 bp, Zea Mays
cacataactgccaaataacatgatttttgaaaggggattggtgaataatgaccatcctcctcagcaagcataaagaagatcgtccttcgcagtcgcagcaagcattccggctctgcatctggcccagctctgggttgcgcgaacagtcggaaccctaattccctccccggcgccggcgccggcgccccctagctgcgcccccacgaccagcagaatccagatcgaagttttgctcttgccgcggccccgcctaaactccaaaagtgcgaaccccctaactcatcgatcccagcctgcctccgcctacgcgcctcgtgacggcgtggacccctcccctatctgcgtgctgcgcgcatccgcctgcggcctgtcccgtgcagccgtgcctcctccgcgcacatctccagggtctagccgagagcagaccgccgtgacgccaccactcgcgctcgcgctcctgacatcgttgtctgccttctctgtctaagatcagagcagagctccatcgaaagcgtcgcccgcctgcttggatgatcaatcaccacgaaatagtgcagtttgggaagctgtacaatagagacatggaatcagctcctgctcatacccctcttatacatggtcttcctgatgaggtagctctcatttgcttggcaagagttcctcggcggtatcataatattctcaggcgtgtctcaaggagatggagagctctgttatgcagtgaagaatggcacttgtgccgcaagaggaataacttggacgagccgtggatctatgtaatctgtagggaagcaggcatcaaatgctatgtgttggctccagatcctccaagccggtgctttcgaatcatgcatgtcattgaacccccatgctcagggaggaaaggtgttaccattgaagctttagacaaaaagctatttcttctgggtggctgcagttccgtgtatgatgctacggatgaagtatattgttatgacgcatcctcaaatcgctggagctcagctgctccaatgcctacagcaaggtgctattttgtgtctgcatcccttaaggagaagttgtacataactgatggatacggcttgacggacaagtcaccaaattcatgggacatctatgacccggccacggactcgtggtgcacccacaagaacccgttgctcacccctgacatagtgaaattcgtcgcattgggggaggagctggtgaccattcaccgagcggcgtggcacaggatgtactttgccggcgtatacgacccgctggaacgcacctggaggggcagagggaacgagatcgctctctgctactcgagcccgacggtggtcgtggacgggacgctgtacatgctggagcagtccatgggcacgaagctgatggtgtggcgggaggacgccaaggagtgggccatgctcggcaggctctccgacaaggtcactagacccccctgcgcgctcgtggccatcggcaggaagattcatgtggtcggaagagggctgagcatggtcaccgtggatgtggacacggcggcaagggtggacgggttcctggttaccacctctgtaggcccgttggtggaggaagacctgaccccggagaggtgcgtggtgatcaccatctgaaggggtgggcgtgtccaagcttccttgacgccgggtgtattgtggtaactgtgactgactatcgtcgctggcgccgaacatttggctagctagcgtggatgatatatactgcgatgtgagtgaattcaataagaggcttggctctccatacagccaataactatagttagcatttgtatctcgtgttgtttgggctgcttttgtcgactgctggctgtaagaacaatatttgagcttcgtttgttgagtactgtgcgtcccagatggatgggattaatacaagctaatgtgatcctcgtcctggcacttttgttattgtctatttgattgatcgatcaagcgttcgatttctgcagacatggatggcgatgtgcatcgacatttgagggtttcggttttttcttttactgtcggtgtaatggttttggatgctgtgcgtcggtagctttacgatttgtgttcgctacatgcgtaatgatctgattgagatgtgtggtgtactggtgtgtgtaaaataaagcaaaaagaaaaatatatattatcagaggcaggtttcgatcctgcgacctgtgggttat

SEQ ID NO: 53844 - DNA, 1002 bp, Zea Mays
aggcccatcatccatatcacatgtatttttttagggattttacccgtaaagcccagctcgcttctttcctcatcacaccaccagccaccagggaggagaggagagatgatgatgccgacggcggcgtcgctgatggacgatcttgtcgaggagttcctcatccgcctcccgcccgacgaccccgcgagcctcgtcaacgcctccctcgtctgcaagcggtggagccgcctcatcgccggccgcgtcttccgccgcaagttccgcaagatccaccgcgccaagctgctgcacatggcccgggggcaggtctataggcagcggcggcgacggcggcagcggcagtgatggagcggcccgtccggtccgaccgtcgattggctgcttgctctgcatcttctggcttctgcaaccaggaagctgactgaacgctcgctattgccaataattaattagtactattttcttcgtttcttttttttatttgtcgtatacgaactaaaacagagttagtgataatgataatgataatttgtagcagtgcaaagtgccaaaccccgttgccttgcgtaccttgtggatgtatgttatataatttttatttttctacgtatcatgtatgccacatgaataaattctagtatatatatgtcccgttgcaggttaggtctttttttttcttgcgccgaaggaaggagaagtcactttattattttgtcttttctaaatatataaatagaatgttgtgggataggaaaacagttacgaaaagttcataaaatagactatagttcctctatataaaagataataaaaggaggatgatcctagttaataaaatagaaactgacgagaaatggttgagtaactccaagaaggtgtcgcagactaccagctgtctggaataacttcgtttcaagaattttaaatatttcagcttgttctatctaaataggtctaactccactaataggtctaacttcattggctctagcttaaaaaaaa

SEQ ID NO: 53845 - DNA, 2345 bp, Zea Mays
ccatcagacagacgcagactctctcacccgactcgtcagacgtcagccagcagttcgaaaccaaggattgatccaggagcttccggaaggcgaggcgcgcgcgcagcgtcgaggtgctggtgccggtgccgcccatggatcgggctcgcggatccgcgttcctgctcggcgtcctgctcgcaggatccttgttcgcgttttcagttgccaaagaggagaccaagaagctcgggaccgtgatcggtatcgatctcggtaccacctactcctgtgtcggtgtgtacaagaacggtcatgtcgagatcatcgccaatgaccagggtaaccgtatcacaccctcatgggttgccttcaccgatagcgagaggctcatcggtgaggctgccaagaaccaggcagccgtcaaccctgagaggaccatctttgacgtcaagcgtctcatcggaagaaagttcgcggacaaggaagtccagagggacatgaaacttgttccctacaagattattaacaaggatggcaagccctacattcaggtcaagatcaaggatggggagaacaaggtcttcagccctgaggagatcagtgccatgattcttggcaagatgaaggatactgctgaggcataccttggcaagaagatcaatgatgctgtcgtcactgttcctgcgtacttcaatgatgcgcagaggcaggcaaccaaggatgctggtgtcattgccggcctcaatgttgctaggatcatcaatgagccaactgctgctgctattgcctatggtttggacaagaagggtggcgagaagaacatccttgtctttgaccttggtggtggtacttttgatgtcagtatcttgaccattgacaacggtgtgtttgaggtgctggccaccaatggtgacactcatcttggaggtgaggactttgaccagaggatcatggagtacttcatcaagttgatcaagaagaagtacagcaaggacatcagcaaggacaaccgtgctcttggaaagctgaggagggaagccgagcgcgccaagagagccctcagcaaccagcaccaggtccgtgttgagatcgagtccctctttgacgggaccgatttctcggagccgctgacccgtgccaggtttgaggagctgaacaacgacctcttccgcaagaccatgggccctgtcaagaaggccatggaggatgctggccttgagaagagccagatccatgagatcgtcctggttggtggaagcaccaggattcccaaggtccagcagctcctgcgggactacttcgacggcaaggagcccaacaagggtgtcaaccctgatgaggctgttgcctttggtgccgctgtgcagggaagcatcttgagcggcgagggtggtgacgagaccaaagatatcctcctccttgatgtggctcccctcaccctgggtatcgagaccgtcggtggagtcatgaccaagttgatcccgaggaacactgtcatcccgaccaagaagtcgcaggtgttcaccacctaccaggaccagcagaccactgtctccatccaggtctttgagggtgagcgcagtatgaccaaggactgccgtcttctcggcaagttcgacctcaacggcattgcgccagctccaaggggcacaccccagatcgaggtgaccttcgaggtggacgccaacggtatcctaaacgtgaaggcggaggacaagggcacgggcaagtcggagaagatcacgatcacgaacgagaaggggcggctgagccaggaggagatcgaccgcatggtgcgggaggcggaggagttcgcggaggaggacaagaaggtgaaggagcggatcgacgcccgcaaccagctggagacgtacgtgtacaacatgaagaacacggtgggcgacaaggacaagctcgcggacaagctggaggcggaggagaaggagaaggtggaggaggccgtgtgcaaccccatcgtgtcggccgtgtaccagcggtcgggcggcgcccctggcggtgacgctgacggcggtgttgacgacgaccacgacgagctgtagatggttgtagatggtggtggtgacgtggagtgccgggagccgagccaaattttgtaacggtgtttagcggcggacaatacttattactaatcttggtgctgctctgccaatagccgtgctgagcgtagtaactgtttgtttgtaattttttttcttctacttccttggttgttcaggattcgcattcgaattttatgtgaaaaaaagaaggcgcgcttttaaaatcttgcatttgcccccttgtggtaataatgctaattaaatggtgcaaagtagattgcttgtgactgggtttcgtgtgag

SEQ ID NO: 53846 - DNA, 922 bp, Zea Mays
ctcacacctgatgacatcgttttgctgcaacgagtgacagcccgaaacaacacaaacagaagatattgggctctggaaaacagcccggccaagttggttggtgaagggaaccggatccgttttgtaggagtaagcccaccataaaaaatatacagcttgttcgctgcggcttgctgcggctgcaatccggctgcggctgcgggttctacagtatttttctctctatggattgcagctgcagcaatccaaacagctgcaacagtgtcggcttgcagccagccgaacacgcccatatatatacttcgtccactacggcccatcactgtcaagtcactccacgcgcttgctgtgactgtgagggccagccgggccattcttcttcgcatggccatatctcatcactcatcagtccaccaacgtaatcgcatcaagccccctcacgtctcccgaaattccaaactggggggcccctcccccgcgcctcggtgtgacgactggcgaggaccttgctaacaacagccagggcagcgtccagggggcactctgcaaagcgcgcgaccggacggcccgacttgggattgagggtatccatggagatgcttgtggatttgagcaatctaatttggggaaaaggggtagagatgaaccatgttcatctggcccaacatccaaagcttgccgtgaaaaaatgaggagggacaagctgaatgacaggttcctggaattaagttcaattatgaatcctggtaaggaagcaaagttagataaagcaaatatattgagtgatgcagcccgtatggtggcacaacttagaggtgaggcagaaaagcttaaggaatcaaatgagaagttgcgggagaatatcaaggatctgaaggtcaccttcaaagaaacacattggacaaggttctagacactgttg

SEQ ID NO: 53847 - DNA, 1271 bp, Zea Mays
atctcatcactcatcagtccaccaacgtaatcgcatcaagccccctcacgtctcccgaaattccaaactggggggcccctcccccgcgcctcggtgtgacgactggcgaggaccttgctaacaacagccagggcagcgtccagggggcactctgcaaagcgcgcgaccggacggcccggttcgttctcgacctctcgtctcgctcatccgcccgcccccgaggaaggaaccctagcctagccttgctccgaccggtcgccgcggcgactgcgacgatgatggactgcgctggaggccgagaccccgtggaggacttcctcctcggcggcgccggcgccggcgacgacggagatctcgtcgccgtcttctgcgacgacggaggacttgggattgagggtatccatggagatgcttgtggatttgagcaatctaatttggggaaaagagatgaaccatgttcatctggcccaacatccaaagcttgccgtgaaaaaatgaggagggacaagctgaatgacaggttcctggaattaagttcaattatgaatcctggtaaggaagcaaagttagataaagcaaatatattgagtgatgcagcccgtatggtggcacaacttagaggtgaggcagaaaagcttaaggaatcaaatgagaagttgcgggagaatatcaaggatctgaaggaggagaagaacgagctccgtgaagagaaagtgagactaaaggtagaaaaggataggctggagcagcaagtcaaagctatgagtgtagctcctacaggatatgtcccccatctccctcatccagcttcataccatcctgctgcgttcactccatttgcgccgccacagcaagctccagccaacaaaagtgctccaatcccagcaccgttccctgggatggcgatgtggcagtggttgcctccgaccatcgtggacacaactcaagatccaaagctctggcccccaaatgcttaggggcagctaccttggaatgttgactcattgtgccttttcatgcatttggtgggcaaatcagtgtcagttaggtccctggagactggagaggaatcaagttcgcaactcgcgccatgtttatgctgtaacagctggtttccagcactacttatgaacttactttgttctactgaagggtggtgcctgtaattaatatatggatcttaaccctctagttggcatgtatatcatttgttctattcgagagctgaattttaaggaccattattgaagtcatgagtgcagtaaaaaaaa

SEQ ID NO: 53848 - DNA, 1260 bp, Zea Mays
ctacagtatttttctctctatggattgcagctgcagcaatccaaacagctgcaacagtgtcggcttgcagccagccgaacacgcccatatatatacttcgtccactacggcccatcactgtcaagtcactccacgcgcttgctgtgactgtgagggccagccgggccattcttcttcgcatggccatatctcatcactcatcagtccaccaacgtaatcgcatcaagccccctcacgtctcccgaaattccaaactggggggcccctcccccgcgcctcggtgtgacgactggcgaggaccttgctaacaacagccagggcagcgtccagggggcactctgcaaagcgcgcgaccggacggcccgacttgggattgagggtatccatggagatgcttgtggatttgagcaatctaatttggggaaaaggggtagagatgaaccatgttcatctggcccaacatccaaagcttgccgtgaaaaaatgaggagggacaagctgaatgacaggttcctggaattaagttcaattatgaatcctggtaaggaagcaaagttagataaagcaaatatattgagtgatgcagcccgtatggtggcacaacttagaggtgaggcagaaaagcttaaggaatcaaatgagaagttgcgggagaatatcaaggatctgaaggaggagaagaacgagctccgtgaagagaaagtgagactaaaggtagaaaaggataggctggagcagcaagtcaaagctatgagtgtagctcctacaggatatgtcccccatctccctcatccagcttcataccatcctgctgcgttcactccatttgcgccgccacagcaagctccagccaacaaaagtgctccaatcccagcaccgttccctgggatggcgatgtggcagtggttgcctccgaccatcgtggacacaactcaagatccaaagctctggcccccaaatgcttaggggcagctaccttggaatgttgactcattgtgccttttcatgcatttggtgggcaaatcagtgtcagttaggtccctggagactggagaggaatcaagttcgcaactcgcgccatgtttatgctgtaacagctggtttccagcactacttatgaacttactttgttctactgaagggtggtgcctgtaattaatatatggatcttaaccctctagttggcatgtatatcatttgttctattcgagagctgaattttaaggaccattattgaagtcatgagtgcagtaaaaaaaa

SEQ ID NO: 53849 - DNA, 5249 bp, Zea Mays
atatggctgataatggtgatgccaaagggggatctggcgcctatgcaattaatatagagaattttagtaagcggctgaaggtattctatgaccattggaaggagcacaagtctgatctttggggctcgtctgatgctattgcaattgctaccccacctccttctgatgatctccgttatttgaaatcatcagccctggatatttggttacttggatatgaatttccagaaacaataattgttttcatgcacaagcaaatacatgttttaagcagtcagaagaaaggaaatcttattgggaccctcaagaaggctgcaaacgaggctgttggtgttgacattgtgttgcatgtgaaaaccaagaatagtgatggtgctgacttgatggatgacatagtgcatgctgctcgtaatcaatcaaaatcagataagccagttgttggacacatagccaaagaggcacctgagggtaagcttcttgaaacatggataaaaaaattatctggatcaggcctacgactcgttgatgtaacaaacggcttctctgagctctttgctgtgaaggacaccacagagatcacatgtgtgaagaaggctgcttacttaacttcatccgttctgaaaaattttgtgattcctaagttggagaaggttatcgatgaggagaaggaagtctcacactcatcgttgatggatgacgcagagaaggctattctggacccactaaaggtcaaggtgaaattgaagcctgataatgttgatatatgctaccctccagtctttcaaagtgggggtaagtttgatctaaagcctggtgcgtctagcaatgacgagtacctgtattatgattcagcaagtattatcatctgtgcaattggttccaaatacagtagctattgctcaaatgttgctcggacatatcttatcgacgctacccctacacagaataaagcatatgagacccttaggaaagctcatgaagctgctattcaacaagtgaaaccaggcaatcagatgagtgcagtttatcaagctgcagtggctgtgattgagagggatgcacctgaacttcttcctaatctaacaaagtcagctggaactggaataggccttgaattccgagaatctggcttaaatctgaatgccaagaatgatcgtaggataaaaaagggaatggtttttaatgtatcccttggtttgcataacatccaggcagaaacaaccagtgagaagacaaagcagttttcactattattagctgatacagttttagtcaatgaaagaggacatgagatcttaacagcaccctgctccaaggcattcaaagatgttgcttattcgttcaacgaagatgatgatgctgttgctgctgaggttaagataaagtcgaagaccatagatgttatgccaaccaaggcaactctcaggtcagacaaccaggagatgtcgaaggaagagctcaggagacagcaccaggctgaacttgctcgccagaagaatgaagagactgctagaaggcttgctggggttggtactggatctggtgacggacgtggtcctgcgagggcttcaaatgagcttgttgcatataagaatgttaatgatgtaccatttgtaagagatttggtgatccaagtagatcagaagaatgaagctgtcctcttacctatttatggtagtatggttcctttccatgtttctactgtcaagagtgtgacaagtcaccaggacaaccgcacctgcactatccgtatcttcttcaatgtgcctggcatgccattctcaaatgatagcaagtttaattctcaaggtgctatctatctgaaagaaattacattccgctcaaaagatccacggcatagcagtgaagttgttcagcagatcaaaacattgaggaggcaagtggcatcaagggagtcagagagagctgaaagggcaactcttgttacccaggagaaacttcagattggaagcaacagaatgaagatgatgaggctttctgatgtgtggatacgacctgcatttggtggtcgtgggaggaagctcacaggaaatcttgaggctcatttcaatggtttcagatattctacttcaaggtctgatgagcgtgtggacatcatgtttggaaatataaagcatgcctttttccagcctgcagagaaagaaatgattactctccttcacttccatttgcacaaccatatcatggttggaaacaagaagacaaaggatgttcagttctatgttgaagttatggatgttgtacagacgcttgggggcagtagaagatcggcacttgatcctgatgagattgaagaagagcagcgtgagagggataggaagaacagaataaacatggatttccagaactttgtgaacaaggttaacgaccactggtcgcaaccacagttcaaggggcttgacctggagtttgatgtcccccttagagagcttgggttccatggtgtcccatataaagcttctgctttcattattccaacttctacatgtttggttgagctgattgagacccccttccttgtggtgagcctgagcgagatagagattgttaacctggagagggtgggctttgggacaaagaacttcgacatggctatcgtgttcaaggatttcaagaaagacgttctccgcattgactccatcccttcagcatcgcttgacgcgataaaggaatggctggacacaactgacctcaagtactatgagagcaggctgaatctgaactggcgccctatcctgaaaactataatcgatgatcctcagaagttcattgacgatggcggctgggagttcctgaacatggaggcgagtgactcagagactgaggacacagaggaatcagaccaaggctatgtgccttcagacgctgagcccgaatccgagtcagaagatgatgactctgacagtgagtccttggtggaatctgatgatgacgatgaggagtcagacgaggactcagaggaggagaagggcaagacctgggaggagctggagcgtgaggcaagcaacgcggaccgtgagcacggtgcggagtcggacagcgaggaggagaggaggcgccgcaaggcaaagaccttcggcaagtcgcgtgcgccggagcgcagcagcttcaagggagcgccgccctccaagaagccaaagttcaggtgaatgctgccttcggcaattcgctcgtgccaaagtgcagcagcttcaagggagcaccacctccaagaaggcagctctggttaatgggactccttgaagctttggcccccggagtagacgtgtctgtaggagtgtggtttgttatatctagattatctgcagtagcttagtccatctaaatgaaatgtgacagctgaactttggaagtcgcatcattggggaaacgaaatttaagtcgattgatttgttaatgccctcgttgatgtaatatttcccttgttcggtggatttccggtctgtataatatttatgcacgcttgcactttatccatggtatttgtatacccgtataaggcagcatggaggatgtttcttgcatgtggacgcattgattgatatatatatatatttaaggttcttttttttttctttttgttgcatctggttgtcgttgtaacagtgtacagccgcaatttgtttgccactaagggtctgtttactgattaacttgtctcattttacctaacttttctatctaagattagttcttcgatccgaaaaagtaactttatataatatgtggcgtaattaactcactttgcctaacttttcaatctaagattagtttttcgatccgaatgagtaactttatgcaagatatggcgtaattagccatcaaccaaacagtccgtaaaagacttgttcctcgaatgttttggtgatggcatctgcctatgatttgaagcccgctccgctgcgtttacagctgggtgtgagtttcctggccgcatgaagcatgaaaagatgggattcacagcggaactttcgttaggaatttgatggcaatcaagtttagttaaatttaattttcaaggctaggattctatgtgcacagccctgatatgcaccggatatcatcccgaatttatattgttatacatatacgaaaagcagtgaactctgctctgcaatcgtctgcatcgtcgtccttgctctctgttgcggcgacacgcacaggccagagcccgtcgggatggaaggcggcggctccggtgggcgggccgctgccgtcgtccccgcgcgtatgaccaccttgtcccggcactacttcggcggcagcgcgtctgagcgccaccacgacctccgcgtggacatcgtcgaggaacatccaggaggactacggcatgtttgtctggccatgcagtgtcatccttgccgagtatgtgtggcagcacagatcacggttctctgcttccagagttgttgagcttggtgctgggacctcactgccaggattagtagctgcaaaggttggggcagatgtaacactaacagacattgcgcagaatgcagaagtactgaacaacatcagaagcatatgtgctctcaatgacgccaattgtactgtttcgggacttacatggggagactgggatgaatcggtatttgatttacatcctgacattattcttggagctgatgtactttacgactcagcaaatttcgatgatctgttcgcgacggtgacctttcttctcgaaaattcttctggggcggttttcataaccacataccacaaccgcagtggtcatcatctgattgagtttttgatggtcaagtggggtttgaagtgtttgaaactgctggatggtttctccttcctaccgccatgtaaggctgctttacttcaggggaatattcagcttgtcgaaattgcgcttgacaaggaaaaacataaatgaccctgagtttgattacaggagttgacgaaaagcacagagaaatggaatgccatatttggtcctctgcatacatgtacgagcaactccatgtcaagccatccgtttggactgtcatcataaggatgttcttttaattaaaagaaactcatggggagcatcgttgttcgaatagcctatgcatgcaagaaaaaacagaaaatgttagcagatatgtactcttttgtgacatctgtacagaacatgttggtttcctgaaaaaagatgcagaatgtccttttcttgatgtattcgaaaaaatgagctaaatgcataactttacacaacttctttaagtttcttt

SEQ ID NO: 53850 - DNA, 5356 bp, Zea Mays
atatggctgataatggtgatgccaaagggggatctggcgcctatgcaattaatatagagaattttagtaagcggctgaaggtattctatgaccattggaaggagcacaagtctgatctttggggctcgtctgatgctattgcaattgctaccccacctccttctgatgatctccgttatttgaaatcatcagccctggatatttggttacttggatatgaatttccagaaacaataattgttttcatgcacaagcaaatacatgttttaagcagtcagaagaaaggaaatcttattgggaccctcaagaaggctgcaaacgaggctgttggtgttgacattgtgttgcatgtgaaaaccaagaatagtgatggtgctgacttgatggatgacatagtgcatgctgctcgtaatcaatcaaaatcagataagccagttgttggacacatagccaaagaggcacctgagggtaagcttcttgaaacatggataaaaaaattatctggatcaggcctacgactcgttgatgtaacaaacggcttctctgagctctttgctgtgaaggacaccacagagatcacatgtgtgaagaaggctgcttacttaacttcatccgttctgaaaaattttgtgattcctaagttggagaaggttatcgatgaggagaaggaagtctcacactcatcgttgatggatgacgcagagaaggctattctggacccactaaaggtcaaggtgaaattgaagcctgataatgttgatatatgctaccctccagtctttcaaagtgggggtaagtttgatctaaagcctggtgcgtctagcaatgacgagtacctgtattatgattcagcaagtattatcatctgtgcaattggttccaaatacagtagctattgctcaaatgttgctcggacatatcttatcgacgctacccctacacagaataaagcatatgagacccttaggaaagctcatgaagctgctattcaacaagtgaaaccaggcaatcagatgagtgcagtttatcaagctgcagtggctgtgattgagagggatgcacctgaacttcttcctaatctaacaaagtcagctggaactggaataggccttgaattccgagaatctggcttaaatctgaatgccaagaatgatcgtaggataaaaaagggaatggtttttaatgtatcccttggtttgcataacatccaggcagaaacaaccagtgagaagacaaagcagttttcactattattagctgatacagttttagtcaatgaaagaggacatgagatcttaacagcaccctgctccaaggcattcaaagatgttgcttattcgttcaacgaagatgatgatgctgttgctgctgaggttaagataaagtcgaagaccatagatgttatgccaaccaaggcaactctcaggtcagacaaccaggagatgtcgaaggaagagctcaggagacagcaccaggctgaacttgctcgccagaagaatgaagagactgctagaaggcttgctggggttggtactggatctggtgacggacgtggtcctgcgagggcttcaaatgagcttgttgcatataagaatgttaatgatgtaccatttgtaagagatttggtgatccaagtagatcagaagaatgaagctgtcctcttacctatttatggtagtatggttcctttccatgtttctactgtcaagagtgtgacaagtcaccaggacaaccgcacctgcactatccgtatcttcttcaatgtgcctggcatgccattctcaaatgatagcaagtttaattctcaaggtgctatctatctgaaagaaattacattccgctcaaaagatccacggcatagcagtgaagttgttcagcagatcaaaacattgaggaggcaagtggcatcaagggagtcagagagagctgaaagggcaactcttgttacccaggagaaacttcagattggaagcaacagaatgaagatgatgaggctttctgatgtgtggatacgacctgcatttggtggtcgtgggaggaagctcacaggaaatcttgaggctcatttcaatggtttcagatattctacttcaaggtctgatgagcgtgtggacatcatgtttggaaatataaagcatgcctttttccagcctgcagagaaagaaatgattactctccttcacttccatttgcacaaccatatcatggttggaaacaagaagacaaaggatgttcagttctatgttgaagttatggatgttgtacagacgcttgggggcagtagaagatcggcacttgatcctgatgagattgaagaagagcagcgtgagagggataggaagaacagaataaacatggatttccagaactttgtgaacaaggttaacgaccactggtcgcaaccacagttcaaggggcttgacctggagtttgatgtcccccttagagagcttgggttccatggtgtcccatataaagcttctgctttcattattccaacttctacatgtttggttgagctgattgagacccccttccttgtggtgagcctgagcgagatagagattgttaacctggagagggtgggctttgggacaaagaacttcgacatggctatcgtgttcaaggatttcaagaaagacgttctccgcattgactccatcccttcagcatcgcttgacgcgataaaggaatggctggacacaactgacctcaagtactatgagagcaggctgaatctgaactggcgccctatcctgaaaactataatcgatgatcctcagaagttcattgacgatggcggctgggagttcctgaacatggaggcgagtgactcagagactgaggacacagaggaatcagaccaaggctatgtgccttcagacgctgagcccgaatccgagtcagaagatgatgactctgacagtgagtccttggtggaatctgatgatgacgatgaggagtcagacgaggactcagaggaggagaagggcaagacctgggaggagctggagcgtgaggcaagcaacgcggaccgtgagcacggtgcggagtcggacagcgaggaggagaggaggcgccgcaaggcaaagaccttcggcaagtcgcgtgcgccggagcgcagcagcttcaagggagcgccgccctccaagaagccaaagttcaggtgaatgctgccttcggcaattcgctcgtgccaaagtgcagcagcttcaagggagcaccacctccaagaaggcagctctggttaatgggactccttgaagctttggcccccggagtagacgtgtctgtaggagtgtggtttgttatatctagattatctgcagtagcttagtccatctaaatgaaatgtgacagctgaactttggaagtcgcatcattggggaaacgaaatttaagtcgattgatttgttaatgccctcgttgatgtaatatttcccttgttcggtggatttccggtctgtataatatttatgcacgcttgcactttatccatggtatttgtatacccgtataaggcagcatggaggatgtttcttgcatgtggacgcattgattgatatatatatatatttaaggttcttttttttttctttttgttgcatctggttgtcgttgtaacagtgtacagccgcaatttgtttgccactaagggtctgtttactgattaacttgtctcattttacctaacttttctatctaagattagttcttcgatccgaaaaagtaactttatataatatgtggcgtaattaactcactttgcctaacttttcaatctaagattagtttttcgatccgaatgagtaactttatgcaagatatggcgtaattagccatcaaccaaacagtccgtaaaagacttgttcctcgaatgttttggtgatggcatctgcctatgatttgaagcccgctccgctgcgtttacagctgggtgtgagtttcctggccgcatgaagcatgaaaagatgggattcacagcggaactttcgttaggaatttgatggcaatcaagtttagttaaatttaattttcaaggctaggattctatgtgcacagccctgatatgcaccggatatcatcccgaatttatattgttatacatatacgaaaagcagtgaactctgctctgcaatcgtctgcatcgtcgtccttgctctctgttgcggcgacacgcacaggccagagcccgtcgggatggaaggcggcggctccggtgggcgggccgctgccgtcgtccccgcgcgtatgaccaccttgtcccggcactacttcggcggcagcgcgtctgagcgccaccacgacctccgcgtggacatcgtcgagtcgttgcagcgtctttgaaacatctggcgcgtcaaggcggaagttgccatgctgctgcctgatggaacgccgaggaagtgcttgatagattgccgccaaggcgtttgctacgtcgtggaggactacggcatgtttgtctggccatgcagtgtcatccttgccgagtatgtgtggcagcacagatcacggttctctgcttccagagttgttgagcttggtgctgggacctcactgccaggattagtagctgcaaaggttggggcagatgtaacactaacagacattgcgcagaatgcagaagtactgaacaacatcagaagcatatgtgctctcaatgacgccaattgtactgtttcgggacttacatggggagactgggatgaatcggtatttgatttacatcctgacattattcttggagctgatgtactttacgactcagcaaatttcgatgatctgttcgcgacggtgacctttcttctcgaaaattcttctggggcggttttcataaccacataccacaaccgcagtggtcatcatctgattgagtttttgatggtcaagtggggtttgaagtgtttgaaactgctggatggtttctccttcctaccgccatgtaaggctgctttacttcaggggaatattcagcttgtcgaaattgcgcttgacaaggaaaaacataaatgaccctgagtttgattacaggagttgacgaaaagcacagagaaatggaatgccatatttggtcctctgcatacatgtacgagcaactccatgtcaagccatccgtttggactgtcatcataaggatgttcttttaattaaaagaaactcatggggagcatcgttgttcgaatagcctatgcatgcaagaaaaaacagaaaatgttagcagatatgtactcttttgtgacatctgtacagaacatgttggtttcctgaaaaaagatgcagaatgtccttttcttgatgtattcgaaaaaatgagctaaatgcataactttacacaacttctttaagtttcttt

SEQ ID NO: 53851 - DNA, 5477 bp, Zea Mays
  misc_feature (1)..(2): n is a, c, g, or t
nnatatggctgataatggtgatgccaaagggggatctggcgcctatgcaattaatatagagaattttagtaagcggctgaaggtattctatgaccattggaaggagcacaagtctgatctttggggctcgtctgatgctattgcaattgctaccccacctccttctgatgatctccgttatttgaaatcatcagccctggatatttggttacttggatatgaatttccagaaacaataattgttttcatgcacaagcaaatacatgttttaagcagtcagaagaaaggaaatcttattgggaccctcaagaaggctgcaaacgaggctgttggtgttgacattgtgttgcatgtgaaaaccaagaatagtgatggtgctgacttgatggatgacatagtgcatgctgctcgtaatcaatcaaaatcagataagccagttgttggacacatagccaaagaggcacctgagggtaagcttcttgaaacatggataaaaaaattatctggatcaggcctacgactcgttgatgtaacaaacggcttctctgagctctttgctgtgaaggacaccacagagatcacatgtgtgaagaaggctgcttacttaacttcatccgttctgaaaaattttgtgattcctaagttggagaaggttatcgatgaggagaaggaagtctcacactcatcgttgatggatgacgcagagaaggctattctggacccactaaaggtcaaggtgaaattgaagcctgataatgttgatatatgctaccctccagtctttcaaagtgggggtaagtttgatctaaagcctggtgcgtctagcaatgacgagtacctgtattatgattcagcaagtattatcatctgtgcaattggttccaaatacagtagctattgctcaaatgttgctcggacatatcttatcgacgctacccctacacagaataaagcatatgagacccttaggaaagctcatgaagctgctattcaacaagtgaaaccaggcaatcagatgagtgcagtttatcaagctgcagtggctgtgattgagagggatgcacctgaacttcttcctaatctaacaaagtcagctggaactggaataggccttgaattccgagaatctggcttaaatctgaatgccaagaatgatcgtaggataaaaaagggaatggtttttaatgtatcccttggtttgcataacatccaggcagaaacaaccagtgagaagacaaagcagttttcactattattagctgatacagttttagtcaatgaaagaggacatgagatcttaacagcaccctgctccaaggcattcaaagatgttgcttattcgttcaacgaagatgatgatgctgttgctgctgaggttaagataaagtcgaagaccatagatgttatgccaaccaaggcaactctcaggtcagacaaccaggagatgtcgaaggaagagctcaggagacagcaccaggctgaacttgctcgccagaagaatgaagagactgctagaaggcttgctggggttggtactggatctggtgacggacgtggtcctgcgagggcttcaaatgagcttgttgcatataagaatgttaatgatgtaccatttgtaagagatttggtgatccaagtagatcagaagaatgaagctgtcctcttacctatttatggtagtatggttcctttccatgtttctactgtcaagagtgtgacaagtcaccaggacaaccgcacctgcactatccgtatcttcttcaatgtgcctggcatgccattctcaaatgatagcaagtttaattctcaaggtgctatctatctgaaagaaattacattccgctcaaaagatccacggcatagcagtgaagttgttcagcagatcaaaacattgaggaggcaagtggcatcaagggagtcagagagagctgaaagggcaactcttgttacccaggagaaacttcagattggaagcaacagaatgaagatgatgaggctttctgatgtgtggatacgacctgcatttggtggtcgtgggaggaagctcacaggaaatcttgaggctcatttcaatggtttcagatattctacttcaaggtctgatgagcgtgtggacatcatgtttggaaatataaagcatgcctttttccagcctgcagagaaagaaatgattactctccttcacttccatttgcacaaccatatcatggttggaaacaagaagacaaaggatgttcagttctatgttgaagttatggatgttgtacagacgcttgggggcagtagaagatcggcacttgatcctgatgagattgaagaagagcagcgtgagagggataggaagaacagaataaacatggatttccagaactttgtgaacaaggttaacgaccactggtcgcaaccacagttcaaggggcttgacctggagtttgatgtcccccttagagagcttgggttccatggtgtcccatataaagcttctgctttcattattccaacttctacatgtttggttgagctgattgagacccccttccttgtggtgagcctgagcgagatagagattgttaacctggagagggtgggctttgggacaaagaacttcgacatggctatcgtgttcaaggatttcaagaaagacgttctccgcattgactccatcccttcagcatcgcttgacgcgataaaggaatggctggacacaactgacctcaagtactatgagagcaggctgaatctgaactggcgccctatcctgaaaactataatcgatgatcctcagaagttcattgacgatggcggctgggagttcctgaacatggaggcgagtgactcagagactgaggacacagaggaatcagaccaaggctatgtgccttcagacgctgagcccgaatccgagtcagaagatgatgactctgacagtgagtccttggtggaatctgatgatgacgatgaggagtcagacgaggactcagaggaggagaagggcaagacctgggaggagctggagcgtgaggcaagcaacgcggaccgtgagcacggtgcggagtcggacagcgaggaggagaggaggcgccgcaaggcaaagaccttcggcaagtcgcgtgcgccggagcgcagcagcttcaagggagcgccgccctccaagaagccaaagttcaggtgaatgctgccttcggcaattcgctcgtgccaaagtgcagcagcttcaagggagcaccacctccaagaaggcagctctggttaatgggactccttgaagctttggcccccggagtagacgtgtctgtaggagtgtggtttgttatatctagattatctgcagtagcttagtccatctaaatgaaatgtgacagctgaactttggaagtcgcatcattggggaaacgaaatttaagtcgattgatttgttaatgccctcgttgatgtaatatttcccttgttcggtggatttccggtctgtataatatttatgcacgcttgcactttatccatggtatttgtatacccgtataaggcagcatggaggatgtttcttgcatgtggacgcattgattgatatatatatatatttaaggttcttttttttttctttttgttgcatctggttgtcgttgtaacagtgtacagccgcaatttgtttgccactaagggtctgtttactgattaacttgtctcattttacctaacttttctatctaagattagttcttcgatccgaaaaagtaactttatataatatgtggcgtaattaactcactttgcctaacttttcaatctaagattagtttttcgatccgaatgagtaactttatgcaagatatggcgtaattagccatcaaccaaacagtccgtaaaagacttgttcctcgaatgttttggtgatggcatctgcctatgatttgaagcccgctccgctgcgtttacagctgggtgtgagtttcctggccgcatgaagcatgaaaagatgggattcacagcggaactttcgttaggaatttgatggcaatcaagtttagttaaatttaattttcaaggctaggattctatgtgcacagccctgatatgcaccggatatcatcccgaatttatattgttatacatatacgaaaagcagtgaactctgctctgcaatcgtctgcatcgtcgtccttgctctctgttgcggcgacacgcacaggccagagcccgtcgggatggaaggcggcggctccggtgggcgggccgctgccgtcgtccccgcgcgtatgaccaccttgtcccggcactacttcggcggcagcgcgtctgagcgccaccacgacctccgcgtggacatcgtcgagtcgttgcagcgtctttgaaacatctggcgcgtcaaggcggaagttgccatgctgctgcctgatggaacgccgaggaagtgcttgatagattgccgccaaggcgtttgctacgtcgtggtgcggtgctacatgaagcacgagccagtggtttggattttcgccctcatggctctgctgctgtgctcttgtttcctgattttcttttggttgggtttacattctacatagcacagaacatccaggaggactacggcatgtttgtctggccatgcagtgtcatccttgccgagtatgtgtggcagcacagatcacggttctctgcttccagagttgttgagcttggtgctgggacctcactgccaggattagtagctgcaaaggttggggcagatgtaacactaacagacattgcgcagaatgcagaagtactgaacaacatcagaagcatatgtgctctcaatgacgccaattgtactgtttcgggacttacatggggagactgggatgaatcggtatttgatttacatcctgacattattcttggagctgatgtactttacgactcagcaaatttcgatgatctgttcgcgacggtgacctttcttctcgaaaattcttctggggcggttttcataaccacataccacaaccgcagtggtcatcatctgattgagtttttgatggtcaagtggggtttgaagtgtttgaaactgctggatggtttctccttcctaccgccatgtaaggctgctttacttcaggggaatattcagcttgtcgaaattgcgcttgacaaggaaaaacataaatgaccctgaggtgaggagttgacgaaaagcacagagaaatggaatgccatatttggtcctctgcatacatgtacgagcaactccatgtcaagccatccgtttggactgtcatcataaggatgttcttttaattaaaagaaactcatggggagcatcgttgttcgaatagcctatgcatgcaagaaaaaacagaaaatgttagcagatatgtactcttttgtgacatctgtacagaacatgttggtttcctgaaaaaagatgcagaatgtccttttcttgatgtattcgaaaaaatgagctaaatgcataactttacacaacttctttaagtttcttt

SEQ ID NO: 53852 - DNA, 5356 bp, Zea Mays
  misc_feature (1)..(2): n is a, c, g, or t
nnatatggctgataatggtgatgccaaagggggatctggcgcctatgcaattaatatagagaattttagtaagcggctgaaggtattctatgaccattggaaggagcacaagtctgatctttggggctcgtctgatgctattgcaattgctaccccacctccttctgatgatctccgttatttgaaatcatcagccctggatatttggttacttggatatgaatttccagaaacaataattgttttcatgcacaagcaaatacatgttttaagcagtcagaagaaaggaaatcttattgggaccctcaagaaggctgcaaacgaggctgttggtgttgacattgtgttgcatgtgaaaaccaagaatagtgatggtgctgacttgatggatgacatagtgcatgctgctcgtaatcaatcaaaatcagataagccagttgttggacacatagccaaagaggcacctgagggtaagcttcttgaaacatggataaaaaaattatctggatcaggcctacgactcgttgatgtaacaaacggcttctctgagctctttgctgtgaaggacaccacagagatcacatgtgtgaagaaggctgcttacttaacttcatccgttctgaaaaattttgtgattcctaagttggagaaggttatcgatgaggagaaggaagtctcacactcatcgttgatggatgacgcagagaaggctattctggacccactaaaggtcaaggtgaaattgaagcctgataatgttgatatatgctaccctccagtctttcaaagtgggggtaagtttgatctaaagcctggtgcgtctagcaatgacgagtacctgtattatgattcagcaagtattatcatctgtgcaattggttccaaatacagtagctattgctcaaatgttgctcggacatatcttatcgacgctacccctacacagaataaagcatatgagacccttaggaaagctcatgaagctgctattcaacaagtgaaaccaggcaatcagatgagtgcagtttatcaagctgcagtggctgtgattgagagggatgcacctgaacttcttcctaatctaacaaagtcagctggaactggaataggccttgaattccgagaatctggcttaaatctgaatgccaagaatgatcgtaggataaaaaagggaatggtttttaatgtatcccttggtttgcataacatccaggcagaaacaaccagtgagaagacaaagcagttttcactattattagctgatacagttttagtcaatgaaagaggacatgagatcttaacagcaccctgctccaaggcattcaaagatgttgcttattcgttcaacgaagatgatgatgctgttgctgctgaggttaagataaagtcgaagaccatagatgttatgccaaccaaggcaactctcaggtcagacaaccaggagatgtcgaaggaagagctcaggagacagcaccaggctgaacttgctcgccagaagaatgaagagactgctagaaggcttgctggggttggtactggatctggtgacggacgtggtcctgcgagggcttcaaatgagcttgttgcatataagaatgttaatgatgtaccatttgtaagagatttggtgatccaagtagatcagaagaatgaagctgtcctcttacctatttatggtagtatggttcctttccatgtttctactgtcaagagtgtgacaagtcaccaggacaaccgcacctgcactatccgtatcttcttcaatgtgcctggcatgccattctcaaatgatagcaagtttaattctcaaggtgctatctatctgaaagaaattacattccgctcaaaagatccacggcatagcagtgaagttgttcagcagatcaaaacattgaggaggcaagtggcatcaagggagtcagagagagctgaaagggcaactcttgttacccaggagaaacttcagattggaagcaacagaatgaagatgatgaggctttctgatgtgtggatacgacctgcatttggtggtcgtgggaggaagctcacaggaaatcttgaggctcatttcaatggtttcagatattctacttcaaggtctgatgagcgtgtggacatcatgtttggaaatataaagcatgcctttttccagcctgcagagaaagaaatgattactctccttcacttccatttgcacaaccatatcatggttggaaacaagaagacaaaggatgttcagttctatgttgaagttatggatgttgtacagacgcttgggggcagtagaagatcggcacttgatcctgatgagattgaagaagagcagcgtgagagggataggaagaacagaataaacatggatttccagaactttgtgaacaaggttaacgaccactggtcgcaaccacagttcaaggggcttgacctggagtttgatgtcccccttagagagcttgggttccatggtgtcccatataaagcttctgctttcattattccaacttctacatgtttggttgagctgattgagacccccttccttgtggtgagcctgagcgagatagagattgttaacctggagagggtgggctttgggacaaagaacttcgacatggctatcgtgttcaaggatttcaagaaagacgttctccgcattgactccatcccttcagcatcgcttgacgcgataaaggaatggctggacacaactgacctcaagtactatgagagcaggctgaatctgaactggcgccctatcctgaaaactataatcgatgatcctcagaagttcattgacgatggcggctgggagttcctgaacatggaggcgagtgactcagagactgaggacacagaggaatcagaccaaggctatgtgccttcagacgctgagcccgaatccgagtcagaagatgatgactctgacagtgagtccttggtggaatctgatgatgacgatgaggagtcagacgaggactcagaggaggagaagggcaagacctgggaggagctggagcgtgaggcaagcaacgcggaccgtgagcacggtgcggagtcggacagcgaggaggagaggaggcgccgcaaggcaaagaccttcggcaagtcgcgtgcgccggagcgcagcagcttcaagggagcgccgccctccaagaagccaaagttcaggtgaatgctgccttcggcaattcgctcgtgccaaagtgcagcagcttcaagggagcaccacctccaagaaggcagctctggttaatgggactccttgaagctttggcccccggagtagacgtgtctgtaggagtgtggtttgttatatctagattatctgcagtagcttagtccatctaaatgaaatgtgacagctgaactttggaagtcgcatcattggggaaacgaaatttaagtcgattgatttgttaatgccctcgttgatgtaatatttcccttgttcggtggatttccggtctgtataatatttatgcacgcttgcactttatccatggtatttgtatacccgtataaggcagcatggaggatgtttcttgcatgtggacgcattgattgatatatatatatatttaaggttcttttttttttctttttgttgcatctggttgtcgttgtaacagtgtacagccgcaatttgtttgccactaagggtctgtttactgattaacttgtctcattttacctaacttttctatctaagattagttcttcgatccgaaaaagtaactttatataatatgtggcgtaattaactcactttgcctaacttttcaatctaagattagtttttcgatccgaatgagtaactttatgcaagatatggcgtaattagccatcaaccaaacagtccgtaaaagacttgttcctcgaatgttttggtgatggcatctgcctatgatttgaagcccgctccgctgcgtttacagctgggtgtgagtttcctggccgcatgaagcatgaaaagatgggattcacagcggaactttcgttaggaatttgatggcaatcaagtttagttaaatttaattttcaaggctaggattctatgtgcacagccctgatatgcaccggatatcatcccgaatttatattgttatacatatacgaaaagcagtgaactctgctctgcaatcgtctgcatcgtcgtccttgctctctgttgcggcgacacgcacaggccagagcccgtcgggatggaaggcggcggctccggtgggcgggccgctgccgtcgtccccgcgcgtatgaccaccttgtcccggcactacttcggcggcagcgcgtctgagcgccaccacgacctccgcgtggacatcgtcgagtcgttgcagcgtctttgaaacatctggcgcgtcaaggcggaagttgccatgctgctgcctgatggaacgccgaggaagtgcttgatagattgccgccaaggcgtttgctacgtcgtgaacatccaggaggactacggcatgtttgtctggccatgcagtgtcatccttgccgagtatgtgtggcagcacagatcacggttctctgcttccagagttgttgagcttggtgctgggacctcactgccaggattagtagctgcaaaggttggggcagatgtaacactaacagacattgcgcagaatgcagaagtactgaacaacatcagaagcatatgtgctctcaatgacgccaattgtactgtttcgggacttacatggggagactgggatgaatcggtatttgatttacatcctgacattattcttggagctgatgtactttacgactcagcaaatttcgatgatctgttcgcgacggtgacctttcttctcgaaaattcttctggggcggttttcataaccacataccacaaccgcagtggtcatcatctgattgagtttttgatggtcaagtggggtttgaagtgtttgaaactgctggatggtttctccttcctaccgccatgtaaggctgctttacttcaggggaatattcagcttgtcgaaattgcgcttgacaaggaaaaacataaatgaccctgaggagttgacgaaaagcacagagaaatggaatgccatatttggtcctctgcatacatgtacgagcaactccatgtcaagccatccgtttggactgtcatcataaggatgttcttttaattaaaagaaactcatggggagcatcgttgttcgaatagcctatgcatgcaagaaaaaacagaaaatgttagcagatatgtactcttttgtgacatctgtacagaacatgttggtttcctgaaaaaagatgcagaatgtccttttcttgatgtattcgaaaaaatgagctaaatgcataactttacacaacttctttaagtttcttt

SEQ ID NO: 53853 - DNA, 5250 bp, Zea Mays
  misc_feature (1)..(2): n is a, c, g, or t
nnatatggctgataatggtgatgccaaagggggatctggcgcctatgcaattaatatagagaattttagtaagcggctgaaggtattctatgaccattggaaggagcacaagtctgatctttggggctcgtctgatgctattgcaattgctaccccacctccttctgatgatctccgttatttgaaatcatcagccctggatatttggttacttggatatgaatttccagaaacaataattgttttcatgcacaagcaaatacatgttttaagcagtcagaagaaaggaaatcttattgggaccctcaagaaggctgcaaacgaggctgttggtgttgacattgtgttgcatgtgaaaaccaagaatagtgatggtgctgacttgatggatgacatagtgcatgctgctcgtaatcaatcaaaatcagataagccagttgttggacacatagccaaagaggcacctgagggtaagcttcttgaaacatggataaaaaaattatctggatcaggcctacgactcgttgatgtaacaaacggcttctctgagctctttgctgtgaaggacaccacagagatcacatgtgtgaagaaggctgcttacttaacttcatccgttctgaaaaattttgtgattcctaagttggagaaggttatcgatgaggagaaggaagtctcacactcatcgttgatggatgacgcagagaaggctattctggacccactaaaggtcaaggtgaaattgaagcctgataatgttgatatatgctaccctccagtctttcaaagtgggggtaagtttgatctaaagcctggtgcgtctagcaatgacgagtacctgtattatgattcagcaagtattatcatctgtgcaattggttccaaatacagtagctattgctcaaatgttgctcggacatatcttatcgacgctacccctacacagaataaagcatatgagacccttaggaaagctcatgaagctgctattcaacaagtgaaaccaggcaatcagatgagtgcagtttatcaagctgcagtggctgtgattgagagggatgcacctgaacttcttcctaatctaacaaagtcagctggaactggaataggccttgaattccgagaatctggcttaaatctgaatgccaagaatgatcgtaggataaaaaagggaatggtttttaatgtatcccttggtttgcataacatccaggcagaaacaaccagtgagaagacaaagcagttttcactattattagctgatacagttttagtcaatgaaagaggacatgagatcttaacagcaccctgctccaaggcattcaaagatgttgcttattcgttcaacgaagatgatgatgctgttgctgctgaggttaagataaagtcgaagaccatagatgttatgccaaccaaggcaactctcaggtcagacaaccaggagatgtcgaaggaagagctcaggagacagcaccaggctgaacttgctcgccagaagaatgaagagactgctagaaggcttgctggggttggtactggatctggtgacggacgtggtcctgcgagggcttcaaatgagcttgttgcatataagaatgttaatgatgtaccatttgtaagagatttggtgatccaagtagatcagaagaatgaagctgtcctcttacctatttatggtagtatggttcctttccatgtttctactgtcaagagtgtgacaagtcaccaggacaaccgcacctgcactatccgtatcttcttcaatgtgcctggcatgccattctcaaatgatagcaagtttaattctcaaggtgctatctatctgaaagaaattacattccgctcaaaagatccacggcatagcagtgaagttgttcagcagatcaaaacattgaggaggcaagtggcatcaagggagtcagagagagctgaaagggcaactcttgttacccaggagaaacttcagattggaagcaacagaatgaagatgatgaggctttctgatgtgtggatacgacctgcatttggtggtcgtgggaggaagctcacaggaaatcttgaggctcatttcaatggtttcagatattctacttcaaggtctgatgagcgtgtggacatcatgtttggaaatataaagcatgcctttttccagcctgcagagaaagaaatgattactctccttcacttccatttgcacaaccatatcatggttggaaacaagaagacaaaggatgttcagttctatgttgaagttatggatgttgtacagacgcttgggggcagtagaagatcggcacttgatcctgatgagattgaagaagagcagcgtgagagggataggaagaacagaataaacatggatttccagaactttgtgaacaaggttaacgaccactggtcgcaaccacagttcaaggggcttgacctggagtttgatgtcccccttagagagcttgggttccatggtgtcccatataaagcttctgctttcattattccaacttctacatgtttggttgagctgattgagacccccttccttgtggtgagcctgagcgagatagagattgttaacctggagagggtgggctttgggacaaagaacttcgacatggctatcgtgttcaaggatttcaagaaagacgttctccgcattgactccatcccttcagcatcgcttgacgcgataaaggaatggctggacacaactgacctcaagtactatgagagcaggctgaatctgaactggcgccctatcctgaaaactataatcgatgatcctcagaagttcattgacgatggcggctgggagttcctgaacatggaggcgagtgactcagagactgaggacacagaggaatcagaccaaggctatgtgccttcagacgctgagcccgaatccgagtcagaagatgatgactctgacagtgagtccttggtggaatctgatgatgacgatgaggagtcagacgaggactcagaggaggagaagggcaagacctgggaggagctggagcgtgaggcaagcaacgcggaccgtgagcacggtgcggagtcggacagcgaggaggagaggaggcgccgcaaggcaaagaccttcggcaagtcgcgtgcgccggagcgcagcagcttcaagggagcgccgccctccaagaagccaaagttcaggtgaatgctgccttcggcaattcgctcgtgccaaagtgcagcagcttcaagggagcaccacctccaagaaggcagctctggttaatgggactccttgaagctttggcccccggagtagacgtgtctgtaggagtgtggtttgttatatctagattatctgcagtagcttagtccatctaaatgaaatgtgacagctgaactttggaagtcgcatcattggggaaacgaaatttaagtcgattgatttgttaatgccctcgttgatgtaatatttcccttgttcggtggatttccggtctgtataatatttatgcacgcttgcactttatccatggtatttgtatacccgtataaggcagcatggaggatgtttcttgcatgtggacgcattgattgatatatatatatatttaaggttcttttttttttctttttgttgcatctggttgtcgttgtaacagtgtacagccgcaatttgtttgccactaagggtctgtttactgattaacttgtctcattttacctaacttttctatctaagattagttcttcgatccgaaaaagtaactttatataatatgtggcgtaattaactcactttgcctaacttttcaatctaagattagtttttcgatccgaatgagtaactttatgcaagatatggcgtaattagccatcaaccaaacagtccgtaaaagacttgttcctcgaatgttttggtgatggcatctgcctatgatttgaagcccgctccgctgcgtttacagctgggtgtgagtttcctggccgcatgaagcatgaaaagatgggattcacagcggaactttcgttaggaatttgatggcaatcaagtttagttaaatttaattttcaaggctaggattctatgtgcacagccctgatatgcaccggatatcatcccgaatttatattgttatacatatacgaaaagcagtgaactctgctctgcaatcgtctgcatcgtcgtccttgctctctgttgcggcgacacgcacaggccagagcccgtcgggatggaaggcggcggctccggtgggcgggccgctgccgtcgtccccgcgcgtatgaccaccttgtcccggcactacttcggcggcagcgcgtctgagcgccaccacgacctccgcgtggacatcgtcgagaacatccaggaggactacggcatgtttgtctggccatgcagtgtcatccttgccgagtatgtgtggcagcacagatcacggttctctgcttccagagttgttgagcttggtgctgggacctcactgccaggattagtagctgcaaaggttggggcagatgtaacactaacagacattgcgcagaatgcagaagtactgaacaacatcagaagcatatgtgctctcaatgacgccaattgtactgtttcgggacttacatggggagactgggatgaatcggtatttgatttacatcctgacattattcttggagctgatgtactttacgactcagcaaatttcgatgatctgttcgcgacggtgacctttcttctcgaaaattcttctggggcggttttcataaccacataccacaaccgcagtggtcatcatctgattgagtttttgatggtcaagtggggtttgaagtgtttgaaactgctggatggtttctccttcctaccgccatgtaaggctgctttacttcaggggaatattcagcttgtcgaaattgcgcttgacaaggaaaaacataaatgaccctgagtttgattacaggagttgacgaaaagcacagagaaatggaatgccatatttggtcctctgcatacatgtacgagcaactccatgtcaagccatccgtttggactgtcatcataaggatgttcttttaattaaaagaaactcatggggagcatcgttgttcgaatagcctatgcatgcaagaaaaaacagaaaatgttagcagatatgtactcttttgtgacatctgtacagaacatgttggtttcctgaaaaaagatgcagaatgtccttttcttgatgtattcgaaaaaatgagctaaatgcataactttacacaacttctttaagtttcttt

SEQ ID NO: 53854 - DNA, 5239 bp, Zea Mays
  misc_feature (1)..(2): n is a, c, g, or t
nnatatggctgataatggtgatgccaaagggggatctggcgcctatgcaattaatatagagaattttagtaagcggctgaaggtattctatgaccattggaaggagcacaagtctgatctttggggctcgtctgatgctattgcaattgctaccccacctccttctgatgatctccgttatttgaaatcatcagccctggatatttggttacttggatatgaatttccagaaacaataattgttttcatgcacaagcaaatacatgttttaagcagtcagaagaaaggaaatcttattgggaccctcaagaaggctgcaaacgaggctgttggtgttgacattgtgttgcatgtgaaaaccaagaatagtgatggtgctgacttgatggatgacatagtgcatgctgctcgtaatcaatcaaaatcagataagccagttgttggacacatagccaaagaggcacctgagggtaagcttcttgaaacatggataaaaaaattatctggatcaggcctacgactcgttgatgtaacaaacggcttctctgagctctttgctgtgaaggacaccacagagatcacatgtgtgaagaaggctgcttacttaacttcatccgttctgaaaaattttgtgattcctaagttggagaaggttatcgatgaggagaaggaagtctcacactcatcgttgatggatgacgcagagaaggctattctggacccactaaaggtcaaggtgaaattgaagcctgataatgttgatatatgctaccctccagtctttcaaagtgggggtaagtttgatctaaagcctggtgcgtctagcaatgacgagtacctgtattatgattcagcaagtattatcatctgtgcaattggttccaaatacagtagctattgctcaaatgttgctcggacatatcttatcgacgctacccctacacagaataaagcatatgagacccttaggaaagctcatgaagctgctattcaacaagtgaaaccaggcaatcagatgagtgcagtttatcaagctgcagtggctgtgattgagagggatgcacctgaacttcttcctaatctaacaaagtcagctggaactggaataggccttgaattccgagaatctggcttaaatctgaatgccaagaatgatcgtaggataaaaaagggaatggtttttaatgtatcccttggtttgcataacatccaggcagaaacaaccagtgagaagacaaagcagttttcactattattagctgatacagttttagtcaatgaaagaggacatgagatcttaacagcaccctgctccaaggcattcaaagatgttgcttattcgttcaacgaagatgatgatgctgttgctgctgaggttaagataaagtcgaagaccatagatgttatgccaaccaaggcaactctcaggtcagacaaccaggagatgtcgaaggaagagctcaggagacagcaccaggctgaacttgctcgccagaagaatgaagagactgctagaaggcttgctggggttggtactggatctggtgacggacgtggtcctgcgagggcttcaaatgagcttgttgcatataagaatgttaatgatgtaccatttgtaagagatttggtgatccaagtagatcagaagaatgaagctgtcctcttacctatttatggtagtatggttcctttccatgtttctactgtcaagagtgtgacaagtcaccaggacaaccgcacctgcactatccgtatcttcttcaatgtgcctggcatgccattctcaaatgatagcaagtttaattctcaaggtgctatctatctgaaagaaattacattccgctcaaaagatccacggcatagcagtgaagttgttcagcagatcaaaacattgaggaggcaagtggcatcaagggagtcagagagagctgaaagggcaactcttgttacccaggagaaacttcagattggaagcaacagaatgaagatgatgaggctttctgatgtgtggatacgacctgcatttggtggtcgtgggaggaagctcacaggaaatcttgaggctcatttcaatggtttcagatattctacttcaaggtctgatgagcgtgtggacatcatgtttggaaatataaagcatgcctttttccagcctgcagagaaagaaatgattactctccttcacttccatttgcacaaccatatcatggttggaaacaagaagacaaaggatgttcagttctatgttgaagttatggatgttgtacagacgcttgggggcagtagaagatcggcacttgatcctgatgagattgaagaagagcagcgtgagagggataggaagaacagaataaacatggatttccagaactttgtgaacaaggttaacgaccactggtcgcaaccacagttcaaggggcttgacctggagtttgatgtcccccttagagagcttgggttccatggtgtcccatataaagcttctgctttcattattccaacttctacatgtttggttgagctgattgagacccccttccttgtggtgagcctgagcgagatagagattgttaacctggagagggtgggctttgggacaaagaacttcgacatggctatcgtgttcaaggatttcaagaaagacgttctccgcattgactccatcccttcagcatcgcttgacgcgataaaggaatggctggacacaactgacctcaagtactatgagagcaggctgaatctgaactggcgccctatcctgaaaactataatcgatgatcctcagaagttcattgacgatggcggctgggagttcctgaacatggaggcgagtgactcagagactgaggacacagaggaatcagaccaaggctatgtgccttcagacgctgagcccgaatccgagtcagaagatgatgactctgacagtgagtccttggtggaatctgatgatgacgatgaggagtcagacgaggactcagaggaggagaagggcaagacctgggaggagctggagcgtgaggcaagcaacgcggaccgtgagcacggtgcggagtcggacagcgaggaggagaggaggcgccgcaaggcaaagaccttcggcaagtcgcgtgcgccggagcgcagcagcttcaagggagcgccgccctccaagaagccaaagttcaggtgaatgctgccttcggcaattcgctcgtgccaaagtgcagcagcttcaagggagcaccacctccaagaaggcagctctggttaatgggactccttgaagctttggcccccggagtagacgtgtctgtaggagtgtggtttgttatatctagattatctgcagtagcttagtccatctaaatgaaatgtgacagctgaactttggaagtcgcatcattggggaaacgaaatttaagtcgattgatttgttaatgccctcgttgatgtaatatttcccttgttcggtggatttccggtctgtataatatttatgcacgcttgcactttatccatggtatttgtatacccgtataaggcagcatggaggatgtttcttgcatgtggacgcattgattgatatatatatatatttaaggttcttttttttttctttttgttgcatctggttgtcgttgtaacagtgtacagccgcaatttgtttgccactaagggtctgtttactgattaacttgtctcattttacctaacttttctatctaagattagttcttcgatccgaaaaagtaactttatataatatgtggcgtaattaactcactttgcctaacttttcaatctaagattagtttttcgatccgaatgagtaactttatgcaagatatggcgtaattagccatcaaccaaacagtccgtaaaagacttgttcctcgaatgttttggtgatggcatctgcctatgatttgaagcccgctccgctgcgtttacagctgggtgtgagtttcctggccgcatgaagcatgaaaagatgggattcacagcggaactttcgttaggaatttgatggcaatcaagtttagttaaatttaattttcaaggctaggattctatgtgcacagccctgatatgcaccggatatcatcccgaatttatattgttatacatatacgaaaagcagtgaactctgctctgcaatcgtctgcatcgtcgtccttgctctctgttgcggcgacacgcacaggccagagcccgtcgggatggaaggcggcggctccggtgggcgggccgctgccgtcgtccccgcgcgtatgaccaccttgtcccggcactacttcggcggcagcgcgtctgagcgccaccacgacctccgcgtggacatcgtcgagaacatccaggaggactacggcatgtttgtctggccatgcagtgtcatccttgccgagtatgtgtggcagcacagatcacggttctctgcttccagagttgttgagcttggtgctgggacctcactgccaggattagtagctgcaaaggttggggcagatgtaacactaacagacattgcgcagaatgcagaagtactgaacaacatcagaagcatatgtgctctcaatgacgccaattgtactgtttcgggacttacatggggagactgggatgaatcggtatttgatttacatcctgacattattcttggagctgatgtactttacgactcagcaaatttcgatgatctgttcgcgacggtgacctttcttctcgaaaattcttctggggcggttttcataaccacataccacaaccgcagtggtcatcatctgattgagtttttgatggtcaagtggggtttgaagtgtttgaaactgctggatggtttctccttcctaccgccatgtaaggctgctttacttcaggggaatattcagcttgtcgaaattgcgcttgacaaggaaaaacataaatgaccctgaggagttgacgaaaagcacagagaaatggaatgccatatttggtcctctgcatacatgtacgagcaactccatgtcaagccatccgtttggactgtcatcataaggatgttcttttaattaaaagaaactcatggggagcatcgttgttcgaatagcctatgcatgcaagaaaaaacagaaaatgttagcagatatgtactcttttgtgacatctgtacagaacatgttggtttcctgaaaaaagatgcagaatgtccttttcttgatgtattcgaaaaaatgagctaaatgcataactttacacaacttctttaagtttcttt

SEQ ID NO: 53855 - DNA, 1055 bp, Zea Mays
atgctgtacactgacttcgacctgctgaccgacttcccggagccgacgctggacttcctcgcggacatccctgaggagaagctgctgctgccgttccccgcggggagccccgaggagtgcccgtttgacacggaggtggcgttgccgacgaggtggcagaaggtggacgacttcttccaggacatcaccgagctgttccagatcgacccgctgcccgtcgtccagcctgccatcgagactcgagatgtctcgctctgtaacaggacccagaggaggagcacgccattccggctccatgcccgtggagtcagagaccgagaacaacaacctcgatatggaaagcaagttgccactgcctccatcgcagtcgcagcgaccaccactaactgcttctgtgagaggtagtagcagcaactatgtttcaacaggaaacaagagaagagaaagtgaaagctctatgggtgtgccaattggtcaatcgtcatcttcagcaccataagctgaaaataaagatgcaaatgaattggttgtcgcaggcacaagtaatgcttgtaatatgctgtagctgttgttgatatagcgagccttgatgacgatgacgaggacatgcaagaggagatgactggaataggaaagagacaaaagtggcacacatctattgtgtggaagtactttaccaaagaaactgtgaaagtggaggtgaatgacaagaagtatgagcagttgtggtcctactgcaactttccaaaatgtaagcagatatatagagctaagtctaatcatggaacaaatgcattccgcaaccatctaaggtcacatcacaatattgtcaaaggacagctagaactaaaggcagaaaagtatcatggaaaagatgacaccactattcagccttttaggtatgatctagatgttagtcttagaaaattctatatcgtaatagacttgattctgagatggtggaagctctaatatgcaccaaggattggatcaatgcagtaagaaaaggtaaatgtctgtccaattattcttatgtatatactagtataatgcct

SEQ ID NO: 53856 - DNA, 1800 bp, Zea Mays
tatcttatcttaaggctatctgttcgtatgataaaaaaaagtattccttttgaaacaaaaaagaagacaaaatgaatggatcaaataaaaggagaaaaaataaataaaaatagcggttcctccgcgggtaacgggcatcccgccatcgctctgcacttctgcagtctgctctggcttataataaccggcaccttctccttcctccgatctcctcgcctccctcctctctcccagatccgtctcccggcgtcagacgcgcatctccagcaatggcggacgagaagcttgccaagctgcgcgaagccaccgccggcctcacgcagatcagcgagaacgagaagtccggcttcctcagcctcgtcggccgctacctcagcggcgacgaggagcacatcgagtgggccaagatccacacgcccaccgacgaggtggtggtgccgtacgacaccctggagtccccgccagaaggcactgaggcgaccaagaagctgctcgacaagctcgccgtgctcaagctcaacggcggcctggggaccaccatgggatgcaccggacccaaatcggtcatcgaagtgcgcaacggatttactttcctcgacctgattgtcatccagatcgagtcactcaacaagaagtacggcagcaatgtgccgctgcttctgatgaactccttcaacacccatgacgacaccttgaaaattgttgagaaatacacgaattcgagcattgaaatccacacattcaaccagagccagtaccctcgtgtggtagctgacgagttcttgccatggccgtccaagggaaagactgataaggatggctggtaccctcctggccatggtgatatcttcccatcattgatgaacagtggaaagctcgatttactactctcacagggaaaagagtatgtgttcattgcaaactcggataacttgggtgctattgttgacatgaagatactgaaccatttgatccacaagcagaatgaatattgcatggaggtcaccccaaaaactttggctgatgtaaaaggtggcacactgatctcctacgaaggaagggttcagcttctggagattgcacaagtgcctgatgcacatgtgaatgagttcaaatcaattgagaaattcaagatattcaacaccaacaatctgtgggtgaacttgaaggccatcaaacgccttgttgaagctgatgcactcaagatggagatcattccgaatcctaaggaagtcgatggtgtgaaagttcttcagctggaaacagcagctggtgcagcaattaggttctttgaccatgccattggtatcaacgttccaaggtcccgcttcctaccagttaaggcgacatcagatttgcagctagtacagtctgatctatataccttggttgatggcttcgttacacgtaattcagccagaacaaatccatcaaatccatcaattgaacttggtcctgagttcaagaaggttgggagcttccttggtcgcttcaagtcgatacctagcattgttgagcttgacagcttgaaggtttccggtgatgtttggttcggttctggaattgtactgaaggggaaagtgaccatcactgcaaaacctggcgtcaagctagaaatcccagacggagcagtgattgggaataaggatatcagtggccctgaggacctttagataagaatcagcgaatcagcaaggaggctcacttcgccaagtggcggatcatttttcgtgtttttttcctgtatattcaaacaggtactggcgcagcgtgatgccaaagtaaatgagcagggcgagg

SEQ ID NO: 53857 - DNA, 1689 bp, Zea Mays
tatcttatcttaaggctatctgttcgtatgataaaaaaaagtattccttttgaaacaaaaaagaagacaaaatgaatggatcaaataaaaggagaaaaaataaataaaaatagcggttcctccgcgggtaacgggcatcccgccatcgctctgcacttctgcagtctgctctggcttataataaccggcaccttctccttcctccgatctcctcgcctccctcctctctcccagatccgtctcccggcgtcagacgcgcatctccagcaatggcggacgagaagcttgccaagctgcgcgaagccaccgccggcctcacgcagatcagcgagaacgagaagtccggcttcctcagcctcgtcggccgctacctcagcggcgacgaggagcacatcgagtgggccaagatccacacgcccaccgacgaggtggtggtgccgtacgacaccctggagtccccgccagaaggcactgaggcgaccaagaagctgctcgacaagctcgccgtgctcaagctcaacggcggcctggggaccaccatgggatgcaccggacccaaatcggtcatcgaagtgcgcaacggatttactttcctcgacctgattgtcatccagatcgagtcactcaacaagaagtacggcagcaatgtgccgctgcttctgatgaactccttcaacacccatgacgacaccttgaaaattgttgagaaatacacgaattcgagcattgaaatccacacattcaaccagagccagtaccctcgtgtggtagctgacgagttcttgccatggccgtccaagggaaagactgataaggatggctggtaccctcctggccatggtgatatcttcccatcattgatgaacagtggaaagctcgatttactactctcacagggaaaagagtatgtgttcattgcaaactcggataacttgggtgctattgttgacatgaagatactgaaccatttgatccacaagcagaatgaatattgcatggaggtcaccccaaaaactttggctgatgtaaaaggtggcacactgatctcctacgaaggaagggttcagcttctggagattgcacaagtgcctgatgcacatgtgaatgagttcaaatcaattgagaaattcaagatattcaacaccaacaatctgtgggtgaacttgaaggccatcaaacgccttgttgaagctgatgcactcaagatggagatcattccgaatcctaaggaagtcgatggtgtgaaagttcttcagctggaaacagcagctggtgcagcaattaggttctttgaccatgccattggtatcaacgttccaaggtcccgcttcctaccagttaaggcgacatcagatttgcagctagtacagtctgatctatataccttggttgatggcttcgttacacgtaattcagccagaacaaatccatcaaatccatcaattgaacttggtcctgagttcaagaaggttgggagcttccttggtcgcttcaagtcgatacctagcattgttgagcttgacagcttgaaggtttccggtgatgtttggttcggttctggaattgtactgaaggggaaagtgaccatcactgcaaaacctggcgtcaagctagaaatcccagacggagcagtgattgggaataaggtactggcgcagcgtgatgccaaagtaaatgagcagggcgagg

SEQ ID NO: 53858 - DNA, 1429 bp, Zea Mays
cccaaatcggtcatcgaagtgcgcaacggatttactttcctcgacctgattgtcatccagatcgagtcactcaacaagaagtacggcagcaatgtgccgctgcttctgatgaactccttcaacacccatgacgacaccttgaaattgttgagaaatacacgaattcgagcattgaaatccacacattcaaccagagccagtaccctcgtgtggtagctgacgagttcttgccatggccgtccaagggaaagactgataaggatggctggtaccctcctggccatggtgatatcttcccatcattgatgaacagtggaaagctcgatttactactctcacagggaaaagagtatgtgttcattgcaaactcggataacttgggtgctattgttgacatgaagatactgaaccatttgatccacaagcagaatgaatattgcatggaggtcaccccaaaaactttggctgatgtaaaaggtggcacactgatctcctacgaaggaagggttcagcttctggagattgcacaagtgcctgatgcacatgtgaatgagttcaaatcaattgagaaattcaagatattcaacaccaacaatctgtaaggatcacatttttaaatttcattcttctaaagaaaattgctgatgttacttaatgctactactggtttttcaggtgggtgaacttgaaggccatcaaacgccttgttgaagctgatgcactcaagatggagatcattccgaatcctaaggaagtcgatggtgtgaaagttcttcagctggaaacagcagctggtgcagcaattaggttctttgaccatgccattggtatcaacgttccaaggtcccgcttcctaccagttaaggcgacatcagatttgcagctagtacagtctgatctatataccttggttgatggcttcgttacacgtaattcagccagaacaaatccatcaaatccatcaattgaacttggtcctgagttcaagaaggttgggagcttccttggtcgcttcaagtcgatacctagcattgttgagcttgacagcttgaaggtttccggtgatgtttggttcggttctggaattgtactgaaggggaaagtgaccatcactgcaaaacctggcgtcaagctagaaatcccagacggagcagtgattgggaataaggatatcagtggccctgaggacctttagataagaatcagcgaatcagcaaggaggctcacttcgccaagtggcggatcatttttcgtgtttttttcctgtatattcaaacaggttccatgatattatggagaatattaattgccagtataatccagaaattttacatgtattttactttgagggaaatgttttacacactccagttctgcttattgtccaaaaggaaatttctgtgtcttgaacagaaaaatatcttgcccc

SEQ ID NO: 53859 - DNA, 1821 bp, Zea Mays
tatcttatcttaaggctatctgttcgtatgataaaaaaaagtattccttttgaaacaaaaaagaagacaaaatgaatggatcaaataaaaggagaaaaaataaataaaaatagcggttcctccgcgggtaacgggcatcccgccatcgctctgcacttctgcagtctgctctggcttataataaccggcaccttctccttcctccgatctcctcgcctccctcctctctcccagatccgtctcccggcgtcagacgcgcatctccagcaatggcggacgagaagcttgccaagctgcgcgaagccaccgccggcctcacgcagatcagcgagaacgagaagtccggcttcctcagcctcgtcggccgctacctcagcggcgacgaggagcacatcgagtgggccaagatccacacgcccaccgacgaggtggtggtgccgtacgacaccctggagtccccgccagaaggcactgaggcgaccaagaagctgctcgacaagctcgccgtgctcaagctcaacggcggcctggggaccaccatgggatgcaccggacccaaatcggtcatcgaagtgcgcaacggatttactttcctcgacctgattgtcatccagatcgagtcactcaacaagaagtacggcagcaatgtgccgctgcttctgatgaactccttcaacacccatgacgacaccttgaaaattgttgagaaatacacgaattcgagcattgaaatccacacattcaaccagagccagtaccctcgtgtggtagctgacgagttcttgccatggccgtccaagggaaagactgataaggatggctggtaccctcctggccatggtgatatcttcccatcattgatgaacagtggaaagctcgatttactactctcacagggaaaagagtatgtgttcattgcaaactcggataacttgggtgctattgttgacatgaagatactgaaccatttgatccacaagcagaatgaatattgcatggaggtcaccccaaaaactttggctgatgtaaaaggtggcacactgatctcctacgaaggaagggttcaggtgggtgaacttgaaggccatcaaacgccttgttgaagctgatgcactcaagatggagatcattccgaatcctaaggaagtcgatggtgtgaaagttcttcagctggaaacagcagctggtgcagcaattaggttctttgaccatgccattggtatcaacgttccaaggtcccgcttcctaccagttaaggcgacatcagatttgcagctagtacagtctgatctatataccttggttgatggcttcgttacacgtaattcagccagaacaaatccatcaaatccatcaattgaacttggtcctgagttcaagaaggttgggagcttccttggtcgcttcaagtcgatacctagcattgttgagcttgacagcttgaaggtttccggtgatgtttggttcggttctggaattgtactgaaggggaaagtgaccatcactgcaaaacctggcgtcaagctagaaatcccagacggagcagtgattgggaataaggatatcagtggccctgaggacctttagataagaatcagcgaatcagcaaggaggctcacttcgccaagtggcggatcatttttcgtgtttttttcctgtatattcaaacaggttccatgatattatggagaatattaattgccagtataatccagaaattttacatgtattttactttgagggaaatgttttacacactccagttctgcttattgtccaaaaggaaatttctgtgtcttgaacagaaaaatatcttgcccc

SEQ ID NO: 53860 - DNA, 2482 bp, Zea Mays
gactggtggaccagacccagcgaccgaacccgactcgatttcccaactccaaacctccttgcccctccgtgactcgccttcctctcctgactcctccgccttggcccgccgtctctcgccgccccggccccaacccctctcggactaggtgagggggccggctgcccagcgtcgtcgccggcgagatcttcccaccgccgctggcaatggctgccccgcacgacgaggccgcggcgtgggcggaggaggcggcgcgccgggtctgggccggcgccgtgccgctccaggtccacctccacgacgccgacgtcaccgcgctacccccgccgccgcccttcctggtatgcatggtcgcttagctgttaattaagaccacagctgctcaatttctagggtgctacagcctacagcagcgcacattacctaccggccgcccgtgggagattcagttgctggcttgctgctgtaggatttgcctgtcttttgtggctgatacccaactacgggtccaattaatattttgaagttgaatatcattgggtcgtcatgactcctgagccaatttctcggggcttacaaggtcctttctgctctatatctagaactagaacctacccccttccatttatatgaggaactggatttttttccttccgatccctgcaaagttttatgcagtgcccagtggtaggtttagtacacaaggctagctccgttgctgctacaattataacgcaggagaatccgtggtgcctgtctcgttaacttctgactgagcgtgattttcagtcttataatcatgtgtgcgctctaatttgtattttcttggcttgtttagtttgcatcttatgtgcactcagatggagtatactttataccagtgtttctacggaattcattgaaaattcatatatttatcctttcctaccctcaagtacaacaagagtgcaaagctactattcatcttttgtttctgtgcaaaggcctatctttccctttacaggattgttgctcgttgagaaaacttgggagttttggcgtatgcttttagtcctccatgatcttatctgtttcatttggaccatccttttgtcttgaacagactttgggaccaagaattgggtatttgcccctcttgatacctgttataagggctcatttcagcaatgcactcccacctggtgttgacactgtttggtttgaatataaagggctgcctttgaaatggtatgtaccaattggtgttctttttgatcttctatgtgcagatccagaaagaccatggaatctaatagtccattttaggggatatccctcagaaatcttgtcaccatgcgagggtgaagatagtgtgaagtggagctacatgaattccctgaaagagcattctctctctctattcaggccaccttcatcattactgggaacagtaagagtgtgatgaatatgtcgcatgctgatcaagtcgctctgtgggaatctgtaatgaaaggtaacttagatgggtataaaaatatctccaccaggcttaagcttggaccatttgaagatgatgtgttagtacggacagcctccgtggagcggcaacgtcaacaaaattctgatgaacctgaatctcctggatctagcaaaccgtgccgcagaccttgctggctctgatcaattaatctatggttaggcagggtccctgttcgattatacgtacgcaatgttcaagaagaccttgagtacatagaacatgcagttcctgtcagtgactgggaaaacgtgtcctacataaatcggccatttgagactcgcaaggctgaaggtagaagctacatcaccctggaacatgcgttgcaaacattgcttccggagttcttcagctcaaagcccccaggcagcgctgacggctcccaacacgcaggcgcaatggacgcagccgcagacagttcagatgccaccaactcttcaagtcgttctcaggaggcagagcaagccctggcaagtccagcagaggcgggttctgccaagagagcgaaagtgaagctggtgagggtgcaaggtgttgagctcgacatggacatcccgttcctgtgggtcgccgaccacctcaagaaccccgaatactacgtccacatctgtgtatacgtcggcactagaaaacaatagagataagagtacatggggaaattgttagatactgcgttaggagtgtgtcccagaaatcattttctttgttctttggttattacatgtgctatcctgtgtgcagatacagacgctgaaatttgtaacccttttggatgcacagtcatggaaggatggaattggatggtgaaccattttgtgtgtgtgtgtgtgtgtgtatccgatcgacgtattgcaatatatatcctgcctggagcatagcagaattctttcgttgtagaacaaacacatgagctctgaacctgaccattctgatggtcgctgtcgctgacatgaatgactgaatgcc

SEQ ID NO: 53861 - DNA, 2428 bp, Zea Mays
ctctccctgactggtggaccagacccagcgaccgaacccgactcgatttcccaactccaaacctccttgcccctccgtgactcgccttcctctcctgactcctccgccttggcccgccgtctctcgccgccccggccccaacccctctcggactaggtgagggggccggctgcccagcgtcgtcgccggcgagatcttcccaccgccgctggcaatggctgccccgcacgacgaggccgcggcgtgggcggaggaggcggcgcgccgggtctgggccggcgccgtgccgctccaggtccacctccacgacgccgacgtcaccgcgctacccccgccgccgcccttcctggtatgcatggtcgcttagctgttaattaagaccacagctgctcaatttctagggtgctacagcctacagcagcgcacattacctaccggccgcccgtgggagattcagttgctggcttgctgctgtaggatttgcctgtcttttgtggctgatacccaactacgggtccaattaatattttgaagttgaatatcattgggtcgtcatgactcctgagccaatttctcggggcttacaaggtcctttctgctctatatctagaactagaacctacccccttccatttatatgaggaactggatttttttccttccgatccctgcaaagttttatgcagtgcccagtggtaggtttagtacacaaggctagctccgttgctgctacaattataacgcaggagaatccgtggtgcctgtctcgttaacttctgactgagcgtgattttcagtcttataatcatgtgtgcgctctaatttgtattttcttggcttgtttagtttgcatcttatgtgcactcagatggagtatactttataccagtgtttctacggaattcattgaaaattcatatatttatcctttcctaccctcaagtacaacaagagtgcaaagctactattcatcttttgtttctgtgcaaaggcctatctttccctttacaggattgttgctcgttgagaaaacttgggagttttggcgtatgcttttagtcctccatgatcttatctgtttcatttggaccatccttttgtcttgaacagactttgggaccaagaattgggtatttgcccctcttgatacctgttataagggctcatttcagcaatgcactcccacctggtgttgacactgtttggtttgaatataaagggctgcctttgaaatggtatgtaccaattggtgttctttttgatcttctatgtgcagatccagaaagaccatggaatctaatagtccattttaggggatatccctcagaaatcttgtcaccatgcgagggtgaagatagtgtgaagtggagctacatgaattccctgaaagaggccaccttcatcattactgggaacagtaagagtgtgatgaatatgtcgcatgctgatcaagtcgctctgtgggaatctgtaatgaaaggtaacttagatgggtataaaaatatctccaccaggcttaagcttggaccatttgaagatgatgtgttagtacggacagcctccgtggagcggcaacgtcaacaaaattctgatgaacctgaatctcctggatctagcaaaccgtgcagggtccctgttcgattatacgtacgcaatgttcaagaagaccttgagtacatagaacatgcagttcctgtcagtgactgggaaaacgtgtcctacataaatcggccatttgagactcgcaaggctgaaggtagaagctacatcaccctggaacatgcgttgcaaacattgcttccggagttcttcagctcaaagcccccaggcagcgctgacggctcccaacacgcaggcgcaatggacgcagccgcagacagttcagatgccaccaactcttcaagtcgttctcaggaggcagagcaagccctggcaagtccagcagaggcgggttctgccaagagagcgaaagtgaagctggtgagggtgcaaggtgttgagctcgacatggacatcccgttcctgtgggtcgccgaccacctcaagaaccccgaatactacgtccacatctgtgtatacgtcggcactagaaaacaatagagataagagtacatggggaaattgttagatactgcgttaggagtgtgtcccagaaatcattttctttgttctttggttattacatgtgctatcctgtgtgcagatacagacgctgaaatttgtaacccttttggatgcacagtcatggaaggatggaattggatggtgaaccattttgtgtgtgtgtgtgtgtgtgtatccgatcgacgtattgcaatatatatcctgcctggagcatagcagaattctttcgttgtagaacaaacacatgagctctgaacctgaccattctgatggtcgctgtcgctgacatgaatgactgaatgcc

SEQ ID NO: 53862 - DNA, 128 bp, Zea Mays
gcttagctgaaattcagttatttgggtcacataaaggacctaacacgcgggcatgttcattttgcttctcacacatttcgtcgaacaggcggcttgcatcgcttggggagctgctgtcatgacgccct

SEQ ID NO: 53863 - DNA, 1775 bp, Zea Mays
atggtgcgcccgtccgcgggcacgctggccatcgtggccgggtccttcacgtccacctccagccccaggtggtggagcccctgccgggccttgatggccgcgcgctccgccgccggcagcgcgtcccactcgggccgccacgtgcacaccgtcgctggcccgtacgtctccgtcagcccgtacgagtggatcaccaggaacccgagctcctccatccggaacagcacctgcggcgccggcggcgcgccgcccgtcatcacagtcaccggcctcttcctccccgcgcccagcggcgccctctcctccgccgtggcgttcaccaccatgctcagcaccgtcggcgcgccgcccatgtgcgtcaccccgtgcgccgccacggccgcgaagatggcgcccgagttcaccttgcgcaggcacacgttggtgccgccctgcgccgccacgccccacaccaggcaccacccgttgcagtggaacatgggcaccgtccacaggtacaccggcagcgccgtcatgtcgttgaggagcaccgacgacagcgagttcaggtacgcgccgcggtgggtgtacaccacgcccttgggccgcgacgtcgtccccgacgtgtagttcagcgcgatcggctcgttctcgtcgtccggccaccggatcaagaactctggatcgccgcctctgctgctgctgaggaggagggcctcgtactcgtagcaccgatcgacgcctgggatcttgtcgtttcctgtcgccgctgacggcggctcgtcgagcgcctcgttgattagtaccacggcgggcaccctgctcgctccgccggcctgctgggagatgaggcggagcgcctcccgggcgacgcccagtagcgcggcgtccacgaacacgaccttggcctccgagtgctgcagcagcacggacgccatgccggcgtcgagccgcgagttgagcgcgcagatcacggcgcccgccatgggaatgccgaagtggagctcgcagaaggccgggatgttctgcgcgaacaccgcaacctgcacgggggcagcaacggctgcggttaggaccggccggccagttcgattcgattcggtactagaagcagcagcaaattcagcccgtccactgccgatgagaacaacactatctacctactcgggcaaatcgagagagacagacaggggatggagaacagcaagagcagtaaaagtgaatgcttggacggcggcaggtagataacgcccgaatctaccgctccgtacttatcgcacggaagaggaggcaaggcaacggctggacagagacttaccacgtcacggcgcgcgacgccgagccccgcgagcgccgcggcgaggcggaggcagcggtcccgggtctgccgccaggtgcgcggcggcggcgcggcggcgtgtccggcggcgacgacggcggggcggtcggggtagacgagcgcggtgcgctcgaggaagctgatgggcgtgagcggcgcgtggttggccgcgcacagcacggtgccttccatcgctcagagttgggcggcgcgccggcgcggaacagaggggaacgaacggccacactggagtggaggaggcagtctggaacggaatggcagcggaagtgggaatataataacaacaaaatccagcgacagcagcagcgcgagacgacgacgcgtaatcgacgagttgacgcgcttggtggcttgatgccgatgccgatgctgacggtgacggacggagtggaggaagaagcaagctgctctagtgctctctgtctctaatgttgtg

SEQ ID NO: 53864 - DNA, 214 bp, Zea Mays
gtcattgccaagtgccaacgccattccgttgtctctactactacatgcagcatctcttaaaaaaaaaactacaggcagcatcacattcacaccgcgaggtcagaatcggacacacgcataaacgaacatgcagatgcacatgcttgcccccatttttattgagagcattgaaggttgatactgtaaattatattactgaaatgacgaatctgta

SEQ ID NO: 53865 - DNA, 1106 bp, Zea Mays
ggaatctctatttgttttgacattgtgtgcttagtaagggtttgtttttccctcctagattatataagttggattatggtggaagggtagaaaggtaaaatatcactttatgaccccaaataaactggaataagctagtattgagtagcttatttcagcttatttgtgatcataaagtgatattttagcctcctgtccttccaccataatctagcttatataatttaggagtgaaacaaacatggcctaattgtgagctgggacaaataaatgtttgtaggttttgcggttctagccagccttctagacatatgaatcttttgttgtgttcagcgtttttcccgtatggagcttaccttttttccttacagaatgtttgctcgaaattttgcagtggggtgattgggtttctgttatgcgccaaggatggcccaccggtcaactttctgactcctgtaaatccaattgaagaagtggaaggagctactaaagcgggaagggagatcaggttttataattcagagatgcatatggcagcgtttgttcttccgacatttgccaagagggagctagaagcatactgtgcttccacggaaacggagcaggcggaggaagtagcggccacggcaccacaaaagctaactgcggcgcccaagcgtggaattaccaccgcatcctagctgttggatacacacatagccatgtactattattatcacgcacgtaatctaagcatcgaagtcgagtgcgtgcgtgttgggtgggggtacgcgcatcgcggtttgacgcgcgatgtatttgataataattcgtgctccgaggtaccaacaagcaacgatgagagaagcattccacctttacactccccttttaggtctggatactcattattgatctcaatccacatgagttgaggtggattgggggtgtttaacagggctttttggtttgaaagagattagagaggattaaatttctttctatacaaatttgtatatgagatttaatttttctcaatacacccttaatcgaacaaacccttagtagatcagccagatgatctatgctatgatatatatataacatgctcaagtgttttgtgataa

SEQ ID NO: 53866 - DNA, 1407 bp, Zea Mays
ggaatctctatttgttttgacattgtgtgcttagtaagggtttgtttttccctcctagattatataagttggattatggtggaagggtagaaaggtaaaatatcactttatgaccccaaataaactggaataagctagtattgagtagcttatttcagcttatttgtgatcataaagtgatattttagcctcctgtccttccaccataatctagcttatataatttaggagtgaaacaaacatggcctaattgtgagctgggacaaataaatgtttgtaggttttgcggttctagccagccttctagacatatgaatcttttgttgtgttcagcgtttttcccgtatggagcttaccttttttccttacagaatgtttgctcgaaattttgcagtggggtgattgggtttctgttatgcgccaaggatggcccaccggtcaactttctgactcctgtaaatccaattgaagaagtggaaggagctactaaagcgggaagggagatcaggttttataattcagaggtcagttttcttcaatcgatcgcatatgatttcttgtgccaatattttttttttgattcagcctgtgctgccctttgtcctagcatgcagaagtttatcttaacgccatgattaacagcttttatgactccgtccgtagtaaccccgagtctgtgtttcatttcatcatttgtgatatgggaatgttcgttactgttctctctctctcttttggctcaccggctgaagcccgttcaactgcaaccctcatgtgagatttctcgcatcaaagctcctttgcctaactttcgttgttgaacagatgcatatggcagcgtttgttcttccgacatttgccaagagggagctagaagcatactgtgcttccacggaaacggagcaggcggaggaagtagcggccacggcaccacaaaagctaactgcggcgcccaagcgtggaattaccaccgcatcctagctgttggatacacacatagccatgtactattattatcacgcacgtaatctaagcatcgaagtcgagtgcgtgcgtgttgggtgggggtacgcgcatcgcggtttgacgcgcgatgtatttgataataattcgtgctccgaggtaccaacaagcaacgatgagagaagcattccacctttacactccccttttaggtctggatactcattattgatctcaatccacatgagttgaggtggattgggggtgtttaacagggctttttggtttgaaagagattagagaggattaaatttctttctatacaaatttgtatatgagatttaatttttctcaatacacccttaatcgaacaaacccttagtagatcagccagatgatctatgctatgatatatatataacatgctcaagtgttttgtgataa

SEQ ID NO: 53867 - DNA, 743 bp, Zea Mays
gaggaaccagtcatagcctgacaaaccattatggggtgattgggtttctgttatgcgccaaggatggcccaccggtcaactttctgactcctgtaaatccaattgaagaagtggaaggagctactaaagcgggaagggagatcaggttttataattcagagatgcatatggcagcgtttgttcttccgacatttgccaagagggagctagaagcatactgtgcttccacggaaacggagcaggcggaggaagtagcggccacggcaccacaaaagctaactgcggcgcccaagcgtggaattaccaccgcatcctagctgttggatacacacatagccatgtactattattatcacgcacgtaatctaagcatcgaagtcgagtgcgtgcgtgttgggtgggggtacgcgcatcgcggtttgacgcgcgatgtatttgataataattcgtgctccgaggtaccaacaagcaacgatgagagaagcattccacctttacactccccttttaggtctggatactcattattgatctcaatccacatgagttgaggtggattgggggtgtttaacagggctttttggtttgaaagagattagagaggattaaatttctttctatacaaatttgtatatgagatttaatttttctcaatacacccttaatcgaacaaacccttagtagatcagccagatgatctatgctatgatatatatataacatgctcaagtgttttgtgataa

SEQ ID NO: 53868 - DNA, 5323 bp, Zea Mays
acgtgcgcgccaccacctcccatgcaagggcagtcgtagcagcacggccgtctcgtgcccgtgcccgtgcccgccgcgccgcttttcgatcgacgcgatacgcccacccgcagcgccgttctctttggcagatccatggccgtggatagtcccccgccggcgtcaccgcagcgacggcagtccgaggccggcgcgggcgggcggcggacggacaggcacggccgacgcctcgaggtgtacaacgaggtgctcgtccgcctgcgctcctccgccgcggtctctccggccttcgaggacgcgctctgggcccacttccaccgcctccccgcccggtacgcgctggatgtgaacgcggagagggcggacgatgtggtcacccaccagcggctgctccaggaggcgcgcgatccggaacgccggcccgccttgtccgtgcgcgtcgtgcaggtttctaggattatcgatactgatgtgggcgatccatatgatcctgacatggaggcagttgcttcgaatcgtcctgaggctaatgaaacggttcacccacctccagcatttggttcttcctccaatctagaggcgcttgcgcttgaaacaagtgagagtgatgtaaggagcactggtgatactgatcacagtgtacatctaatttccaggccgatgcacgagataacttttgcaacgattgataagccaaagctccttagtcagctgacttgtttgcttgctgagctcggtcttgacatccaagaagcacatgcattttcaacaattgatggctactcattggatgtatttgttgtcactggatggcatcttgggagtactgagcagctacaaggagatttgcttcagaaatttcacaaaatcgagctttctgtacagacacaagcttggcctttatccagctcattatcaccgtcatcagaaggtcagcaaggtggagaaagtatgtcatctgcaagtgttgaaattccaacagatggtgtagatgtttgggaacttgaccttaagctgctcaagtttggaagcaaagttgcttccggatcaaatggtgacctgtaccgtggaacatactgcaatcaggatgtggccatcaaagtagtgaggcctgagcgcatcagtgcagatatgtaccgagattttgcacaagaagtgtacatcatgagaaaggtccgtcacaagaatgtagtgcagtttatcggtgcatgcacaagacaaccaacactgtatattgtaacagatttcatgccaggagggagtgtctatgattacctccataaaaataataatgctttcaagcttcctgaaatactgaaagtggcgaccgacatcactaaaggaatgaactacctgcaccagaacaacataattcaccgcgatctcaagactgcaaatcttctcatggatgaaaacaaggttgtaaaggttgcagactttggtgttgcacgagtgaaagaccaatctggagtgatgactgcagaaactggaacttaccgttggatggcacctgaggtcatagaacataagccctacgatcacaaagcggatgtttttagctttgctattgttctttgggaactgctaaccggcaagatcccttacgagtaccttacaccactgcaagcagcaataggtgttgttcagaagggtattaggccaacaattccaaaagacacacatcccaagctcatcgagcttcttcagaaatgttggcatcgagatccagctgagaggcccgacttctccgagatactggagatccttcagaaactctccaaagaggtgagaactgacactgagggtcgccacaaaacgaagtcagggttcctttcagcgctgaagagaagccactgaagggcactgggcacccagccacctatgatagtttactccaatgtaatgttggtgattgatgcacgctgtaatcacaatcacagcatgattctgaagttctgatgcaagttgaatagtgcgctgtagttgtacagtcacgattttctcgtgtaattgcagttgtctctctctttttggctcaatttgcccttttgttttgttgctttgccctcatgtaatcgtagatgatatttgttggatgttctaacgactggcatagattgaagtgtgctgaaataaattcctgctggtgagaaacagcgcgcttcgtgtcagttaactcggagatttatcatagatgagatgaatttactgatgcagttgactacttgtacagaagcgtcttcttgaaatgactatttcagcgaacttttaatcaaacgaatgatgcattttgacttctggcacaatctcgagtaaaacaggattgtaaaccgactgaccatcatcatcaaatcgcctttcgctgaataataataccccaaacctcagcaaatcaaagattcgacaaaaaaaattacatgtccaactacaaattcgagctagctactgtatctagctatcattcatcagtcatcacctttgagcttcctgaccttgtcgaggaatgcttgacggccggggaaaggattggcgccctttccgcctttccccggcgtcctcttctcgtcgagcgtctcgccggcgcggctactctggcccagccccagaatctccttgctggccatcctgatctgagcctgcttcctggccgacgacgatcccaggacgccgccgtccgccacgccagcatgcaccccgagcatgtccatcttggccgtcctcacctgctcctccctcctcgtccgcacccgctccctcctcttgtcgcgcttccccacggcgccgcccgggtcagccccggcggcggcgccgaacagggagccgcccttcttggcgccgccgggggagctgttgctattgctgttgctttgcttcgtccgggcgcccttccttggaatgcggccgccgtaggatgtgccgaggaggcggaggtcgaggcggccccacccttcctcgtcggagaggtcccacccgaagcgctcggccatctcctggagcggcccgtcgccgtcggcgtcgtaggcgtagtcgtagccgtcggcgtcgccgcggaggaagcggtgcgcgtgctcccactcgacgcggtcgacgtacacggggtcgtcgaggacggcgcgcgcgaggcctgcccagggcgcggtgtccccgtagtcgagctcggccgcgacccaccggaggtacgacggcggcagcgtgcccagcatctggcccctgtacttgccgaactcgatcacgcggtccctcgccggccgagacgacggcgccggcgcaggaggaggcgtgggcgccggtcccgctctcgccggcctggcgcggcaccggcaccggcgcgcgcgcggtggtgggtggtgaggggagggaggcggatgaggtgaggaggcgccgtcgtggacgtgggtgtcggcggagccggggaggagaggcagggtccggcagcggtcggggccagcatcgtcgcctgccgcggcggtcggcagccgaggcagggtctctggtggggactggggagtgatgagcctccgcagcgcacagagggaactacccgctcgtcacacaagtctcgtcataggcgtgatgatatggataaaaaaagggcacatcgtgtcatctctcacggtctcacggtctcacctcatccacatctaccaggcatcagctcgaaagctcagcacatcacaggccagcccaagcagcgatgccagcggtggcgtccctttgggcgccgcccgcggctgcccggcggcggaggttctcccccgtggtctcgtcctcgctgcgccgggtcgcgtcgggcggcgggtctagctggcggagcgagcggcggctcatgtcggagctggagcgcacagtgacagcgggcgcgaccgagcgcgtcatccgcagctacgtcggcaccaagtcggagcgcgccgcgctcgccgcgctctccaggctactcatggactccgaccccctcgccatcccgttctacgaggcggtcacacaggcacggtggttcaaatggagctcgatccacgcagctgcagtcgccgccttgctcgaagccaacggacgcgccggagaatccaggtccctgatcgccgactccgtctcgcagcacctccagcagtcgaccgacgaggtagccctcttctactgcgacctcatagcggcgttctcctcgcgcgggctcaaggaccgggcgacggagttccacatggagctacggtccatgccgccgctctccgggcgcaaggcctacgcggcgatggtcaagtccctgtgcctgctgggcatgccggccgaggccgaggcagcgctcagggagatggtctcgcgagggcaccggcccgaggcggcccagttcggggccgtcgcgaggtgctacggcagggccggctcaccggccgacatggagcgggtcatcgcgtccatggcggacgccggcggcatccgcctcggcgccggcgcggcggatgccgtgctgtcgtgctacagcgcctgccgcgaccacgccaggactctggcgtggctgaagaggatgcggaagctgcgcgtcgcggtgaccgcgaaaggctacaacttggtgctcaactcgtgtccgtcgctcgcttcggtggtgcgggagctgggccctgagcttccgctgtcgacggccgggctggtcgggtggctcaggtctgcgtcgacaacaccggcaccggcagcggaagtggaggtggtgcgggagctcctggcgtcgtcggcgtcggttctggacagggcgatggagtggtcggaggccgaggcgaagctgaacctgcacgggttcagcacggttgcagcctacgtgctggtgctgcagtgggtggacgcggtgaggggccgcgcccgcgcgttgccgttggaggtgtcggtggtgtgcggcgttgggaagcacagtgacgtccgaggcgagtccagagtgcgggagctggcgcaggaggtgctgggacggatggggagtcccctgaagctgtcggcgagaaacagagggcggctcgtggcgaagcgagaccgggtggagcagtggctggccagcttgccggtgcctgaggacggcacagacccatcgcctgatgcagcaaacgaagaaccatttgtatttgcacttttcagaaaacttgggcagtttttttccaaccttatgtagatagatgttgctgcccccatcacaccagcatcgatcgaaagagctggcctggtgaatgaatctgtctcgaacgaactgactgatggcctagtgtgtttgcttggctttggcgccgtatgcaaatctggtgaatgaagcaggcagcgcatttgcctgcctttggcacaggatagc

SEQ ID NO: 53869 - DNA, 3183 bp, Zea Mays
gcttattcctgaatcctgatccaatgcaactctccacgctccttattcatgaatcctgatccaaactctttgatcttcatccccctccgccacccacgaagcgcggggtatccatgtcgtacaccatatccggcggcggcaccgcgccagcggcgtgggcgtggctccacggcgacctcgagctcaccatccacgaggcgcgcggcctccccaacatggacctgctctccaccctcctccgccgcctctgcctctgcccaccactggcggggataacgccagcgcggcgacgctcgctgtccgacgacgacgacgacagcgcccacgcccacgcccacacccacccgcaccaccaccacctccgcggccgcctgcaccgtcgaccccgccgccgccacgagccccagccgcacgggcacctgctgctcccgacctccgacccctacgcggcggtggtggtggcggggccccacgagacgacggtggcgcgcacctacgtgttccgcaactcggaggcgccgcggtgggaggccagcttcctgctgccgctggcgcacgccgccaccggcctcgagttccacgtcaaggacgccgaccccttcggctccgacctcatcggcgtcgcctggctcccggccgccgccgtcctcgcctccgccgccgcgcccatcgagtcccagtggctcgacctcgcccgccccgacgcccgcggcccgcccgcgcccggcggcgggagcgccatccgcgtttcggccgcgttcgtccccgcggcggcgtcccgggggcgctccggcgttggcgtgccggcctacttcccgctgcggcgcgggtgcgacgtcaggctgtaccaggacgcgcacgtggcggccggcgagctggagggcgtgggcgtcgtccccgggttcctgccggggcggtgctgggaggacctgtgcatggcggtgctgggcgcgcagcgcctcgtgtacgtggccgggtggtcggtgcacaccacggtccggctcacccgggaggccatgtcgccagagatggcggccaaggtggccgagctggaggagctgggcggcgagcccgtggagcacatgagcctcggcgagctgctcaagtacaagtcgcaggagggcgtccgggtgctcctcctcgtctgggacgacaggacctcgcacaacaacttcttcgtgaagatgaaaggcgtgatgcaaacgcgcgacgaggagacgaagaagttcttcaagcactcttcagtgatctgcgttctgtcgccgcgctacccaagcagcaagctcggcctcgtcaaacaaaagccgcggccgtgcaggtggtggggacgctgtacacgcaccaccagaagtgcgtgctcgtcgacacgccggcgtccgagtcgacccgcaggatcacggctttcctcggcggcctcgacctctgcgccggccgctacgacacgcccagccacaggctcttccgcgacctccaaaccgtcttccacggcgacgtctacaatccgacattcggtggcgacgtcaatggtccccggcagccatggcacgacctgcactgccggctggacgggccggcggcgtacgacatcctcaagaacttcgagcagcggtggcggaaggcgaccaagctgcgggagatgttcggcgggaaggcggcgcaccggaaggacgacgcgctgctgaagctggagcgcatcccctggatcctcagccccaccaagcccaagcagcagccaccctccgccgccgcagacaccggcgctgcagaccacgacgacgacgagcgggaccagccagccctgcacgtgctgccggacggcgaccccgagcggtggcacgcgcaggtgttccggtcggtggacgccgggtcggtgaagcggttcccgcggccgtgggagcgcgccgagatggcccggcgccacctggtcggcgacaagaacctggccgtggagcggagcatccacgcggcgtacgtggcggcgatccggtcggcggagcgcttcgtgtacgtggagaaccagtactttatcggcggctcctacgcctggccgtcgtaccggaacggcggcgcctgcaacctggtccccatggagatcgcgctcaaggtggccagcaaggtccgcgccggcgagccgttcgccgcgtacgtcgtcctgcccatgtggcccgagggcaaccccgggtccggccctgcgcaggagatcctcttctggcagaaccagaccatggagatgatgtacagcgttgtcgcggccgcgttggagggaaagggtggccacccgcaggagcacctcaacttctactgcctcggcaaccgggagccggcggaggacgcgggcgacggcaataaatgggcgccggcggatccgctcgacgacgccacgacgagctccgccgcggcgcatgcgcggcggcaccggcggttcatggtgtacgtgcactcgaaggggatgatcgtggacgacgagtacgtcatcatcggctccgccaacatcaaccagcggtcgctggcggggtcgcgcgacacggagatcgccgtcggcgcgtaccagccggaccacacgggcgcatgcccgcgcgggaaggtgcacgggtacaggatgtcgctgtgggaggagcacctggggaaggaggcggtccggcggccggaggtgctgcggccggagtcgccccggtgcgtcaaactggtgaaccggatagcaagggacaactggaggaggtacgcggccgacgacgacaagctggggccgctgcaggggcacctgttgaggtacccggtgcacgtccgagccgacggaagggtggagccgctgccggggaacgagttgttcccggacgtcggcggccgggtcgtcggcgcgcccaacaacctgccggattacctgacaatgtagcagtagtcaccgtgtacacaacagaattcagagtgtttgtccaggaggagatgagcagcccatagccatgtattgacacgactgcataggattttattgcaattgctcggggggtattagtagattttttttactagctatatgtcagtatgttatgacaaaaaaaaatacaatacccgtttaacataagtcttgctatcaatattcgataagtttttataaatcattgtcaatgtaagcaccatagactactactcattatttttttataataaattataacataagag

SEQ ID NO: 53870 - DNA, 3222 bp, Zea Mays
cttgctctctcggtttctctccactggaaagcatgcacggcagacggcacgaggcttattcctgaatcctgatccaatgcaactctccacgctccttattcatgaatcctgatccaaactctttgatcttcatccccctccgccacccacgaagcgcggggtatccatgtcgtacaccatatccggcggcggcaccgcgccagcggcgtgggcgtggctccacggcgacctcgagctcaccatccacgaggcgcgcggcctccccaacatggacctgctctccaccctcctccgccgcctctgcctctgcccaccactggcggggataacgccagcgcggcgacgctcgctgtccgacgacgacgacgacagcgcccacgcccacgcccacacccacccgcaccaccaccacctccgcggccgcctgcaccgtcgaccccgccgccgccacgagccccagccgcacgggcacctgctgctcccgacctccgacccctacgcggcggtggtggtggcggggccccacgagacgacggtggcgcgcacctacgtgttccgcaactcggaggcgccgcggtgggaggccagcttcctgctgccgctggcgcacgccgccaccggcctcgagttccacgtcaaggacgccgaccccttcggctccgacctcatcggcgtcgcctggctcccggccgccgccgtcctcgcctccgccgccgcgcccatcgagtcccagtggctcgacctcgcccgccccgacgcccgcggcccgcccgcgcccggcggcgggagcgccatccgcgtttcggccgcgttcgtccccgcggcggcgtcccgggggcgctccggcgttggcgtgccggcctacttcccgctgcggcgcgggtgcgacgtcaggctgtaccaggacgcgcacgtggcggccggcgagctggagggcgtgggcgtcgtccccgggttcctgccggggcggtgctgggaggacctgtgcatggcggtgctgggcgcgcagcgcctcgtgtacgtggccgggtggtcggtgcacaccacggtccggctcacccgggaggccatgtcgccagagatggcggccaaggtggccgagctggaggagctgggcggcgagcccgtggagcacatgagcctcggcgagctgctcaagtacaagtcgcaggagggcgtccgggtgctcctcctcgtctgggacgacaggacctcgcacaacaacttcttcgtgaagatgaaaggcgtgatgcaaacgcgcgacgaggagacgaagaagttcttcaagcactcttcagtgatctgcgttctgtcgccgcgctacccaagcagcaagctcggcctcgtcaaacaaaaggtggtggggacgctgtacacgcaccaccagaagtgcgtgctcgtcgacacgccggcgtccgagtcgacccgcaggatcacggctttcctcggcggcctcgacctctgcgccggccgctacgacacgcccagccacaggctcttccgcgacctccaaaccgtcttccacggcgacgtctacaatccgacattcggtggcgacgtcaatggtccccggcagccatggcacgacctgcactgccggctggacgggccggcggcgtacgacatcctcaagaacttcgagcagcggtggcggaaggcgaccaagctgcgggagatgttcggcgggaaggcggcgcaccggaaggacgacgcgctgctgaagctggagcgcatcccctggatcctcagccccaccaagcccaagcagcagccaccctccgccgccgcagacaccggcgctgcagaccacgacgacgacgagcgggaccagccagccctgcacgtgctgccggacggcgaccccgagcggtggcacgcgcaggtgttccggtcggtggacgccgggtcggtgaagcggttcccgcggccgtgggagcgcgccgagatggcccggcgccacctggtcggcgacaagaacctggccgtggagcggagcatccacgcggcgtacgtggcggcgatccggtcggcggagcgcttcgtgtacgtggagaaccagtactttatcggcggctcctacgcctggccgtcgtaccggaacggcggcgcctgcaacctggtccccatggagatcgcgctcaaggtggccagcaaggtccgcgccggcgagccgttcgccgcgtacgtcgtcctgcccatgtggcccgagggcaaccccgggtccggccctgcgcaggagatcctcttctggcagaaccagaccatggagatgatgtacagcgttgtcgcggccgcgttggagggaaagggtggccacccgcaggagcacctcaacttctactgcctcggcaaccgggagccggcggaggacgcgggcgacggcaataaatgggcgccggcggatccgctcgacgacgccacgacgagctccgccgcggcgcatgcgcggcggcaccggcggttcatggtgtacgtgcactcgaaggggatgatcgtggacgacgagtacgtcatcatcggctccgccaacatcaaccagcggtcgctggcggggtcgcgcgacacggagatcgccgtcggcgcgtaccagccggaccacacgggcgcatgcccgcgcgggaaggtgcacgggtacaggatgtcgctgtgggaggagcacctggggaaggaggcggtccggcggccggaggtgctgcggccggagtcgccccggtgcgtcaaactggtgaaccggatagcaagggacaactggaggaggtacgcggccgacgacgacaagctggggccgctgcaggggcacctgttgaggtacccggtgcacgtccgagccgacggaagggtggagccgctgccggggaacgagttgttcccggacgtcggcggccgggtcgtcggcgcgcccaacaacctgccggattacctgacaatgtagcagtagtcaccgtgtacacaacagaattcagagtgtttgtccaggaggagatgagcagcccatagccatgtattgacacgactgcataggattttattgcaattgctcggggggtattagtagattttttttactagctatatgtcagtatgttatgacaaaaaaaaatacaatacccgtttaacataagtcttgctatcaatattcgataagtttttataaatcattgtcaatgtaagcaccatagactactactcattatttttttataataaattataacataagag

SEQ ID NO: 53871 - DNA, 1071 bp, Zea Mays
attttttttacgccggcccgcattcttttccaataggaaatgtctttttcaaggatttttttttctggccatgtacaggactatgttccgacggtgtttgacaacttcagtgctaacgttgtggttgatggtaacactgtcaacctcggcctctgggacactgcaggtcaagaggattacaacagactgagaccactgagctatcgtggagctgatgtttttcttctggctttctcactgatcagtaaagccagctatgagaatgtttcgaagaagtggatacctgaactgaagcattatgcacctggtgtgccaataattctcgtagggacaaagcttgatcttcgagatgacaagcagttctttgtggaccatcctggtgctgttcctatcactactgctcagggagaggagctaagaaagcaaataggcgcgccatactacatcgagtgcagctcaaagacccaactaaacgtgaagggtgtcttcgatgcggcgataaaggttgtgctgcagccgcctaaggcgaagaagaagaaaaaggcgcagaggggggcgtgctccattttgtgatctaataatgatcagtagacaaaagaaacaagggcgaaggtgccatggttctattatcgccgcgtcttgcttcagcgaaacagcaatggatgatcccaccccctcccccccctagattttactggcggctgcagcgagtcgaggcattcgagagcgatatgtttgtttcatttccctccttcccgccttgtgattatctggtgtgtgtgactgacgaggtcgtggcaatttaggtaactcgcttagaaggtatttcccccgtgtttgagcccccacccccaccaaaaaaaagaaggtatcatgctatctctgttccataagtagacatgatgtaatcgtactaagtgtttatttttattttttttacttatttcacttcaatcaatggaaaattatgcttcccaattatatggtgggtcatggcagtccccctccctccttgtttgcctgtcaagttctcagtgtctttgtggcaaatggagcatgcatattgattta

SEQ ID NO: 53872 - DNA, 1050 bp, Zea Mays
attacattcatataggagtctatgagaaatcaggagaggggaatgtagattcccatggactatgttccgacggtgtttgacaacttcagtgctaacgttgtggttgatggtaacactgtcaacctcggcctctgggacactgcaggtcaagaggattacaacagactgagaccactgagctatcgtggagctgatgtttttcttctggctttctcactgatcagtaaagccagctatgagaatgtttcgaagaagtggatacctgaactgaagcattatgcacctggtgtgccaataattctcgtagggacaaagcttgatcttcgagatgacaagcagttctttgtggaccatcctggtgctgttcctatcactactgctcagggagaggagctaagaaagcaaataggcgcgccatactacatcgagtgcagctcaaagacccaactaaacgtgaagggtgtcttcgatgcggcgataaaggttgtgctgcagccgcctaaggcgaagaagaagaaaaaggcgcagaggggggcgtgctccattttgtgatctaataatgatcagtagacaaaagaaacaagggcgaaggtgccatggttctattatcgccgcgtcttgcttcagcgaaacagcaatggatgatcccaccccctcccccccctagattttactggcggctgcagcgagtcgaggcattcgagagcgatatgtttgtttcatttccctccttcccgccttgtgattatctggtgtgtgtgactgacgaggtcgtggcaatttaggtaactcgcttagaaggtatttcccccgtgtttgagcccccacccccaccaaaaaaaagaaggtatcatgctatctctgttccataagtagacatgatgtaatcgtactaagtgtttatttttattttttttacttatttcacttcaatcaatggaaaattatgcttcccaattatatggtgggtcatggcagtccccctccctccttgtttgcctgtcaagttctcagtgtctttgtggcaaatggagcatgcatattgattta

SEQ ID NO: 53873 - DNA, 1051 bp, Zea Mays
acgctccccgcctacgtcctcgattcgcccccggctaccacaatgcggctgcgaattggactatgttccgacggtgtttgacaacttcagtgctaacgttgtggttgatggtaacactgtcaacctcggcctctgggacactgcaggtcaagaggattacaacagactgagaccactgagctatcgtggagctgatgtttttcttctggctttctcactgatcagtaaagccagctatgagaatgtttcgaagaagtggatacctgaactgaagcattatgcacctggtgtgccaataattctcgtagggacaaagcttgatcttcgagatgacaagcagttctttgtggaccatcctggtgctgttcctatcactactgctcagggagaggagctaagaaagcaaataggcgcgccatactacatcgagtgcagctcaaagacccaactaaacgtgaagggtgtcttcgatgcggcgataaaggttgtgctgcagccgcctaaggcgaagaagaagaaaaaggcgcagaggggggcgtgctccattttgtgatctaataatgatcagtagacaaaagaaacaagggcgaaggtgccatggttctattatcgccgcgtcttgcttcagcgaaacagcaatggatgatcccaccccctcccccccctagattttactggcggctgcagcgagtcgaggcattcgagagcgatatgtttgtttcatttccctccttcccgccttgtgattatctggtgtgtgtgactgacgaggtcgtggcaatttaggtaactcgcttagaaggtatttcccccgtgtttgagcccccacccccaccaaaaaaaagaaggtatcatgctatctctgttccataagtagacatgatgtaatcgtactaagtgtttatttttattttttttacttatttcacttcaatcaatggaaaattatgcttcccaattatatggtgggtcatggcagtccccctccctccttgtttgcctgtcaagttctcagtgtctttgtggcaaatggagcatgcatattgattta

SEQ ID NO: 53874 - DNA, 1330 bp, Zea Mays
ctctctctctctctctctctctctctctctctctctctctccacctccaccaccagcccccaccatcccggctcggagaccgcttccctccctccacccccgcaaccctctcccgccgcgcacgcgccaccctccattcctccgctccccgcttcctcccgatcttaaccacccgccgcgccccctcccgccacccggcttcctctccccctcttcttcctccctcaaaccagacgctcgccccccatttccccatctctcttcttcttcttcttcttccccatccagaggaggaaggaagaagaataagcaggaggcctctcccccccagcccagccaccccgtagcgacgacggagggcggaagaggatgagcgcgtccaggttcataaagtgcgtcacggtcggggacggcgccgtcggcaagacctgcatgctcatttcctacacctccaacaccttccccaccgactatgttccgacggtgtttgacaacttcagtgctaacgttgtggttgatggtaacactgtcaacctcggcctctgggacactgcaggtcaagaggattacaacagactgagaccactgagctatcgtggagctgatgtttttcttctggctttctcactgatcagtaaagccagctatgagaatgtttcgaagaagtggatacctgaactgaagcattatgcacctggtgtgccaataattctcgtagggacaaagcttgaacgtgaagggtgtcttcgatgcggcgataaaggttgtgctgcagccgcctaaggcgaagaagaagaaaaaggcgcagaggggggcgtgctccattttgtgatctaataatgatcagtagacaaaagaaacaagggcgaaggtgccatggttctattatcgccgcgtcttgcttcagcgaaacagcaatggatgatcccaccccctcccccccctagattttactggcggctgcagcgagtcgaggcattcgagagcgatatgtttgtttcatttccctccttcccgccttgtgattatctggtgtgtgtgactgacgaggtcgtggcaatttaggtaactcgcttagaaggtatttcccccgtgtttgagcccccacccccaccaaaaaaaagaaggtatcatgctatctctgttccataagtagacatgatgtaatcgtactaagtgtttatttttattttttttacttatttcacttcaatcaatggaaaattatgcttcccaattatatggtgggtcatggcagtccccctccctccttgtttgcctgtcaagttctcagtgtctttgtggcaaatggagcatgcatattgattta

SEQ ID NO: 53875 - DNA, 1382 bp, Zea Mays
cgaattcgcccttgtttcataaaggtcagttggaacttagacacgcttggtgatttcgtgattatgagaagcaatggacagcctgtgtataacttttgtgtgacagttgacgacgctaccatgcaaatatctcatgttatcagagctgaagagcatctaccaaacacattgcgacaggctttaatttacaaagagtaaactgtctaaacggcatggagctacttctgtcgggcagtataaaaatatgggctatctacctcaggcaatggtcaattatttagcactactgggctggggtgatggcactgagaatgagttcttcactattgatgacctagtccagaaattcactataaaccgtgtcaataaaagtggagcagtctttgatgcaacaaaattgaaatggatgaacggacaacatctaagatcatttccccatgatgaactcatcaaagcttttgaagatcggtggacggacacaggcattctccaggaatctgaaagtggttttgctaagctgccgagcttttgaaggatggtatcgatttgataacagatgcggacgcagctcttacgaatctgttgtcatatccccttcatactactctaagcagcgaggaagctaaacctgtggtgcaagacaagatctccgaggttgcttggagtcttatttccgcgtacgacagcggcgaactcggccaagcgctagctgagggccgtgatggctggcagaagtgggttaaaggtttcggcaagtctatcaaaagaaagggcaaggggctcttcatgccgctccgggtactgctgaccgggaagcttcatgggcctgacatgggtggcagcatcgccctaatacacaaggccggcgtctgctgcgctgtgactccgcagtccaacttcgtgactctagacgagcggttcaggatgctcaaggacgtcgactgggagtcgctggcgaaggagcaggaaacccctgctgtccctgccgccgcttcctagactgccaggaggaggacgacgttgcgcgcaatgtcgctcttgagtttttttttaaaaaaaaaatccattttggcgtgtttttgtcaccgttcgtttccatggagtaggagaggagctcagtggtttggtcataggtcgttggtgctgtaatgtgggcaataatattgaattattattattagatgatgatgatgatgcctgtaatctgcgtgtctacagcttctcgtttgctgaatacttcatctttttttttgacaagtgaatacacgattattacaggtgttcatacgcatgataaaactgttgggcactcgggcgctgcccgtgatggacatagattgttgggccttgaatttcgactacattgattgagtatcgaatcg

SEQ ID NO: 53876 - DNA, 938 bp, Zea Mays
cgaattcgcccttgtttcataaaggtcagttggaacttagacacgcttggtgatttcgtgattatgagaagcaatggacagcctgtgtataacttttgtgtgacagttgacgacgctaccatgcaaatatctcatgttatcagagctgaagagcatctaccaaacacattgcgacaggctttaatttacaaagctcttggattcgcaatgccttcatttgctcatgtttcgcttattctggctcctgacaggagtaaactgtctaaacggcatggagctacttctgtcgggcagtataaaaatatgggctatctacctcaggcaatggtcaattatttagcactactgggctggggtgatggcactgagaatgagttcttcactattgatgacctagtccagaaattcactataaaccgtgtcaataaaagtggagcagtctttgatgcaacaaaattgaaatggatgaacggacaacatctaagatcatttccccatgatgaactcatcaaagcttttgaagatcggtggacggacacaggcattctccaggaatctgaaagtggttttgctaaggaagctgccgagcttttgaaggatggtatcgatttgataacagatgcggacgcagctcttacgaatctgttgtcatatccccttcatactactctaagcagcgaggaagctaaacctgtggtgcaagacaagatctccgaggttgcttggagtcttatttccgcgtacgacagcggcgaactcggccaagcgctagctgagggccgtgatggctggcagaagtgggttaaaggtttcggcaagtctatcaaaagaaaggtgttcatacgcatgataaaactgttgggcactcgggcgctgcccgtgatggacatagattgttgggccttgaatttcgactacattgattgagtatcgaatcg

SEQ ID NO: 53877 - DNA, 1704 bp, Zea Mays
cgaattcgcccttgtttcataaaggtcagttggaacttagacacgcttggtgatttcgtgattatgagaagcaatggacagcctgtgtataacttttgtgtgacagttgacgacgctaccatgcaaatatctcatgttatcagagctgaagagcatctaccaaacacattgcgacaggctttaatttacaaagagtaaactgtctaaacggcatggagctacttctgtcgggcagtataaaaatatgggctatctacctcaggcaatggtcaattatttagcactactgggctggggtgatggcactgagaatgagttcttcactattgatgacctaggtatggtttcaaaactctgtttcctgtcattttcactgaaatattgggcctgcttggttcctggcatagtatcgctcgccttgcaacatggtgctcacttgagtgggtgagccgatttggctctcccatggaagcaagccaaatcttgctcgcatgtccccaaaacatcttagcaagagaaccaaacagacactgtggcctggtatcctcgctcagcaaggagtaacagtctcagagaaggaaccaagcaagctttttctttttttccccattttttaggaactgttactctcaactttggtgctatctcatttgcagtccagaaattcactataaaccgtgtcaataaaagtggagcagtctttgatgcaacaaaattgaaatggatgaacggacaacatctaagatcatttccccatgatgaactcatcaaagcttttgaagatcggtggacggacacaggcattctccaggaatctgaaagtggttttgctaaggaagctgccgagcttttgaaggatggtatcgatttgataacagatgcggacgcagctcttacgaatctgttgtcatatccccttcatactactctaagcagcgaggaagctaaacctgtggtgcaagacaagatctccgaggttgcttggagtcttatttccgcgtacgacagcggcgaactcggccaagcgctagctgagggccgtgatggctggcagaagtgggttaaaggtttcggcaagtctatcaaaagaaagggcaaggggctcttcatgccgctccgggtactgctgaccgggaagcttcatgggcctgacatgggtggcagcatcgccctaatacacaaggccggcgtctgctgcgctgtgactccgcagtccaacttcgtgactctagacgagcggttcaggatgctcaaggacgtcgactgggagtcgctggcgaaggagcaggaaacccctgctgtccctgccgccgcttcctagactgccaggaggaggacgacgttgcgcgcaatgtcgctcttgagtttttttttaaaaaaaaaatccattttggcgtgtttttgtcaccgttcgtttccatggagtaggagaggagctcagtggtttggtcataggtcgttggtgctgtaatgtgggcaataatattgaattattattattagatgatgatgatgatgcctgtaatctgcgtgtctacagcttctcgtttgctgaatacttcatctttttttttgacaagtgaatacacgattattacaggtgttcatacgcatgataaaactgttgggcactcgggcgctgcccgtgatggacatagattgttgggccttgaatttcgactacattgattgagtatcgaatcg

SEQ ID NO: 53878 - DNA, 1386 bp, Zea Mays
cgaattcgcccttgtttcataaaggtcagttggaacttagacacgcttggtgatttcgtgattatgagaagcaatggacagcctgtgtataacttttgtgtgacagttgacgacgctaccatgcaaatatctcatgttatcagagctgaagagcatctaccaaacacattgcgacaggctttaatttacaaagagtaaactgtctaaacggcatggagctacttctgtcgggcagtataaaaatatgggctatctacctcaggcaatggtcaattatttagcactactgggctggggtgatggcactgagaatgagttcttcactattgatgacctagtccagaaattcactataaaccgtgtcaataaaagtggagcagtctttgatgcaacaaaattgaaatggatgaacggacaacatctaagatcatttccccatgatgaactcatcaaagcttttgaagatcggtggacggacacaggcattctccaggaatctgaaagtggttttgctaaggaagctgccgagcttttgaaggatggtatcgatttgataacagatgcggacgcagctcttacgaatctgttgtcatatccccttcatactactctaagcagcgaggaagctaaacctgtggtgcaagacaagatctccgaggttgcttggagtcttatttccgcgtacgacagcggcgaactcggccaagcgctagctgagggccgtgatggctggcagaagtgggttaaaggtttcggcaagtctatcaaaagaaagggcaaggggctcttcatgccgctccgggtactgctgaccgggaagcttcatgggcctgacatgggtggcagcatcgccctaatacacaaggccggcgtctgctgcgctgtgactccgcagtccaacttcgtgactctagacgagcggttcaggatgctcaaggacgtcgactgggagtcgctggcgaaggagcaggaaacccctgctgtccctgccgccgcttcctagactgccaggaggaggacgacgttgcgcgcaatgtcgctcttgagtttttttttaaaaaaaaaatccattttggcgtgtttttgtcaccgttcgtttccatggagtaggagaggagctcagtggtttggtcataggtcgttggtgctgtaatgtgggcaataatattgaattattattattagatgatgatgatgatgcctgtaatctgcgtgtctacagcttctcgtttgctgaatacttcatctttttttttgacaagtgaatacacgattattacaggtgttcatacgcatgataaaactgttgggcactcgggcgctgcccgtgatggacatagattgttgggccttgaatttcgactacattgattgagtatcgaatcg

SEQ ID NO: 53879 - DNA, 1445 bp, Zea Mays
cgaattcgcccttgtttcataaaggtcagttggaacttagacacgcttggtgatttcgtgattatgagaagcaatggacagcctgtgtataacttttgtgtgacagttgacgacgctaccatgcaaatatctcatgttatcagagctgaagagcatctaccaaacacattgcgacaggctttaatttacaaagctcttggattcgcaatgccttcatttgctcatgtttcgcttattctggctcctgacaggagtaaactgtctaaacggcatggagctacttctgtcgggcagtataaaaatatgggctatctacctcaggcaatggtcaattatttagcactactgggctggggtgatggcactgagaatgagttcttcactattgatgacctagtccagaaattcactataaaccgtgtcaataaaagtggagcagtctttgatgcaacaaaattgaaatggatgaacggacaacatctaagatcatttccccatgatgaactcatcaaagcttttgaagatcggtggacggacacaggcattctccaggaatctgaaagtggttttgctaaggaagctgccgagcttttgaaggatggtatcgatttgataacagatgcggacgcagctcttacgaatctgttgtcatatccccttcatactactctaagcagcgaggaagctaaacctgtggtgcaagacaagatctccgaggttgcttggagtcttatttccgcgtacgacagcggcgaactcggccaagcgctagctgagggccgtgatggctggcagaagtgggttaaaggtttcggcaagtctatcaaaagaaagggcaaggggctcttcatgccgctccgggtactgctgaccgggaagcttcatgggcctgacatgggtggcagcatcgccctaatacacaaggccggcgtctgctgcgctgtgactccgcagtccaacttcgtgactctagacgagcggttcaggatgctcaaggacgtcgactgggagtcgctggcgaaggagcaggaaacccctgctgtccctgccgccgcttcctagactgccaggaggaggacgacgttgcgcgcaatgtcgctcttgagtttttttttaaaaaaaaaatccattttggcgtgtttttgtcaccgttcgtttccatggagtaggagaggagctcagtggtttggtcataggtcgttggtgctgtaatgtgggcaataatattgaattattattattagatgatgatgatgatgcctgtaatctgcgtgtctacagcttctcgtttgctgaatacttcatctttttttttgacaagtgaatacacgattattacaggtgttcatacgcatgataaaactgttgggcactcgggcgctgcccgtgatggacatagattgttgggccttgaatttcgactacattgattgagtatcgaatcg

SEQ ID NO: 53880 - DNA, 1441 bp, Zea Mays
cgaattcgcccttgtttcataaaggtcagttggaacttagacacgcttggtgatttcgtgattatgagaagcaatggacagcctgtgtataacttttgtgtgacagttgacgacgctaccatgcaaatatctcatgttatcagagctgaagagcatctaccaaacacattgcgacaggctttaatttacaaagctcttggattcgcaatgccttcatttgctcatgtttcgcttattctggctcctgacaggagtaaactgtctaaacggcatggagctacttctgtcgggcagtataaaaatatgggctatctacctcaggcaatggtcaattatttagcactactgggctggggtgatggcactgagaatgagttcttcactattgatgacctagtccagaaattcactataaaccgtgtcaataaaagtggagcagtctttgatgcaacaaaattgaaatggatgaacggacaacatctaagatcatttccccatgatgaactcatcaaagcttttgaagatcggtggacggacacaggcattctccaggaatctgaaagtggttttgctaagctgccgagcttttgaaggatggtatcgatttgataacagatgcggacgcagctcttacgaatctgttgtcatatccccttcatactactctaagcagcgaggaagctaaacctgtggtgcaagacaagatctccgaggttgcttggagtcttatttccgcgtacgacagcggcgaactcggccaagcgctagctgagggccgtgatggctggcagaagtgggttaaaggtttcggcaagtctatcaaaagaaagggcaaggggctcttcatgccgctccgggtactgctgaccgggaagcttcatgggcctgacatgggtggcagcatcgccctaatacacaaggccggcgtctgctgcgctgtgactccgcagtccaacttcgtgactctagacgagcggttcaggatgctcaaggacgtcgactgggagtcgctggcgaaggagcaggaaacccctgctgtccctgccgccgcttcctagactgccaggaggaggacgacgttgcgcgcaatgtcgctcttgagtttttttttaaaaaaaaaatccattttggcgtgtttttgtcaccgttcgtttccatggagtaggagaggagctcagtggtttggtcataggtcgttggtgctgtaatgtgggcaataatattgaattattattattagatgatgatgatgatgcctgtaatctgcgtgtctacagcttctcgtttgctgaatacttcatctttttttttgacaagtgaatacacgattattacaggtgttcatacgcatgataaaactgttgggcactcgggcgctgcccgtgatggacatagattgttgggccttgaatttcgactacattgattgagtatcgaatcg

SEQ ID NO: 53881 - DNA, 1418 bp, Zea Mays
cgaattcgcccttgtttcataaaggtcagttggaacttagacacgcttggtgatttcgtgattatgagaagcaatggacagcctgtgtataacttttgtgtgacagttgacgacgctaccatgcaaatatctcatgttatcagagctgaagagcatctaccaaacacattgcgacaggctttaatttacaaagctcttggattcgcaatgccttcatttgctcatgtttcgcttattctggctcctgacaggagtaaactgtctaaacggcatggagctacttctgtcgggcaggcaatggtcaattatttagcactactgggctggggtgatggcactgagaatgagttcttcactattgatgacctagtccagaaattcactataaaccgtgtcaataaaagtggagcagtctttgatgcaacaaaattgaaatggatgaacggacaacatctaagatcatttccccatgatgaactcatcaaagcttttgaagatcggtggacggacacaggcattctccaggaatctgaaagtggttttgctaaggaagctgccgagcttttgaaggatggtatcgatttgataacagatgcggacgcagctcttacgaatctgttgtcatatccccttcatactactctaagcagcgaggaagctaaacctgtggtgcaagacaagatctccgaggttgcttggagtcttatttccgcgtacgacagcggcgaactcggccaagcgctagctgagggccgtgatggctggcagaagtgggttaaaggtttcggcaagtctatcaaaagaaagggcaaggggctcttcatgccgctccgggtactgctgaccgggaagcttcatgggcctgacatgggtggcagcatcgccctaatacacaaggccggcgtctgctgcgctgtgactccgcagtccaacttcgtgactctagacgagcggttcaggatgctcaaggacgtcgactgggagtcgctggcgaaggagcaggaaacccctgctgtccctgccgccgcttcctagactgccaggaggaggacgacgttgcgcgcaatgtcgctcttgagtttttttttaaaaaaaaaatccattttggcgtgtttttgtcaccgttcgtttccatggagtaggagaggagctcagtggtttggtcataggtcgttggtgctgtaatgtgggcaataatattgaattattattattagatgatgatgatgatgcctgtaatctgcgtgtctacagcttctcgtttgctgaatacttcatctttttttttgacaagtgaatacacgattattacaggtgttcatacgcatgataaaactgttgggcactcgggcgctgcccgtgatggacatagattgttgggccttgaatttcgactacattgattgagtatcgaatcg

SEQ ID NO: 53882 - DNA, 2658 bp, Zea Mays
accaaatcccgaacacccacgcgagcgtttcaaaatttaaccaaatttcattcagaacaaagcaaaaacaaaaaaacgccatttccctgtcgtcccaaatggccacgggcgcaccgccggagacggagccggcgtcgacggcggcggcgcggaagctgcaccacctgctccgctcccgcgacctcctcccggcgctctcgtacctccgcaccctcccttcccccttcaccctgctccccaaccacgcgctcaacgcgctcctccgggccctcgccgccgctggccgcgtgcgcgccgccgcctccctgttccgcgccatccccgcgcctacgccgcactccttcaactccttcctcgccgcgctcttgcggcggggccggcgccgcgcggcgtcggcgctgctcgccgctttcctgcgctgccccggcgcctcccccgacgtggccacgctcaacaccctcatccacggcctctccactgcctcgccgcgcccgtcttcccccgcgctcctcaggctcttccgcttcctgccggaggcctacgccttcgcgcccgacgccatcacgtacaactccatgctggctgctctgtgccgagcgggggacctggccaccgcgcgcaggctgttcgatggaatgcgcgcgggcgagcaaggcggggaggctggcgccttccctaacgtggtcgcctacaccaccatgatcagggcgtgctgtgcgagtaggcttgccgatgaggcgctgtcgctcttcaagatgatgctcgcggatggcgtgcggccgaacaggatcacctacaacaccatggtgcagggcttctgccaggccggaaggatggagctggtaaaggaggtgttcgggatggactcatttaagccggacacgtgcacgttcaatacgctgatggccgcgcactgtagagaagggcggatacaggacgcgaagaaggtgtttgatcagatgatggagctccgcgtgaggcgcgactctgcgagttacagcatcgtgaccagggcgttgtgcgagaacggtgagtttggtcgagcagaggagcttgtggacagcctcttggagaaggaggttctcaagaaaagaggtggttgtgtgccactcattgcatcttacaatccagtttttaagtacctctgtgagaatggcaaggcaaagaaggccaggttgttattcgggcagctgctggatattaggagcaaggtcgatttcctagcattcaagacactaatcctaggacattgtaaggagggagattttgaagaagggtacgagctggtgctctcaatgttgaagagggatcttatgcctgacagtgagtgctatattgctgtaatagatggctttatgcagaaggggaggatgaaatctgcctgggaggctcttcacaggatgttaaacagtggtcttcgacctagcacaagtacgttccactctgttcttctggggcttttgaagaaagatggctgtgcgaaagaagccgcagatttgatagagataatgctggagaggaagatcaggcagaatgttgacctttctactaatctgattggtgtgttgttcaaaagtgatcttaatgaccgtgcatacaagattactaagcatctgtacgacaatggatattacattaagatggaaaaactaatcgcgacactttgtgaggacaagaagttcatagatgccgcggagttttctttgttcagcttgcggaagcgccatgaactgggtgtggcagttcacagccaggttctggatggcctttgctcggatcgtagaacttcagaggcattccagcttttctatgagctaaatgagaacaaaaggacttctgcggttgctgcaccccgcagcctagtctttctgcatcatgctcttgaggaagctggaatggtgcaagaagctggttttgttgctaaacagatgagacgtgcaactgccacaactaggcgaaggagctaagaccaaggatgctggaactggatgtcaagttggttgcctttcctcagctgatcagcaagggaatggctggtcattgaacaatggttgtttgatgatggaagattgcatatggcattaaggggtctgtaaatgatttgattttcttgagctaactcctatcagcagatattcagattgcagaagctcatctgatggtgagacaatagagctgctgctgctgcttcctgttcaactggagaagagttgtgaaaatcaaagtgtctcaaattaaaaagataactcgtagtaaaatgctagcgaaagaacaccacggtctgtcatgatatttagcaaccagtgacatcgtcctgtcatgatctttagcaacagcacatgtctggaccacatgacagtatatgtctaggactcagttcgaggttgagatcgaagaacttgagaagttgggcgtgaagcttcagaacctgagcaacatgccatgatgccagcgggagtcgtgttgctttctactccctctgctctgctccatattagaagacattttggttttttttatttcaactgcttttgctatgtatttagatatatactgtatcaaacggaatgtatctagaaaagtattaaaatttggaacggaagggatagtttgcgtgatgagaaaaaaaatgtcatggttaggtaactgagaaaatcg

SEQ ID NO: 53883 - DNA, 2703 bp, Zea Mays
accaaatcccgaacacccacgcgagcgtttcaaaatttaaccaaatttcattcagaacaaagcaaaaacaaaaaaacgccatttccctgtcgtcccaaatggccacgggcgcaccgccggagacggagccggcgtcgacggcggcggcgcggaagctgcaccacctgctccgctcccgcgacctcctcccggcgctctcgtacctccgcaccctcccttcccccttcaccctgctccccaaccacgcgctcaacgcgctcctccgggccctcgccgccgctggccgcgtgcgcgccgccgcctccctgttccgcgccatccccgcgcctacgccgcactccttcaactccttcctcgccgcgctcttgcggcggggccggcgccgcgcggcgtcggcgctgctcgccgctttcctgcgctgccccggcgcctcccccgacgtggccacgctcaacaccctcatccacggcctctccactgcctcgccgcgcccgtcttcccccgcgctcctcaggctcttccgcttcctgccggaggcctacgccttcgcgcccgacgccatcacgtacaactccatgctggctgctctgtgccgagcgggggacctggccaccgcgcgcaggctgttcgatggaatgcgcgcgggcgagcaaggcggggaggctggcgccttccctaacgtggtcgcctacaccaccatgatcagggcgtgctgtgcgagtaggcttgccgatgaggcgctgtcgctcttcaagatgatgctcgcggatggcgtgcggccgaacaggatcacctacaacaccatggtgcagggcttctgccaggccggaaggatggagctggtaaaggaggtgttcgggatggactcatttaagccggacacgtgcacgttcaatacgctgatggccgcgcactgtagagaagggcggatacaggacgcgaagaaggtgtttgatcagatgatggagctccgcgtgaggcgcgactctgcgagttacagcatcgtgaccagggcgttgtgcgagaacggtgagtttggtcgagcagaggagcttgtggacagcctcttggagaaggaggttctcaagaaaagaggtggttgtgtgccactcattgcatcttacaatccagtttttaagtacctctgtgagaatggcaaggcaaagaaggccaggttgttattcgggcagctgctggatattaggagcaaggtcgatttcctagcattcaagacactaatcctaggacattgtaaggagggagattttgaagaagggtacgagctggtgctctcaatgttgaagagggatcttatgcctgacagtgagtgctatattgctgtaatagatggctttatgcagaaggggaggatgaaatctgcctgggaggctcttcacaggatgttaaacagtggtcttcgacctagcacaagtacgttccactctgttcttctggggcttttgaagaaagatggctgtgcgaaagaagccgcagatttgatagagataatgctggagaggaagatcaggcagaatgttgacctttctactaatctgattggtgtgttgttcaaaagtgatcttaatgaccgtgcatacaagattactaagcatctgtacgacaatggatattacattaagatggaaaaactaatcgcgacactttgtgaggacaagaagttcatagatgccgcggagttttctttgttcagcttgcggaagcgccatgaactgggtgtggcagttcacagccaggttctggatggcctttgctcggatcgtagaacttcagaggcattccagcttttctatgagctaaatgagaacaaaaggacttctgcggttgctgcaccccgcagcctagtctttctgcatcatgctcttgaggaagctggaatggtgcaagaagctggttttgttgctaaacagatgagacgtgcaactgccacaactaggcgaaggagctaaggttttactccatgttttttagcatctttgcggggagggaagggattcccacctggatagctgttattgctaacatggatagcctgactctaagctattttcttacataatggtgcaagaccaaggatgctggaactggatgtcaagttggttgcctttcctcagctgatcagcaagggaatggctggtcattgaacaatggttgtttgatgatggaagattgcatatggcattaaggggtgagacaatagagctgctgctgctgcttcctgttcaactggagaagagttgtgaaaatcaaagtgtctcaaattaaaaagataactcgtagtaaaatgctagcgaaagaacaccacggtctgtcatgatatttagcaaccagtgacatcgtcctgtcatgatctttagcaacagcacatgtctggaccacatgacagtatatgtctaggactcagttcgaggttgagatcgaagaacttgagaagttgggcgtgaagcttcagaacctgagcaacatgccatgatgccagcgggagtcgtgttgctttctactccctctgctctgctccatattagaagacattttggttttttttatttcaactgcttttgctatgtatttagatatatactgtatcaaacggaatgtatctagaaaagtattaaaatttggaacggaagggatagtttgcgtgatgagaaaaaaaatgtcatggttaggtaactgagaaaatcg

SEQ ID NO: 53884 - DNA, 1323 bp, Zea Mays
atagtaaaacctttttgtaaaaacagggtttcaaggaaggtgatcaagttcaaggaaggtaatgcaggaattgtttaagcattcaactcctatcacctaatgcagcaatcaagtgagaaagattttaaaaacatcaaggaaggtggcaaatgcaccagggcttgcctgagtaacactaggttagtgttgttagatgacgttcgcgtgacgagcagcctttgtcctggtacttgatcgggttatccatctgcatcatcccgcgggttagcccgcacttgggatcgacttggcttgtcttccgcatcacgcgattaattaacgtacctgaatgaaatgcattatgcacatgaatgcatatcgacaagaagatcacacacctaaatagtgctacgcgatagcgaataaaacacctagcggcgaggggttgtaccgttttattcgaaaacactagttatcagcgtatgactaagcgtaataattacgcttctcgaacctatcacaaacatcacaaacaacaaactatacacattaaatataattagcctacacaactcaccagctaattaattaaatactaactttatcccttgctttataaattatactacatcgctcataaagaactatttaaattttatttcactcctcacatattttacatgtccataaataatcaaacatttctttatattatttatttagtgcaattgacaatgataaaattcatcagatagctatatgaaatactaaatctatcctttacgtcgccacctcgcttagatatccctaaattaatctacctttcgtattactaaacccatcgtacttcacttatttttaacactaccacaacgcgcctgcgctaaatacgaggattattacgactaataattctagttaatccaatcatcagataaacttacaaaaattataaatcggctcaccagcatcaaacgctactcaatactcgtacgaatgctgataaatcctggctcgagcttcctgccgtgcacttggtgaacactatgttgttggctccatcttcacccgactcttgggatttcttgacgacgcacggaatgacgacggaatcgagaacgtcaaggagccagcggacgagtagcacgctgacgaatccaatatagagctttggatacggtcgagggcgctggtgttgtagctaagacatcacaacgatgacactacggacggtgaagatagggtgatagtgtgaaacggtgttcgtgaagacaaccacgcgtggatggttgcgtggcatcgacgaccaagacatcggcgaggtccgtgcggctaggcgaaaat

SEQ ID NO: 53885 - DNA, 1856 bp, Zea Mays
cgacggacgtcaaacggatgctgcgtcagcgtcagaagaagagcggcggcgggcgggagatgctggtcaccatcgacaacctcaagcgcctctgcatcgaccactacttcgaggaagagatcgagggcgccatggcgacgggcgcctgcacgcgtctcctccacagcgacgacctcttcgacgcaaccctcgcgttcaggctcctgagagaggcaggacacgatgtctcagcaaaagacgatgttctacgcaggttcatcgacggcgccagcggcgacttcaagctatctctgagcaacgacgtcagagggctcctgagcctgcacgacatgtcccacctggacgtgggaggggaggcggcgctgctccacagggccaaggagttctcgagcaggcacctcgcgtccgccgtcaggtacctggacgaccctagcctcgcggagtacgtgcggcagtccctggaccacccgtaccacctcagcctgacgcagtacaaggccaggcatcacctccgctacctgcagagcctgccctccagagacgccgccgtggagagactcgcagttgccgagttccagctcaacaagtcgctgcatcagggagagatgcgagagattaaaaggtggtggatggacctagggttggctgaagaaatacctgtggtgcgggatcaggtgatgaaatggtacatgtggtccatggcagccctccaaggatcttccttctccagataccgggtcgagatcaccaagataatctcgcttgtttacgtcgtcgacgacatattcgacctcgttggcaccctggaggagctctccgccttcaccgaggcagtcaaaatgtgggatactgtggctgctgattcacttcccagttgcatgagatcatgctataaggccctccacaccgttacgaacgagatcgcagagattgcccagaaggagcatggatctaaccatgtcaatcgtcttaggaaagcatgggcggtgttgttcgacggtttcatggttgaggcgagatggctagcgaccgaccaagtccctacggcggaggactacctacgaaacggcgtcatcacatcaggagtgccgctcacatttatgcacatattcagcatgctagggtatgatgacccaagcaccgaggaagaagaagaagcgatcatcgaccacatgccctcaatcatctcctgcccagccaagatcctcaggctctgggatgacatgggcagcgcaggatgaggctcaggaaggattcgatgggtcgtacagggacttctacctcatggagaaccctagccgcagccccggcgaggcggaagcgcacatgcgcggcctcatcgcgagggagtgggaggtgctcaacagggagtgcttctgcaggaggaccttcccctcgaacctcgtgcaggtctgcttgaacaccgcgaggatggtcagcgtcatgtactcgtacaacaaggagcagaggcttcccgtcctcgaggactacgcggcgatgatgttggtgctttgatttgaagcatgcatgcatgcattgctctctccgatccgcagatatgaaagtaaagtccatgtcatgcagatgatgatttgttttgagaccagtagtgtagagtagatattaggttgtgtaaaattagatagttgtgattagaataattgggcaaacgaatatggtatgtaaagatgcaatatatagcaacatatatggtaccgtcgttattattatatttttttcaaaaaaatgtaataatattaaaatatgcaatgcaatgtaatatggcccctgtaggaggcgccacgaccggccggttaattaccatggtgttttagggaattcgagtttcataagag

SEQ ID NO: 53886 - DNA, 1858 bp, Zea Mays
cgacggacgtcaaacggatgctgcgtcagcgtcagaagaagagcggcggcgggcgggagatgctggtcaccatcgacaacctcaagcgcctctgcatcgaccactacttcgaggaagagatcgagggcgccatggcgacgggcgcctgcacgcgtctcctccacagcgacgacctcttcgacgcaaccctcgcgttcaggctcctgagagaggcaggacacgatgtctcagcaaaagacgatgttctacgcaggttcatcgacggcgccagcggcgacttcaagctatctctgagcaacgacgtcagagggctcctgagcctgcacgacatgtcccacctggacgtgggaggggaggcggcgctgctccacagggccaaggagttctcgagcaggcacctcgcgtccgccgtcaggtacctggacgaccctagcctcgcggagtacgtgcggcagtccctggaccacccgtaccacctcagcctgacgcagtacaaggccaggcatcacctccgctacctgcagagcctgccctccagagacgccgccgtggagagactcgcagttgccgagttccagctcaacaagtcgctgcatcagggagagatgcgagagattaaaaggtggtggatggacctagggttggctgaagaaatacctgtggtgcgggatcaggtgatgaaatggtacatgtggtccatggcagccctccaaggatcttccttctccagataccgggtcgagatcaccaagataatctcgcttgtttacgtcgtcgacgacatattcgacctcgttggcaccctggaggagctctccgccttcaccgaggcagtcaaaatgtgggatactgtggctgctgattcacttcccagttgcatgagatcatgctataaggccctccacaccgttacgaacgagatcgcagagattgcccagaaggagcatggatctaaccatgtcaatcgtcttaggaaagcatgggcggtgttgttcgacggtttcatggttgaggcgagatggctagcgaccgaccaagtccctacggcggaggactacctacgaaacggcgtcatcacatcaggagtgccgctcacatttatgcacatattcagcatgctagggtatgatgacccaagcaccgaggaagaagaagaagcgatcatcgaccacatgccctcaatcatctcctgcccagccaagatcctcaggctctgggatgacatgggcagcgcagaggatgaggctcaggaaggattcgatgggtcgtacagggacttctacctcatggagaaccctagccgcagccccggcgaggcggaagcgcacatgcgcggcctcatcgcgagggagtgggaggtgctcaacagggagtgcttctgcaggaggaccttcccctcgaacctcgtgcaggtctgcttgaacaccgcgaggatggtcagcgtcatgtactcgtacaacaaggagcagaggcttcccgtcctcgaggactacgcggcgatgatgttggtgctttgatttgaagcatgcatgcatgcattgctctctccgatccgcagatatgaaagtaaagtccatgtcatgcagatgatgatttgttttgagaccagtagtgtagagtagatattaggttgtgtaaaattagatagttgtgattagaataattgggcaaacgaatatggtatgtaaagatgcaatatatagcaacatatatggtaccgtcgttattattatatttttttcaaaaaaatgtaataatattaaaatatgcaatgcaatgtaatatggcccctgtaggaggcgccacgaccggccggttaattaccatggtgttttagggaattcgagtttcataagag

SEQ ID NO: 53887 - DNA, 1188 bp, Zea Mays
gtcagttcttacaccccctcccccccttgctcccggcgtcaggcttctactgtggaatgtgaatcccgcgatgctccttgtggtggattgcgctctcacaagtagctggacactgacgtgcaactccacagcattagacctgtcctctgctgctcagggttttcacaagggttgctggtcaccaccaaaatgaagagtttgcagtgagagggaaggaaccaaaggatgaagttcagatttacacatggaaggatgcgaccctccgcgagctcactgatcttgtgaaagaggttgctcttccagcaagaaaaaggaatgcaaggctttcttttgcatttgtatacccagacaagaatggtcgttttgttgtcagacaggtgggttcgaccttcgcttacggtcatggaagaggcgacgatgccaaaactcttgcagagctcggattccagatcggtgattacttgagcgttgcaatcatgtagacggtgcccgcaccggatgtaattgctgtgatgtcaaaagggctctggttgcaacagtaaggcatgattctctgttagcactaggaactgcaaccagaattgtctgtaataccggtagtatcaaatttacctagacacttcgaacgagcaaggcgtctgtaataccggtacttacctgtggtgcctggagcttccaaatctggatagcgtgggtttttcattgagaatgttaagttggctcgggttcctatgaagtcaaacacaggaaagtttgcatcttggagccagaccagagtttgcatcttggagccagaccagttgggcaaattttgtttcgccatttctaaaatcttgtagccaggctagatttgagataacagtttagataatagttactctaaaattgaactgatggtcgaatttgcaccggagattggtctctttatgaacagtaaaagaacagtacaattataatgcatctgatagaatgcaaaagaaataaatgcatgacttgcaaccatttttcagaggcaaggtaccaacagttttaacgcgattttctcagttacgtaaccatgacatttttttctcatcacgcaaactatcccttccgttccaaattttaatacttttctagatacattccgtttgatacagtatatatctaaatacatagcaaaagcggttgaaattaaaaaaaacaaaa

SEQ ID NO: 53888 - DNA, 1299 bp, Zea Mays
ggaaactgcaaaatttagggtttctttgcatctctcccgtcggctcctcccctcccaagtcccacctcacctctcctcctcgcgaagtatcggcggcggcgagcgcggcagagcctcgttgctgaggaggggagatggcgggtatgggcgatatgccgatgaggcctgcgcggccgggcccgccgatgcagcaccgtggtccgcccccgatggcgcgcctccgccccgaaccaatcgaccgcgagaagacctgtcctctgctgctcagggttttcacaagggttgctggtcaccaccaaaatgaagagtttgcagtgagagggaaggaaccaaaggatgaagttcagatttacacatggaaggatgcgaccctccgcgagctcactgatcttgtgaaagaggttgctcttccagcaagaaaaaggaatgcaaggctttcttttgcatttgtatacccagacaagaatggtcgttttgttgtcagacaggtgggttcgaccttcgcttacggtcatggaagaggcgacgatgccaaaactcttgcagagctcggattccagatcggtgattacttgagcgttgcaatcatgtagacggtgcccgcaccggatgtaattgctgtgatgtcaaaagggctctggttgcaacagtaaggcatgattctctgttagcactaggaactgcaaccagaattgtctgtaataccggtagtatcaaatttacctagacacttcgaacgagcaaggcgtctgtaataccggtacttacctgtggtgcctggagcttccaaatctggatagcgtgggtttttcattgagaatgttaagttggctcgggttcctatgaagtcaaacacaggaaagtttgcatcttggagccagaccagagtttgcatcttggagccagaccagttgggcaaattttgtttcgccatttctaaaatcttgtagccaggctagatttgagataacagtttagataatagttactctaaaattgaactgatggtcgaatttgcaccggagattggtctctttatgaacagtaaaagaacagtacaattataatgcatctgatagaatgcaaaagaaataaatgcatgacttgcaaccatttttcagaggcaaggtaccaacagttttaacgcgattttctcagttacgtaaccatgacatttttttctcatcacgcaaactatcccttccgttccaaattttaatacttttctagatacattccgtttgatacagtatatatctaaatacatagcaaaagcggttgaaattaaaaaaaacaaaa

SEQ ID NO: 53889 - DNA, 303 bp, Zea Mays
caagtagctggacactgacgtgcaactccacagcattagacctgtcctctgctgctcagggttttcacaagggttgctggtcaccaccaaaatgaagagtttgcagtgagagggaaggaaccaaaggatgaagttcagatttacacatggaaggatgcgaccctccgcgagctcactgatcttgtgaaagaggttgctcttccagcaagaaaaaggaatgcaaggctttcttttgcatttgtatacccagacaagaatggtcgttttgttgtcagacagcatgtcttggtgggccgtcaaaag

SEQ ID NO: 53890 - DNA, 1185 bp, Zea Mays
caatgtattatgatgtgtttatattatgtattttcgatcagatagttttgttttgtaaggtattgtttatgcacttgtatttgtgagatattaatttaatctttcatgaagttgtaattatttatatattattactaatttttatatggatgtatgacttgtgtgaatttttgaagtcaattgagggtacatgttacggttttaccaatcgtatttttcagattctgaccgttaccatgtattttccgtatcgaacttcagtttccgatatttccgaattactgatgttgttttcgtttccgaggaaaaatatgaaaacggaaatggtttttagtgtttaccgaccgttatcactcctacctagggctgcttaaatttttcagtggctgatttgggcacacaggccaaatacgccatgccacattaatctgcatgcttggattgcttttgcaataagcaacagaacaatagagctctatgtactacttccagacaaaagcacatagcagttgcccaccattatgacatggtagctggaagggatttgagatatttgagtcaatcaatgggtgtctgcttttccattggaacccttctcttgatgcttctccgcagcaagggtagcttggcaggatgctggtgggttctcgtcttatttcagtggagccggttcggaagcgctttgctacgacttgtttctccgacgggcatgctgttcaacaaaaacttcaaccaggtcgagtacattgaggcaaaaacgacatgaagatgcactgtacccatcacaagaggtgggatgatgaagatgtagaaaatgaggcacagaaacctggaaagatgaatagatgcaaaaggattcgcaaaaaccatgggaagatcatttgggcaaatcacttccgtccagaaggggatcagagttggctacgatcacttccattcgtcctaggaactatatacctcacagattcatggaagctgagaactgtagtagtggctacgctttccaacacttggcagtttgcgcccgtagaatggagttaaactgagtgctaaattttgtttcttgttactaaccgttaagaatcacgagatggttaatgatggttgagcttgtccagaaaacatggataagtgaggtctcaaaaaatgtagcatcttttccaatattatcgtttcttatgccat

SEQ ID NO: 53891 - DNA, 2264 bp, Zea Mays
agctcgctcccctcccgccccactcgtcggctagtcgcctagtccctttcccttccacacgattcggagcagcacgtgcgcgtcaaaccttaccaccaccgccatcgtcttgcggctaaattgccttgagacgccgcagcactgcagcagcacagggggggagaaggggcgggcgctcgagtgaaccaccactacactactccgcgtctccctcccctggctacgaggctataataacgagcgcgtaagacggccggcggcgcacgcagccatgtccgcgcacctccgcctactctcggccgcccacgtctccgcgcccacacccacctccctccaccgcctccgtggccctcctccttctcctcccgcggcccgcctccggctgctgctgcgaccgccgcggctcggggggagccaggcgcgcttcgccggcgccgtccgctgctccggctcggcgtcggcgccggcggtcgcgcgggttggcgaggacagcgacgcggcggcgggcatatgggagcaggtgcgggatatcgtcgtgttcgccggccccgcgctagggctctggatctgcggtccgctcatgagcctcatcgacaccatggtcatcggccagacctccgcactccagctcgccgcgctagggcctgggacagtgttctgcgattacctaagctacatattcatgttcctctcggtcgcaacatccaacatggtggccacctccttagccaaaaaggatgaagaacttacacaacatcaagtgtctatgttactgtttcttgctcttgcttgtggcataggaatgtttttgttcaccaaggtgtttggtactcaagtattgactgcttttactggatctgggaattatgaacttatttcttcggccaatacatatgcacagataagaggtttcgcatggcctgcagttcttgttggcttagttgctcaaagtgctagtctgggcatgaaggactcttggggtcctttgaaggcattggcagctgctagtgttataaatggtgttggtgatatatttctttgctctgtttgtgactatggaattgctggtgctgcctgggcaactatggtttcacagctttcatgatgatgcaaaatctaagcaataagggttttcgagctttctcatttacgattccatcagttagagagctattgcagatatttgaaattgcagctcctgtttttgtgacaatgacgtccaaggtggcattttatgcattgctcacatattctgcgacttctatgggagcaataacgcttgcagcccatcaggttatgatcaatgtcttatgcatgtgtactgtttggggcgaacctctgtctcaaactgcacagtcattcatgcctgagctggtatatggtgctaatcggaatctgaccaaggcaaggatgctattgaagtcacttgtgatcattggagcgataactggattgaccttgggggtagtagggacacttgttccatggcttttccccagtgtctttaccaatgaccaaagggtcatccagcagatgcaccgagtactggctccatatttcagtgtattgctggtgactccttcaatacactcccttgagggaacactcttggctggaagggatttgagatatttgagtcaatcaatgggtgtctgcttttccattggaacccttctcttgatgcttctccgcagcaagggtagcttggcaggatgctggtgggttctcgtcttatttcagtggagccggttcggaagcgctttgctacgacttgtttctccgacgggcatgctgttcaacaaaaacttcaaccaggtcgagtacattgaggcaaaaacgacatgaagatgcactgtacccatcacaagaggtgggatgatgaagatgtagaaaatgaggcacagaaacctggaaagatgaatagatgcaaaaggattcgcaaaaaccatgggaagatcatttgggcaaatcacttccgtccagaaggggatcagagttggctacgatcacttccattcgtcctaggaactatatacctcacagattcatggaagctgagaactgtagtagtggctacgctttccaacacttggcagtttgcgcccgtagaatggagttaaactgagtgctaaattttgtttcttgttactaaccgttaagaatcacgagatggttaatgatggttgagcttgtccagaaaacatggataagtgaggtctcaaaaaatgtagcatcttttccaatattatcgtttcttatgccat

SEQ ID NO: 53892 - DNA, 2283 bp, Zea Mays
agctcgctcccctcccgccccactcgtcggctagtcgcctagtccctttcccttccacacgattcggagcagcacgtgcgcgtcaaaccttaccaccaccgccatcgtcttgcggctaaattgccttgagacgccgcagcactgcagcagcacagggggggagaaggggcgggcgctcgagtgaaccaccactacactactccgcgtctccctcccctggctacgaggctataataacgagcgcgtaagacggccggcggcgcacgcagccatgtccgcgcacctccgcctactctcggccgcccacgtctccgcgcccacacccacctccctccaccgcctccgtggccctcctccttctcctcccgcggcccgcctccggctgctgctgcgaccgccgcggctcggggggagccaggcgcgcttcgccggcgccgtccgctgctccggctcggcgtcggcgccggcggtcgcgcgggttggcgaggacagcgacgcggcggcgggcatatgggagcaggtgcgggatatcgtcgtgttcgccggccccgcgctagggctctggatctgcggtccgctcatgagcctcatcgacaccatggtcatcggccagacctccgcactccagctcgccgcgctagggcctgggacagtgttctgcgattacctaagctacatattcatgttcctctcggtcgcaacatccaacatggtggccacctccttagccaaaaaggatgaagaacttacacaacatcaagtgtctatgttactgtttcttgctcttgcttgtggcataggaatgtttttgttcaccaaggtgtttggtactcaagtattgactgcttttactggatctgggaattatgaacttatttcttcggccaatacatatgcacagataagaggtttcgcatggcctgcagttcttgttggcttagttgctcaaagtgctagtgtgtttgttatacctcagtctgggcatgaaggactcttggggtcctttgaaggcattggcagctgctagtgttataaatggtgttggtgatatatttctttgctctgtttgtgactatggaattgctggtgctgcctgggcaactatggtttcacagctttcatgatgatgcaaaatctaagcaataagggttttcgagctttctcatttacgattccatcagttagagagctattgcagatatttgaaattgcagctcctgtttttgtgacaatgacgtccaaggtggcattttatgcattgctcacatattctgcgacttctatgggagcaataacgcttgcagcccatcaggttatgatcaatgtcttatgcatgtgtactgtttggggcgaacctctgtctcaaactgcacagtcattcatgcctgagctggtatatggtgctaatcggaatctgaccaaggcaaggatgctattgaagtcacttgtgatcattggagcgataactggattgaccttgggggtagtagggacacttgttccatggcttttccccagtgtctttaccaatgaccaaagggtcatccagcagatgcaccgagtactggctccatatttcagtgtattgctggtgactccttcaatacactcccttgagggaacactcttggctggaagggatttgagatatttgagtcaatcaatgggtgtctgcttttccattggaacccttctcttgatgcttctccgcagcaagggtagcttggcaggatgctggtgggttctcgtcttatttcagtggagccggttcggaagcgctttgctacgacttgtttctccgacgggcatgctgttcaacaaaaacttcaaccaggtcgagtacattgaggcaaaaacgacatgaagatgcactgtacccatcacaagaggtgggatgatgaagatgtagaaaatgaggcacagaaacctggaaagatgaatagatgcaaaaggattcgcaaaaaccatgggaagatcatttgggcaaatcacttccgtccagaaggggatcagagttggctacgatcacttccattcgtcctaggaactatatacctcacagattcatggaagctgagaactgtagtagtggctacgctttccaacacttggcagtttgcgcccgtagaatggagttaaactgagtgctaaattttgtttcttgttactaaccgttaagaatcacgagatggttaatgatggttgagcttgtccagaaaacatggataagtgaggtctcaaaaaatgtagcatcttttccaatattatcgtttcttatgccat

SEQ ID NO: 53893 - DNA, 870 bp, Zea Mays
ttgagtcgtgcaatgcaattttcgagcatcataccgtttctcattaaaatacacttccaaaggaatgtaattcgaaacctaagccagcggctgtgcaaaagaacgcgacgaaacctagcgctaaggctcctgctaaaaagggaaaacagcaagcatcaacaagtgccgaggaaccagacgagcctttgagtcccacttcagagaaaattcgccaacagaggcttgtggaagaagctgacttcaagtcaactacagacctttttgcaaagaagagcggtgaacaaaagtcactagatacttttatcccaaagtccgagagcgactttgcggaatacgcggagcttattgcaaataaactgctcccctacgataaaagttttcactacatggctctcctcaagaatgtcatgagactttccatgacaccgttgaaaggctcggacgcgaaagacatatcttcctccgtgacggcgattgctaacgagaagatcaaggctgagaaagaggccgcagcaggcaaaaagaaacaaggagcgagaaagaagcagctccacatcgagaaaggagacgacgacttcatccccggacggggtggtggctacgatgacccggacgagtacgacttcatgtgatttggctggaaggaagagtaagtagggttaataggtttccgtcttgtatacatttggcaagcagagaacatatcacgagagtttgcggcatactatactatggcatggaacatgcgttatctgtttgaggatgaattttgactctgcaggacaagaagatcacaagtgcttacttaattgttattgaatctctgtggtatttttttagcatacattgcattttcatttattttttgtc

SEQ ID NO: 53894 - DNA, 965 bp, Zea Mays
cctacttctccaacgcccttacacctatctgaaccttgctcgcaattctgaagatttccagcccgttgctcctgttgtgaaagtcgagccacttaaaaatcagtgggctgatgaagatgtcgatgccgacgacgtaaaagattcatgggaggaagaagaggaagaggagaaacctaagccagcggctgtgcaaaagaacgcgacgaaacctagcgctaaggctcctgctaaaaagggaaaacagcaagcatcaacaagtgccgaggaaccagacgagcctttgagtcccacttcagagaaaattcgccaacagaggcttgtggaagaagctgacttcaagtcaactacagacctttttgcaaagaagagcggtgaacaaaagtcactagatacttttatcccaaagtccgagagcgactttgcggaatacgcggagcttattgcaaataaactgctcccctacgataaaagttttcactacatggctctcctcaagaatgtcatgagactttccatgacaccgttgaaaggctcggacgcgaaagacatatcttcctccgtgacggcgattgctaacgagaagatcaaggctgagaaagaggccgcagcaggcaaaaagaaacaaggagcgagaaagaagcagctccacatcgagaaaggagacgacgacttcatccccggacggggtggtggctacgatgacccggacgagtacgacttcatgtgatttggctggaaggaagagtaagtagggttaataggtttccgtcttgtatacatttggcaagcagagaacatatcacgagagtttgcggcatactatactatggcatggaacatgcgttatctgtttgaggatgaattttgactctgcaggacaagaagatcacaagtgcttacttaattgttattgaatctctgtggtatttttttagcatacattgcattttcatttattttttgtc

SEQ ID NO: 53895 - DNA, 1060 bp, Zea Mays
cttcgtgttccgatgcgcggttcgtggtggggcccctggcctcgcaccgtcccaccacggcggctccgtatctagagtggggagctctcgccgccgtcccacggcggtctcctaggatttgttcggagatcatctgctcattctgaagatttccagcccgttgctcctgttgtgaaagtcgagccacttaaaaatcagtgggctgatgaagatgtcgatgccgacgacgtaaaagattcatgggaggaagaagaggaagaggagaaacctaagccagcggctgtgcaaaagaacgcgacgaaacctagcgctaaggctcctgctaaaaagggaaaacagcaagcatcaacaagtgccgaggaaccagacgagcctttgagtcccacttcagagaaaattcgccaacagaggcttgtggaagaagctgacttcaagtcaactacagacctttttgcaaagaagagcggtgaacaaaagtcactagatacttttatcccaaagtccgagagcgactttgcggaatacgcggagcttattgcaaataaactgctcccctacgataaaagttttcactacatggctctcctcaagaatgtcatgagactttccatgacaccgttgaaaggctcggacgcgaaagacatatcttcctccgtgacggcgattgctaacgagaagatcaaggctgagaaagaggccgcagcaggcaaaaagaaacaaggagcgagaaagaagcagctccacatcgagaaaggagacgacgacttcatccccggacggggtggtggctacgatgacccggacgagtacgacttcatgtgatttggctggaaggaagagtaagtagggttaataggtttccgtcttgtatacatttggcaagcagagaacatatcacgagagtttgcggcatactatactatggcatggaacatgcgttatctgtttgaggatgaattttgactctgcaggacaagaagatcacaagtgcttacttaattgttattgaatctctgtggtatttttttagcatacattgcattttcatttattttttgtc

SEQ ID NO: 53896 - DNA, 695 bp, Zea Mays
agcacattgtcaccctaggtgctgatgaatatctagattgcttcatctgccctcactgttatgcaagaatcgacattttagttagccactctaatctgtccaaacaagaaggccagctaatctagattaacttcccgctccaactagtcactagccaaagccgattcaaacaggtccccacatcacacgaaattttggcagctgtggagctggagctgcaatggtggacacggactgagattgcctcgcctcgtggtcacatcacacgaaatggtgcgtggggtactcgtgctccgagccattgtagtcgtagtagagcctctcccccttggagatgtccctgttggccaacagcagcacccggcactcgccgccgacggcgaaccgcacgcacttgacgttctgcttcctcctcccctccctgagcaatcaatacaagcacacaagggttcagtcgttcagccaaagatcgacggaaactgcaatgcgcaatgggaaccgacggcatggggctctctactcacggcgtgtggttgttgatgccgttgatgaaccgcgcgatgttgctgcggcggtcggggcagatgacgaggctgcgggccggcgatgccgccgacagcagcgtcatcatgctgtcgccgtccacctgcatcccgccggcctccagcgccgcgcggttcgcggaccgcggcgcc

SEQ ID NO: 53897 - DNA, 1922 bp, Zea Mays
gcgtgcccccctccctccctcagtccctctctctcgctctcggcgacgactgggcgaccgccgccgccgctgcgccgcccttgtccaggtgcccaggtcttcgcaggcgccttcgccaggtcttcgacggtaacgagcaccaaccggattcagggaatataagtaaaatgaggccagttttttgtgggaaccttgactatgatgttcgcatctcagaggttgagcgcctttttgggaagtatggaagggtggaacgagtggatctaaagacagagattgtcaatcttcacccatgcctggtgcaaagaagctgcaaaaggatcaagttgttacttcatccgttgtgaagccagaggagtttcaggaaaatcagattatgtttatgttttactgttataagtcattggacaagtgtatatcaggataaattagaagaaaaaagttctttcttcaaatttaggtccagtactcaattatttctttgccgcagggatatcatggagcatatgtgctcttcctggttgatggactggctctacctttactgcctctgcctgtgccccatctcatgccttgtccatctccaggagttcacaagtccaccgtggcatctgttcacatggaaacgaccacctcgtgactgatgtcttacttttacgatcaacattgcatcctcctcccccgcctcatcaccatttcctcgccaatccaaccatgccaatctcatggccggctggagagtggagagaagtggaggttgcaccaccaattctttgatgtgccacgaatgtttggattgttgtactctactactctgacatcatttagttcaacataaacaagggtttgcatttgtctacatggaagatgaacgcgatgctgaagatgctatcagtagacttgatggaattgattttggcagaaaaggaaggaggatcagggttgagtggacaaaggaggatcgcactgttggccgaaaaagcagctcaaggaggtctccaaccaatacaaaaccgaccaaaaccttgtttgtgatcaactttgacccgatcaacacaagaatccgagatctggagaggcacttcgataaatatggcagggtcgcaaatgtaagaatcaaaaagaactttgcctttatccagtttgagatacaggaggatgctacaagagcattggagggtactaatggaagccatttcatggacagggtgatctctgttgagtatgcacttcgtgatgacgatgaaaaaggtgaaagagggaacgggtacagcccagacaggagaggtcgtgaaagatccccaggtagaaggcgttctcctagtccctacggtagaggacgggagagaggtagcccagattacgggagaagcaaggagagggggagcccagactatggcaggggaggacgcagccctgataatggcaggggagtaagcccagctggtggtggcagaggcgatcatgccaggggtggagggcgcagtcctgactatgatcgccagcgccgggaagctagtcctccaggttatgacaggtcccccagccgctcacctgggagggaggcgagagagtagaagcagcgttccattccatgcctgtgttcaagcatcagatgaatgtgcaagttggtaatgttagccagcaggaaacttgtctactatgcgcgttagctcgtgtttgactttccacccatttcagtatgaagcgacctcagaatgtaactcatgtagtagtattttttcaatggtagctttcagcactggtttgaacctgttgttggctttattttctgagtaaaatgcaccactcgaactttacgcattgtgtcacttgggtactgaactcagaaaaccagttaaacggatcatgaaactttgttggcccatgtaaaaccattcaaagtcagttctataaaccgg

SEQ ID NO: 53898 - DNA, 1705 bp, Zea Mays
gcgtgcccccctccctccctcagtccctctctctcgctctcggcgacgactgggcgaccgccgccgccgctgcgccgcccttgtccaggtgcccaggtcttcgcaggcgccttcgccaggtcttcgacggtaacgagcaccaaccggattcagggaatataagtaaaatgaggccagttttttgtgggaaccttgactatgatgttcgcatctcagaggttgagcgcctttttgggaagtatggaagggtggaacgagtggatctaaagacagggatatcatggagcatatgtgctcttcctggttgatggactggctctacctttactgcctctgcctgtgccccatctcatgccttgtccatctccaggagttcacaagtccaccgtggcatctgttcacatggaaacgaccacctcgtgactgatgtcttacttttacgatcaacattgcatcctcctcccccgcctcatcaccatttcctcgccaatccaaccatgccaatctcatggccggctggagagtggagagaagtggaggttgcaccaccaattctttgatgtgccacgaatgtttggattgttgtactctactactctgacatcatttagttcaacataaacaagggtttgcatttgtctacatggaagatgaacgcgatgctgaagatgctatcagtagacttgatggaattgattttggcagaaaaggaaggaggatcagggttgagtggacaaaggaggatcgcactgttggccgaaaaagcagctcaaggaggtctccaaccaatacaaaaccgaccaaaaccttgtttgtgatcaactttgacccgatcaacacaagaatccgagatctggagaggcacttcgataaatatggcagggtcgcaaatgtaagaatcaaaaagaactttgcctttatccagtttgagatacaggaggatgctacaagagcattggagggtactaatggaagccatttcatggacagggtgatctctgttgagtatgcacttcgtgatgacgatgaaaaaggtgaaagagggaacgggtacagcccagacaggagaggtcgtgaaagatccccaggtagaaggcgttctcctagtccctacggtagaggacgggagagaggtagcccagattacgggagaagcaaggagagggggagcccagactatggcaggggaggacgcagccctgataatggcaggggagtaagcccagctggtggtggcagaggcgatcatgccaggggtggagggcgcagtcctgactatgatcgccagcgccgggaagctagtcctccaggttatgacaggtcccccagccgctcacctgggagggaggcgagagagtagaagcagcgttccattccatgcctgtgttcaagcatcagatgaatgtgcaagttggtaatgttagccagcaggaaacttgtctactatgcgcgttagctcgtgtttgactttccacccatttcagtatgaagcgacctcagaatgtaactcatgtagtagtattttttcaatggtagctttcagcactggtttgaacctgttgttggctttattttctgagtaaaatgcaccactcgaactttacgcattgtgtcacttgggtactgaactcagaaaaccagttaaacggatcatgaaactttgttggcccatgtaaaaccattcaaagtcagttctataaaccgg

SEQ ID NO: 53899 - DNA, 2334 bp, Zea Mays
gcgtgcccccctccctccctcagtccctctctctcgctctcggcgacgactgggcgaccgccgccgccgctgcgccgcccttgtccaggtgcccaggtcttcgcaggcgccttcgccaggtcttcgacggtaacgagcaccaaccggattcagggaatataagtaaaatgaggccagttttttgtgggaaccttgactatgatgttcgcatctcagaggttgagcgcctttttgggaagtatggaagggtggaacgagtggatctaaagacaggttagtctgttactctgttcattgttatgtcctcgaatttatttatgatctataatagcaaaacaatcgttgctcctgcagctatatgctgtttttggtcaaaggcagtgctctattttattaagtgaattacatccagtgtcagcaactgcagctttgaatcattctctctccaatttagatactgaagcattactgaatgtatatatccatccataagacaatgctgctggatttgcatttaaaaaaaatcaattatctagccatccaaaaacagagcaatgcctttgtttaaattttgtttttatcaattgatctgcaatatttgttcaatcacaaatacacgattttcacatgactcctctaagaatgtgatctttgtacggaaactactatcaccatgatgtggcagagattgtcaatcttcacccatgcctggtgcaaagaagctgcaaaaggatcaagttgttacttcatccgttgtgaagccagaggagtttcaggaaaatcagattatgtttatgttttactgttataagtcattggacaagtgtatatcaggataaattagaagaaaaaagttctttcttcaaatttaggtccagtactcaattatttctttgccgcagggatatcatggagcatatgtgctcttcctggttgatggactggctctacctttactgcctctgcctgtgccccatctcatgccttgtccatctccaggagttcacaagtccaccgtggcatctgttcacatggaaacgaccacctcgtgactgatgtcttacttttacgatcaacattgcatcctcctcccccgcctcatcaccatttcctcgccaatccaaccatgccaatctcatggccggctggagagtggagagaagtggaggttgcaccaccaattctttgatgtgccacgaatgtttggattgttgtactctactactctgacatcatttagttcaacataaacaagggtttgcatttgtctacatggaagatgaacgcgatgctgaagatgctatcagtagacttgatggaattgattttggcagaaaaggaaggaggatcagggttgagtggacaaaggaggatcgcactgttggccgaaaaagcagctcaaggaggtctccaaccaatacaaaaccgaccaaaaccttgtttgtgatcaactttgacccgatcaacacaagaatccgagatctggagaggcacttcgataaatatggcagggtcgcaaatgtaagaatcaaaaagaactttgcctttatccagtttgagatacaggaggatgctacaagagcattggagggtactaatggaagccatttcatggacagggtgatctctgttgagtatgcacttcgtgatgacgatgaaaaaggtgaaagagggaacgggtacagcccagacaggagaggtcgtgaaagatccccaggtagaaggcgttctcctagtccctacggtagaggacgggagagaggtagcccagattacgggagaagcaaggagagggggagcccagactatggcaggggaggacgcagccctgataatggcaggggagtaagcccagctggtggtggcagaggcgatcatgccaggggtggagggcgcagtcctgactatgatcgccagcgccgggaagctagtcctccaggttatgacaggtcccccagccgctcacctgggagggaggcgagagagtagaagcagcgttccattccatgcctgtgttcaagcatcagatgaatgtgcaagttggtaatgttagccagcaggaaacttgtctactatgcgcgttagctcgtgtttgactttccacccatttcagtatgaagcgacctcagaatgtaactcatgtagtagtattttttcaatggtagctttcagcactggtttgaacctgttgttggctttattttctgagtaaaatgcaccactcgaactttacgcattgtgtcacttgggtactgaactcagaaaaccagttaaacggatcatgaaactttgttggcccatgtaaaaccattcaaagtcagttctataaaccgg

SEQ ID NO: 53900 - DNA, 1324 bp, Zea Mays
gcgtgcccccctccctccctcagtccctctctctcgctctcggcgacgactgggcgaccgccgccgccgctgcgccgcccttgtccaggtgcccaggtcttcgcaggcgccttcgccagattcagggaatataagtaaaatgaggccagttttttgtgggaaccttgactatgatgttcgcatctcagaggttgagcgcctttttgggaagtatggaagggtggaacgagtggatctaaagacagggtttgcatttgtctacatggaagatgaacgcgatgctgaagatgctatcagtagacttgatggaattgattttggcagaaaaggaaggaggatcagggttgagtggacaaaggaggatcgcactgttggccgaaaaagcagctcaaggaggtctccaaccaatacaaaaccgaccaaaaccttgtttgtgatcaactttgacccgatcaacacaagaatccgagatctggagaggcacttcgataaatatggcagggtcgcaaatgtaagaatcaaaaagaactttgcctttatccagtttgagatacaggaggatgctacaagagcattggagggtactaatggaagccatttcatggacagggtgatctctgttgagtatgcacttcgtgatgacgatgaaaaaggtgaaagagggaacgggtacagcccagacaggagaggtcgtgaaagatccccaggtagaaggcgttctcctagtccctacggtagaggacgggagagaggtagcccagattacgggagaagcaaggagagggggagcccagactatggcaggggaggacgcagccctgataatggcaggggagtaagcccagctggtggtggcagaggcgatcatgccaggggtggagggcgcagtcctgactatgatcgccagcgccgggaagctagtcctccaggttatgacaggtcccccagccgctcacctgggagggaggcgagagagtagaagcagcgttccattccatgcctgtgttcaagcatcagatgaatgtgcaagttggtaatgttagccagcaggaaacttgtctactatgcgcgttagctcgtgtttgactttccacccatttcagtatgaagcgacctcagaatgtaactcatgtagtagtattttttcaatggtagctttcagcactggtttgaacctgttgttggctttattttctgagtaaaatgcaccactcgaactttacgcattgtgtcacttgggtactgaactcagaaaaccagttaaacggatcatgaaactttgttggcccatgtaaaaccattcaaagtcagttctataaaccgg

SEQ ID NO: 53901 - DNA, 3119 bp, Zea Mays
ggctgtccccacttcccagcaacgcaacccagccatggcgacaccgccgccgcgaccgggaccggccgccgcatccgcggcggtctccctcctcgaccacctcgagcacgcgaatttcgctccaccccctccccctccgccgccgccctcccccaccaccgtcctcaccgcgtggtcgcgcctccgcgaccctaactccacctcccccgctgacgcactcgccgcgctagagacgctccaccaccaccgtcgcgcgctccgcctctcgtccgcgcacgcctcgctcctgctcccactgctcccgctacacccccgcctcgtggccacgctgctcgccgctgccccgcacctcggccccgcctccgtcccggcctccctccccttcgcccctcgcctcctcctcctcggcgcccgcgcctccgccaaggatctcccgggccgtgccagcttcggggaacccgcttccaccgcgaagaatcccgccggcagcggtgagcctgccgatggccaggacgacgaccctgttgtagctgtgggccgcattcttgaagatgtggagcggggcggtcagagcatcgatgatgtcgaccacctcgcccttgcaggggttggttacgcgctggcgtctgctgacgaggtgcagttcagaaggatcattgtgcccttgcttaggatctgtggcaggactgggaatctgtctgtcggtgttcgggtgcttaagctgatggaatggctggtaatgggattcatcgagtccaggaagatgaggaatgctcaggtgctctttgagatgacttcaccggaggagtgtgagggcgagaactattgtgtgctgttaccagcggtgatgttggcctgcggtgggttgcgggcactgagggttgcttcggctaggtaccggttggactttgatccacggctgaagcaggcgcctgagcggacaattcagtttgcagctgagcgggctgttttagaagggaggccggccgatgaccagcatatccttgttcagtgtgtcgcattggggctgtcacggtgtgggcaggtcgcgtttcacgaatcggtgttacggtgtgtctgtatgggattgctaaaggagctcctcccacttcctgattttcttaggaggtcggtccaaaacgcaggagggaactcaaatgaggttatcaaggctcaggtcaataaacaccttgatagtgttcttttcaaagaggcaggcccagtgactggggttctttgcaaccagtattcatatgccaatgacaaggctaaaagctttgtcgaaacttgtgtatgggagtacgcacaggagatttatcgtcatcttcgtgcagcagtgttgctgcaccgggggaagcaggatggcttgattacggcgattgacaagaatgctgaggcctcatttcttatggttgtagtctttgcagccgaggtcgctaaacacaggctaaatgctaagtcctccgaggggttccaacctgaggttgctgctagaatcttggtggcgttctcttgtgtggaacatcttaggcgactgcgtctccctgagtacactgaggcagtccggagtgctgtgcttgccaatcaagagaatgtagcagctactgctttgttcatcgagtcaataccttcatatactgaactgacaagtgaaccagatttactggccttggatagaccaacaacatataactggtacagagatgaggttcagacatcacgcatgctgttttacttgcgggttgtgccaacttgtgttagcctcattccagttcatacgatgcaggataaactggcctcaatcatgttcttatatctacaacatccaaatgagaaagttacaagtgcttcacactctgtgatggtatcgttcctgtcatctggcagtgatgctgatcaggatgatcgagcagctttgaaagagcgacttgccttttactacatcaagagatctttggaggcttatcctgggttaacaccgtttgacggattagcatcaggagttgcagcacttgtacggcatcttcccgcaggcagtgctgccattcttttttgtatccatagccttgctgtcaaggctaaagatctttgtgagactgcaaatgttcagaacaaatccttgtggaggtcatgggaagagagcacagatccatgtaagaaaacattggatctgttgctgagactaatcttccttgtggatattcaggttagattatatatggtcaattttcttccccctcatggcttgatctatggttctctagaattgttagttagcgcagttcttgcatttagagtatgctttgtcggtttgcagaatattagtttagggtttctctacaataatgcatatactaaagtagcctaatgtttcttgtgtgcttgctatggagcctcacttggcacgttctatgtttttttattatcaaggttttcttctcttttgcagtcattcccttacctgttgaaggagctggcacagttggtgaccctgctaccaaaggaaggccaggatgcggtccttgatgacatgcacacccatgtcgcggagtctgacgatgtcactcggaagccggtactcgtgtcgtggctgcagtccctctcctacctaagctcacagtcgagccgtgaatctcacagcaaggccaagagtgctactgcatccgtagcaagcgatgagctgctggacagagccgtggcacgcttgtgataccatcttgtcggtaaattggatggatgcgtgttgcaagtaagtgagtaaattagatgcatcttgcagccttgcagggattaatccttgagatctaccaacaatgagtagtacaaatgagttttcgagacaggatctctcatcaaataaagggcccacgccatctttcgccttttcaactgagaggaatcgatccagataatagctagttcagcaacagccaggataaggatacagtgaaacaagatcttaagtattcagctagttagaggactgaattcaacttgtctgtcagtgtcggcctgggcggtcgccttggtcccccccccccccccccaagttcacaagacccagccctaggtgtatagatatagttgtcagactatcagtatatggtctaatagttctg

SEQ ID NO: 53902 - DNA, 2124 bp, Zea Mays
tcatagatctgctgaatagtcgttgtcacgttcttgttcttgagggccatgtgccatgcgcgtggtggactgatgcatggagaagagcgttcttgttctagagcctagcaaccatgtgtgtacttttttactgttgaaatgaacttcttgtcatacttctgtggggaaacaaaattgaagcattctttttctgtagatgttggcatctaatttccttcctacacaataatggtttctatttatcatctattgcttatgaaataaattgaaccaatagttgatctcttattcttgctgggaatggacatctttctttcttttttaaataatcggagatagtagtaatgttgacattgctccatttcatttatgatgaatatggacatcctttatggcagtgcctgcttgcattagtagccaacaatcattttgttttagttgtacatatacatgcactttcatgcccccaactgtttgcatgtcactttgacaaagttatttatattatgtggataagagcttttgcattctagaaccatgccaaccgatgtccactggtgtcatcacaggttctaaaaccgtgctagaatttgcattttaaagcagttgctacactgatgactagtatatttcccctcattttcttgagtattttatctttatttaggaaaaggtgaaggtaaaaacagctagcttttgttgcaagcatgttcacatgaagcccttttatatagataaattaatgttcattccgtttcataatttcttagaggaaaaggtgaaggtaaaaacagctagcttttgttgcaatcatattcacatgaagcccttttatatagataaattaatgttcattccggttcataatttcttagaggtatgcacgacctgctgaatttggcctaacaaatggctgaattctcaccttttacgttttgtttacacttgtgtcctacaacctcattttatagataatctgataatatataggtggagtaccttcctgttttctaccctcttgagatcaagcaagagaatgcccttcattatgggaggacatatttgttggtaagggacataacacttcacatgcccatatgactttagaagctcatggatccttttagtgtctcctgaaattgaggtatatgaagggatgatagtttgatgccatccacgtgacagtgaccttgaggccattgacaccaatatagatcatgttgagcctgagcacaaagaccttctgagagtccatgaagtgggaggtggctctacaatgtgttgcatccactcagttggatctaatcttactcgtactagggagctactagagttgtagtagaatgtgttcatgcagagcgggcaagaagctttcacagtgggtaaggattcaaacaggactccaacaagtgtgcatgagctggttgtacctatttgttccctggaaactggagtgcttggaaagagaatcaaaaggtctctaactggtgggcatgagatgcagtctacccaggacaagtgatcagggaggctagcatggtaaacttgacatttctcctcataaattatcataagtcgcacataactcaatcctacaaaataaatatgttcatcttataactaacatcaccgctgcatgacagcatgaatggtgagctgtaattttccatgaaaatgctgcaggtgaaggaagcaatactccaacatgtcaagttacaaaaccttcaagttcagtgagatggggtgacaggagtagctaaccacagttgaggcgacaaaaatacatatccaagtttaggtccttgtgcagatagacagataaacaagtatgacagtcacttcagaagtagcttccactccctatgttttgcaaggtagagagctccacgatgtagattccagacccaatgttgcgcaaggtagtaaaagttgtacacatctgttagcctgttgctgttgttgatctggtgatgaacattctcttctacaaaatcaaaagatgttttatttacatagaaattggacatatgaagcttctgttgagtgcatgataattcaatatattatgggttatattccatgatatgaattcatatgatgtgtttcttgtgatgacgattatag

SEQ ID NO: 53903 - DNA, 1396 bp, Zea Mays
gaaaaaaactcacagttgggttcgaccttgccgtctcccactctcccttctcgcgccgttggaggcaaatcgccgcgccgccccctccgcccccgttgtccgccttggttccctcctcgcacctccctcttctgccccctccctcgttgcccgccctccagcgacaactgctcccctcccacacgcgcgactcctcccagcaccgtttagggtctcgcgactcggcggcgaggcggcctttgtcggcaaactcgggcacgacgagttcggaagaatgcacgcggccatcctccacaacaacggcatcgactactatgtcgtcgtcttcgatgtgggcgcgcgcactgcactcgtcttcgtcaccctatgcgccgatggggagcgtgaaccccagtgccgacatggtcctcaatgccaacgagctcattatgaggatatttgttggtaagggacataacacttcacatgcccatatgactttagaagctcatggatccttttagtgtctcctgaaattgaggtatatgaagggatgatagtttgatgccatccacgtgacagtgaccttgaggccattgacaccaatatagatcatgttgagcctgagcacaaagaccttctgagagtccatgaagtgggaggtggctctacaatgtgttgcatccactcagttggatctaatcttactcgtactagggagctactagagttgtagtagaatgtgttcatgcagagcgggcaagaagctttcacagtgggtaaggattcaaacaggactccaacaagtgtgcatgagctggttgtacctatttgttccctggaaactggagtgcttggaaagagaatcaaaaggtctctaactggtgggcatgagatgcagtctacccaggacaagtgatcagggaggctagcatgcatgaatggtgagctgtaattttccatgaaaatgctgcaggtgaaggaagcaatactccaacatgtcaagttacaaaaccttcaagttcagtgagatggggtgacaggagtagctaaccacagttgaggcgacaaaaatacatatccaagtttaggtccttgtgcagatagacagataaacaagtatgacagtcacttcagaagtagcttccactccctatgttttgcaaggtagagagctccacgatgtagattccagacccaatgttgcgcaaggtagtaaaagttgtacacatctgttagcctgttgctgttgttgatctggtgatgaacattctcttctacaaaatcaaaagatgttttatttacatagaaattggacatatgaagcttctgttgagtgcatgataattcaatatattatgggttatattccatgatatgaattcatatgatgtgtttcttgtgatgacgattatag

SEQ ID NO: 53904 - DNA, 1649 bp, Zea Mays
gaaaaaaactcacagttgggttcgaccttgccgtctcccactctcccttctcgcgccgttggaggcggcctttgtcggcaaactcgggcacgacgagttcggaagaatgcacgcggccatcctccacaacaacggcatcgactactatgtcgtcgtcttcgatgtgggcgcgcgcactgcactcgtcttcgtcaccctatgcgccgatggggagcgtgaaccccagtgccgacatggtcctcaatgccaacgagctcattatgaggatatttgttggtaagggacataacacttcacatgcccatatgactttagaagctcatggatccttttagtgtctcctgaaattgaggtatatgaagggatgatagtttgatgccatccacgtgacagtgaccttgaggtaagatgatcaaatacatatcactatctatttctttttctctgtccatacttgagaccaatgtctctttggtagatggatcctatgaaactaaataacttacagacatccgagcccttagaaaggttcaaattgtccgtttgtctccacctcgattggtatatcttctttccgctcttttactgagatatcatgagagatggtgtttcttttatgtaaaagaaacacaatagtgcaatgcctgatcagttggttaattgagcactgtaacttggatagatgttgtggatcatttctttgtcacaccacatgagatagctgcatcgtgcatttattttgtgcttccactaacaaagattagacgctaagcagtaatagagaggcactgaataccagcattctacattaatacattatgcaggccattgacaccaatatagatcatgttgagcctgagcacaaagaccttctgagagtccatgaagtgggaggtggctctacaatgtgttgcatccactcagttggatctaatcttactcgtactagggagctactagagttgtagtagaatgtgttcatgcagagcgggcaagaagctttcacagtgggtaaggattcaaacaggactccaacaagtgtgcatgagctggttgtacctatttgttccctggaaactggagtgcttggaaagagaatcaaaaggtctctaactggtgggcatgagatgcagtctacccaggacaagtgatcagggaggctagcatgcatgaatggtgagctgtaattttccatgaaaatgctgcaggtgaaggaagcaatactccaacatgtcaagttacaaaaccttcaagttcagtgagatggggtgacaggagtagctaaccacagttgaggcgacaaaaatacatatccaagtttaggtccttgtgcagatagacagataaacaagtatgacagtcacttcagaagtagcttccactccctatgttttgcaaggtagagagctccacgatgtagattccagacccaatgttgcgcaaggtagtaaaagttgtacacatctgttagcctgttgctgttgttgatctggtgatgaacattctcttctacaaaatcaaaagatgttttatttacatagaaattggacatatgaagcttctgttgagtgcatgataattcaatatattatgggttatattccatgatatgaattcatatgatgtgtttcttgtgatgacgattatag

SEQ ID NO: 53905 - DNA, 1301 bp, Zea Mays
gaaaaaaactcacagttgggttcgaccttgccgtctcccactctcccttctcgcgccgttggaggcaaatcgccgcgccgccccctccgcccccgttgtccgccttggttccctcctcgcacctccctcttctgccccctccctcgttgcccgccctccagcgacaactgctcccctcccacacgcgcgactcctcccagcaccgtttagggtctcgcgactcggcggcgaggcggcctttgtcggcaaactcgggcacgacgagttcggaagaatgcacgcggccatcctccacaacaacggcatcgactactatgtcgtcgtcttcgatgtgggcgcgcgcactgcactcgtcttcgtcaccctatgcgccgatggggagcgtgaaccccagtgccgacatggtcctcaatgccaacgagctcattatgaggatatttgttggtaagggacataacacttcacatgcccatatgactttagaagctcatggatccttttagtgtctcctgaaattgaggtatatgaagggatgatagtttgatgccatccacgtgacagtgaccttgagtccatgaagtgggaggtggctctacaatgtgttgcatccactcagttggatctaatcttactcgtactagggagctactagagttgtagtagaatgtgttcatgcagagcgggcaagaagctttcacagtgggtaaggattcaaacaggactccaacaagtgtgcatgagctggttgtacctatttgttccctggaaactggagtgcttggaaagagaatcaaaaggtctctaactggtgggcatgagatgcagtctacccaggacaagtgatcagggaggctagcatggtgaaggaagcaatactccaacatgtcaagttacaaaaccttcaagttcagtgagatggggtgacaggagtagctaaccacagttgaggcgacaaaaatacatatccaagtttaggtccttgtgcagatagacagataaacaagtatgacagtcacttcagaagtagcttccactccctatgttttgcaaggtagagagctccacgatgtagattccagacccaatgttgcgcaaggtagtaaaagttgtacacatctgttagcctgttgctgttgttgatctggtgatgaacattctcttctacaaaatcaaaagatgttttatttacatagaaattggacatatgaagcttctgttgagtgcatgataattcaatatattatgggttatattccatgatatgaattcatatgatgtgtttcttgtgatgacgattatag

SEQ ID NO: 53906 - DNA, 1341 bp, Zea Mays
gaaaaaaactcacagttgggttcgaccttgccgtctcccactctcccttctcgcgccgttggaggcaaatcgccgcgccgccccctccgcccccgttgtccgccttggttccctcctcgcacctccctcttctgccccctccctcgttgcccgccctccagcgacaactgctcccctcccacacgcgcgactcctcccagcaccgtttagggtctcgcgactcggcggcgaggcggcctttgtcggcaaactcgggcacgacgagttcggaagaatgcacgcggccatcctccacaacaacggcatcgactactatgtcgtcgtcttcgatgtgggcgcgcgcactgcactcgtcttcgtcaccctatgcgccgatggggagcgtgaaccccagtgccgacatggtcctcaatgccaacgagctcattatgaggatatttgttggtaagggacataacacttcacatgcccatatgactttagaagctcatggatccttttagtgtctcctgaaattgaggtatatgaagggatgatagtttgatgccatccacgtgacagtgaccttgagtccatgaagtgggaggtggctctacaatgtgttgcatccactcagttggatctaatcttactcgtactagggagctactagagttgtagtagaatgtgttcatgcagagcgggcaagaagctttcacagtgggtaaggattcaaacaggactccaacaagtgtgcatgagctggttgtacctatttgttccctggaaactggagtgcttggaaagagaatcaaaaggtctctaactggtgggcatgagatgcagtctacccaggacaagtgatcagggaggctagcatgcatgaatggtgagctgtaattttccatgaaaatgctgcaggtgaaggaagcaatactccaacatgtcaagttacaaaaccttcaagttcagtgagatggggtgacaggagtagctaaccacagttgaggcgacaaaaatacatatccaagtttaggtccttgtgcagatagacagataaacaagtatgacagtcacttcagaagtagcttccactccctatgttttgcaaggtagagagctccacgatgtagattccagacccaatgttgcgcaaggtagtaaaagttgtacacatctgttagcctgttgctgttgttgatctggtgatgaacattctcttctacaaaatcaaaagatgttttatttacatagaaattggacatatgaagcttctgttgagtgcatgataattcaatatattatgggttatattccatgatatgaattcatatgatgtgtttcttgtgatgacgattatag

SEQ ID NO: 53907 - DNA, 1880 bp, Zea Mays
aatcctcgccagaggccgtaaagcccccctccttcctccctccctccatccctccccctaccctgcccccacacacacaccgccgcgtccgaccccctacgccgtcgactgctcggccggtcggctccgatggggtacgtgctgtcggcggtgggcagggtgctggagcagcccacggcgtggggggcggcctgggagatggcgctcctcgcggggcccctgtgggcggcggccctcctcggcctgctgctcggctgggcctggcgcccgcgctgggcagccggcctcgtcgtcgccaccgcggacgacggcggcagcgccaccaccgccgccgccgccgcgcagccgcccttcgccacgctcgacttctggaaggcccagctccccgcccgcctccgcgccccgctcggcaccgccgtgcagcagagggagggtgacaaggacgccgtgcaacggaaccgcggaacggagccggtggcggtggcggtggggatggccgacctggtgaacctctggaggctggtggagggcgcggacggtggcccggcctggaccaagatgatggagaagtcgctgcccaccatgacgtaccgggcgtggaggagggacgcccagaccgggcctccgcagtaccagagcagcagcatcttcgagaacgccagtccagaggaggtgagggacttcttcggggacgacgagttccggatgtccaacaggtgggacgacatgctcatctaccacaagaccctggaggagtgccggaccactgggacgatgaaagtgcattgggtccggaagttccccttcttctgcagcgacagggagtacataatcgcccggcggatatggaagctggggggcgcctattattgcgtcacaaagggcataccatgctcatccattccacggcgtagcagacctcggagagtcgatctgtattactcaagctggtgcatccgcgcagtccaggagagggaacggaggaggaaggggggcgacggcctgtgaggttctgctgttccaccacgaggacatgggcatcccgtacgagatcgccaagctgggcattaggcaagggatgtgggggtgcgtgaagaggatcgagccggggctccgggcctaccagcaggcgcgggccgcgggggcgccgccgtcgcggagcgccctgatggcccggatcaacaccaaggtcagcgccgacggtttcgctcgccggtcgatggagtcgttgtccagctccagcggcggcgacgggccggagaccgcggacgacgcgcaggagacagagaacaagaagcccgcgacgaggagccacgcggcggcgaggctcctcgtgctcggcggcgcggtcgctctggcctgctgcacccttgaccaggggctcctgaccaaggctctcatcttcggcgtcgcgcggaggttcgttgggcagaggaagacgttgtagcgtcctacacaccttgtcgctcgtacggtcgtgccgtgtgctgatcgccgacgtcgagaagcgggggaaggaggtggtttgtgtgggctttgtggatgtggttaattggtgctgatgccattgtggctgaaagagagcggacgaagagcgttttggtgtctacgtgtgtatacgctgccggctgtcggatcacgagggagaggggtttcctactatatacatgtgtaaaaatttgtttcatgtaatcttgtatctgagtgaccagatcaggtgattatgcagatgagaagaacagagttttttttcggtctaccttagctgttcttggtaaggatgagaacgaaccgggggcagtatcgtcagacagattgttttaatccatattctaggcgctgtttctttaaatgtacagatgcgagggtgttgaatgcag

SEQ ID NO: 53908 - DNA, 1466 bp, Zea Mays
ctttatcaattatctatcccaaggttgaccttgatccttatgggtcaccagctgcattccttgattcagcggttcaatgtgtagcagatgggggcatcttgatgtgctcagctacagacatggcagtgcttgctggtggaaatgcagaagtttgtttttctaagtatggttcttatccattaagaggtaaacactgccatgaaatggcgctgaggattcttcttgcctgcattgagtcacatgcaatccgtcacaagcgctacatagttcctataatatcagtacacatggatttctacattagggtttttgtgcgaatcttcacgttgtctcctgcttccatctttttcctgatacattcttttccttatggttaagatatgctattttctctatgatggtacttttttggtatctaataatatttctttgccaatgttcctctattatattcagctcggctagcacagtaaaaagctcaccactcaaattggcacatgtttaccaatgcactgggtgcaattcattttacctgcaaaatattggaagaattcattcaaaggataaggaaaacatagctgtaccaaattttcgccttactctgcctgaagtatgttctgaatgtggccatcaatttgttatggggggacctctttggagttatccaatacatgacaaggtatgggctgcttcaatattatcagatattcatgctatgagagaagcatatccagcttatccaaaaatttcggctatactatcttcagtctcagaggaattgctggaggcacctttatttgtgagtcttcacaatctgtgtgcaatactgaagtgcactactccaaccatggttatgttacaatgtgctatcagaaatgctgggtatcaagtatcaggaagtcatgtggacccgctagctcttaaaacagatgccccgatgtcagtgatctgggacatcatgcgatgctgggtcaagcttcacccagttaaacatcgacctggaaatcatcctggcaatgtgatactttcccaagagcctaaatttcaggcaaaattttccagagtactgggggcctcggtcacccggaagcgcgcaagattcatgccaaatcctgagaagtattggggtcctgggacgaaggctggcaggaatccgagaacatttcagatggataaccgtaactgacgcgatctccgcgccagagcccagaagacggataatttagtttattgctttgtcaattgatatagtttgtgcgattgcaatatttgaatgatgtttgtgagtttgttccttaagttcacccttcctaaaattttaggttgagtccaccggtgaccggcagcatggctccaacactagacaggacatacgttaggtatttttggtcgaagatcgttatggacagtcttcattatcatcaaagatacatctatgattttttgaagagaaaaacgacttctac

SEQ ID NO: 53909 - DNA, 1936 bp, Zea Mays
caccaaactcagacccacacactgaaattcccctaaaatcactacggaccacttcaccggcggctcgccgtactccgccgccgtaaaccgatgaccctttcattaggcttgttgcggtcaggcctcctcaaccggcgcatcaaccaaccggcgaatcaagtccttcgcctccacctcgcattctcctccgcctcgccgtccccgtccgacccctccgccgccgccgccggcccccagaccaccatcagggaagggaaagtggaaatatttttggacgagtccaactcagtcttctacaacaagacccagagatatttccattgctgtattgagatcatttattttgaaaagacatgaagaatatgctgcccgatcaagaaaaggaccaggagacactacattgagtgcgcaagctaagtataaagagccgaaagttcttgaggcattagctgcatcagggctaagagccattaggtatgctgttgaggtagatggaattggtgaagttactgctgttgacaataatgaagccgctgtagaagcctgcaagaaaaatatacagcacaatggcagtcttgcatcttcgaaggtggtaccacatcacgctgatgcacgtgtctacatgctcacacacccaaaagaatttgatgtggttgaccttgatccttatgggtcaccagctgcattccttgattcagcggttcaatgtgtagcagatgggggcatcttgatgtgctcagctacagacatggcagtgcttgctggtggaaatgcagaagtttgtttttctaagtatggttcttatccattaagaggtaaacactgccatgaaatggcgctgaggattcttcttgcctgcattgagtcacatgcaatccgtcacaagcgctacatagttcctataatatcagtacacatggatttctacattagggtttttctcggctagcacagtaaaaagctcaccactcaaattggcacatgtttaccaatgcactgggtgcaattcattttacctgcaaaatattggaagaattcattcaaaggataaggaaaacatagctgtaccaaattttcgccttactctgcctgaagtatgttctgaatgtggccatcaatttgttatggggggacctctttggagttatccaatacatgacaaggtatgggctgcttcaatattatcagatattcatgctatgagagaagcatatccagcttatccaaaaatttcggctatactatcttcagtctcagaggaattgctggaggcacctttatttgtgagtcttcacaatctgtgtgcaatactgaagtgcactactccaaccatggttatgttacaatgtgctatcagaaatgctgggtatcaagtatcaggaagtcatgtggacccgctagctcttaaaacagatgccccgatgtcagtgatctgggacatcatgcgatgctgggtcaagcttcacccagttaaacatcgacctggaaatcatcctggcaatgtgatactttcccaagagcctaaatttcagagtactgggggcctcggtcacccggaagcgcgcaagattcatgccaaatcctgagaagtattggggtcctgggacgaaggctggcaggaatccgagaacatttcagatggataaccgtaactgacgcgatctccgcgccagagcccagaagacggataatttagtttattgctttgtcaattgatatagtttgtgcgattgcaatatttgaatgatgtttgtgagtttgttccttaagttcacccttcctaaaattttaggttgagtccaccggtgaccggcagcatggctccaacactagacaggacatacgttaggtatttttggtcgaagatcgttatggacagtcttcattatcatcaaagatacatctatgattttttgaagagaaaaacgacttctac

SEQ ID NO: 53910 - DNA, 2977 bp, Zea Mays
caccaaactcagacccacacactgaaattcccctaaaatcactacggaccacttcaccggcggctcgccgtactccgccgccgtaaaccgatgaccctttcattaggcttgttgcggtcaggcctcctcaaccggcgcatcaaccaaccggcgaatcaagtccttcgcctccacctcgcattctcctccgcctcgccgtccccgtccgacccctccgccgccgccgccggcccccagaccaccatcagggaagggaaagtggaaatatttttggacgagtccaactcagtcttctacaacaagacccagagatatttccattgctgtattgagatcatttattttgaaaagacatgaagaatatgctgcccgatcaagaaaagcaggaccaggagacactacattgagtgcgcaagctaagtataaagagccgaaagttcttgaggcattagctgcatcagggctaagagccattaggtatgctgttgaggtagatggaattggtgaagttactgctgttgacaataatgaagccgctgtagaagcctgcaagaaaaatatacagcacaatggcagtcttgcatcttcgaaggtggtaccacatcacgctgatgcacgtgtctacatgctcacacacccaaaagaatttgatgtggtgacaactcagaacatatttctcatgtcaagctacaccttagtaaggaatttcagatgtctgatctgggcccgcttagctatttcttgggcattgaagttcagcaaactcaaaaaggtttttatctgtctcagtcgaaatatatacaagatcttcttgatcgctctggacttactgatactcgcactgttgcaacaccgatggatattcatttaaaacttcgtccgaaggatgggaccccactagcagatccaactcggtatcgtcatattgtgggtagtcttgtttatctcactatcaccagacctgatattgctcatgctgttcatatgttgagccaatttgtatcaacacctacttcggttcattatggtcatttgcttcgtgtgcttcgatatttacgtgggacaagatccagatgtttactctatgcttcagatagcccacttcagcttcatgcgtattcagatgccacttgggctagtgatcctgttgaccgttgttctactacaggttactgtattctccttgggtcatctcccattgcatggaaatccaagaagcaagcggccatttctcgttctagtgctgaagccgaacttcgggcacttgctactaccactgctgaaattatttggttgcgctggctcttggctgatcttggtgtctcttgtgacacttctacacctctgttatgtgataacttgagcgctatacagattgctcatgatccagtgaagcatgaacttactaaacacataggtgttgatgcatcctttactcgattccattgtcagcggaagactattgatcttcaatatgtgccctcagaatatcaattggcagattttttcaccaaagcacaaacaagagcacaacatcagtttcacttgatcaaactcaaagcttcagatcctccattttcaccttgagtttgaggaggggtgttaaggcccattaggccctactggctatatatattacctacagtccttagggacctttatcaattatctatcccaaggttgaccttgatccttatgggtcaccagctgcattccttgattcagcggttcaatgtgtagcagatgggggcatcttgatgtgctcagctacagacatggcagtgcttgctggtggaaatgcagaagtttgtttttctaagtatggttcttatccattaagaggtaaacactgccatgaaatggcgctgaggattcttcttgcctgcattgagtcacatgcaatccgtcacaagcgctacatagttcctataatatcagtacacatggatttctacattagggtttttctcggctagcacagtaaaaagctcaccactcaaattggcacatgtttaccaatgcactgggtgcaattcattttacctgcaaaatattggaagaattcattcaaaggataaggaaaacatagctgtaccaaattttcgccttactctgcctgaagtatgttctgaatgtggccatcaatttgttatggggggacctctttggagttatccaatacatgacaaggtatgggctgcttcaatattatcagatattcatgctatgagagaagcatatccagcttatccaaaaatttcggctatactatcttcagtctcagaggaattgctggaggcacctttatttgtgagtcttcacaatctgtgtgcaatactgaagtgcactactccaaccatggttatgttacaatgtgctatcagaaatgctgggtatcaagtatcaggaagtcatgtggacccgctagctcttaaaacagatgccccgatgtcagtgatctgggacatcatgcgatgctgggtcaagcttcacccagttaaacatcgacctggaaatcatcctggcaatgtgatactttcccaagagcctaaatttcaggcaaaattttccagagtactgggggcctcggtcacccggaagcgcgcaagattcatgccaaatcctgagaagtattggggtcctgggacgaaggctggcaggaatccgagaacatttcagatggataaccgtaactgacgcgatctccgcgccagagcccagaagacggataatttagtttattgctttgtcaattgatatagtttgtgcgattgcaatatttgaatgatgtttgtgagtttgttccttaagttcacccttcctaaaattttaggttgagtccaccggtgaccggcagcatggctccaacactagacaggacatacgttaggtatttttggtcgaagatcgttatggacagtcttcattatcatcaaagatacatctatgattttttgaagagaaaaacgacttctac

SEQ ID NO: 53911 - DNA, 2073 bp, Zea Mays
caccaaactcagacccacacactgaaattcccctaaaatcactacggaccacttcaccggcggctcgccgtactccgccgccgtaaaccgatgaccctttcattaggcttgttgcggtcaggcctcctcaaccggcgcatcaaccaaccggcgaatcaagtccttcgcctccacctcgcattctcctccgcctcgccgtccccgtccgacccctccgccgccgccgccggcccccagaccaccatcagggaagggaaagtggaaatatttttggacgagtccaactcagtcttctacaacaagacccaggaacaaaatgatactccgtattttaaatggatgtcatcgatttattcaagcaagatttatcttttagcgtagaagcggagtggtcgaagagcaatctggttaacaatagagatatttccattgctgtattgagatcatttattttgaaaagacatgaagaatatgctgcccgatcaagaaaaggaccaggagacactacattgagtgcgcaagctaagtataaagagccgaaagttcttgaggcattagctgcatcagggctaagagccattaggtatgctgttgaggtagatggaattggtgaagttactgctgttgacaataatgaagccgctgtagaagcctgcaagaaaaatatacagcacaatggcagtcttgcatcttcgaaggtggtaccacatcacgctgatgcacgtgtctacatgctcacacacccaaaagaatttgatgtggttgaccttgatccttatgggtcaccagctgcattccttgattcagcggttcaatgtgtagcagatgggggcatcttgatgtgctcagctacagacatggcagtgcttgctggtggaaatgcagaagtttgtttttctaagtatggttcttatccattaagaggtaaacactgccatgaaatggcgctgaggattcttcttgcctgcattgagtcacatgcaatccgtcacaagcgctacatagttcctataatatcagtacacatggatttctacattagggtttttgtgcgaatcttcacctcggctagcacagtaaaaagctcaccactcaaattggcacatgtttaccaatgcactgggtgcaattcattttacctgcaaaatattggaagaattcattcaaaggataaggaaaacatagctgtaccaaattttcgccttactctgcctgaagtatgttctgaatgtggccatcaatttgttatggggggacctctttggagttatccaatacatgacaaggtatgggctgcttcaatattatcagatattcatgctatgagagaagcatatccagcttatccaaaaatttcggctatactatcttcagtctcagaggaattgctggaggcacctttatttgtgagtcttcacaatctgtgtgcaatactgaagtgcactactccaaccatggttatgttacaatgtgctatcagaaatgctgggtatcaagtatcaggaagtcatgtggacccgctagctcttaaaacagatgccccgatgtcagtgatctgggacatcatgcgatgctgggtcaagcttcacccagttaaacatcgacctggaaatcatcctggcaatgtgatactttcccaagagcctaaatttcaggcaaaattttccagagtactgggggcctcggtcacccggaagcgcgcaagattcatgccaaatcctgagaagtattggggtcctgggacgaaggctggcaggaatccgagaacatttcagatggataaccgtaactgacgcgatctccgcgccagagcccagaagacggataatttagtttattgctttgtcaattgatatagtttgtgcgattgcaatatttgaatgatgtttgtgagtttgttccttaagttcacccttcctaaaattttaggttgagtccaccggtgaccggcagcatggctccaacactagacaggacatacgttaggtatttttggtcgaagatcgttatggacagtcttcattatcatcaaagatacatctatgattttttgaagagaaaaacgacttctac

SEQ ID NO: 53912 - DNA, 1950 bp, Zea Mays
caccaaactcagacccacacactgaaattcccctaaaatcactacggaccacttcaccggcggctcgccgtactccgccgccgtaaaccgatgaccctttcattaggcttgttgcggtcaggcctcctcaaccggcgcatcaaccaaccggcgaatcaagtccttcgcctccacctcgcattctcctccgcctcgccgtccccgtccgacccctccgccgccgccgccggcccccagaccaccatcagggaagggaaagtggaaatatttttggacgagtccaactcagtcttctacaacaagacccagagatatttccattgctgtattgagatcatttattttgaaaagacatgaagaatatgctgcccgatcaagaaaaggaccaggagacactacattgagtgcgcaagctaagtataaagagccgaaagttcttgaggcattagctgcatcagggctaagagccattaggtatgctgttgaggtagatggaattggtgaagttactgctgttgacaataatgaagccgctgtagaagcctgcaagaaaaatatacagcacaatggcagtcttgcatcttcgaaggtggtaccacatcacgctgatgcacgtgtctacatgctcacacacccaaaagaatttgatgtggttgaccttgatccttatgggtcaccagctgcattccttgattcagcggttcaatgtgtagcagatgggggcatcttgatgtgctcagctacagacatggcagtgcttgctggtggaaatgcagaagtttgtttttctaagtatggttcttatccattaagaggtaaacactgccatgaaatggcgctgaggattcttcttgcctgcattgagtcacatgcaatccgtcacaagcgctacatagttcctataatatcagtacacatggatttctacattagggtttttctcggctagcacagtaaaaagctcaccactcaaattggcacatgtttaccaatgcactgggtgcaattcattttacctgcaaaatattggaagaattcattcaaaggataaggaaaacatagctgtaccaaattttcgccttactctgcctgaagtatgttctgaatgtggccatcaatttgttatggggggacctctttggagttatccaatacatgacaaggtatgggctgcttcaatattatcagatattcatgctatgagagaagcatatccagcttatccaaaaatttcggctatactatcttcagtctcagaggaattgctggaggcacctttatttgtgagtcttcacaatctgtgtgcaatactgaagtgcactactccaaccatggttatgttacaatgtgctatcagaaatgctgggtatcaagtatcaggaagtcatgtggacccgctagctcttaaaacagatgccccgatgtcagtgatctgggacatcatgcgatgctgggtcaagcttcacccagttaaacatcgacctggaaatcatcctggcaatgtgatactttcccaagagcctaaatttcaggcaaaattttccagagtactgggggcctcggtcacccggaagcgcgcaagattcatgccaaatcctgagaagtattggggtcctgggacgaaggctggcaggaatccgagaacatttcagatggataaccgtaactgacgcgatctccgcgccagagcccagaagacggataatttagtttattgctttgtcaattgatatagtttgtgcgattgcaatatttgaatgatgtttgtgagtttgttccttaagttcacccttcctaaaattttaggttgagtccaccggtgaccggcagcatggctccaacactagacaggacatacgttaggtatttttggtcgaagatcgttatggacagtcttcattatcatcaaagatacatctatgattttttgaagagaaaaacgacttctac

SEQ ID NO: 53913 - DNA, 1964 bp, Zea Mays
caccaaactcagacccacacactgaaattcccctaaaatcactacggaccacttcaccggcggctcgccgtactccgccgccgtaaaccgatgaccctttcattaggcttgttgcggtcaggcctcctcaaccggcgcatcaaccaaccggcgaatcaagtccttcgcctccacctcgcattctcctccgcctcgccgtccccgtccgacccctccgccgccgccgccggcccccagaccaccatcagggaagggaaagtggaaatatttttggacgagtccaactcagtcttctacaacaagacccagagatatttccattgctgtattgagatcatttattttgaaaagacatgaagaatatgctgcccgatcaagaaaaggaccaggagacactacattgagtgcgcaagctaagtataaagagccgaaagttcttgaggcattagctgcatcagggctaagagccattaggtatgctgttgaggtagatggaattggtgaagttactgctgttgacaataatgaagccgctgtagaagcctgcaagaaaaatatacagcacaatggcagtcttgcatcttcgaaggtggtaccacatcacgctgatgcacgtgtctacatgctcacacacccaaaagaatttgatgtggttgaccttgatccttatgggtcaccagctgcattccttgattcagcggttcaatgtgtagcagatgggggcatcttgatgtgctcagctacagacatggcagtgcttgctggtggaaatgcagaagtttgtttttctaagtatggttcttatccattaagaggtaaacactgccatgaaatggcgctgaggattcttcttgcctgcattgagtcacatgcaatccgtcacaagcgctacatagttcctataatatcagtacacatggatttctacattagggtttttgtgcgaatcttcacctcggctagcacagtaaaaagctcaccactcaaattggcacatgtttaccaatgcactgggtgcaattcattttacctgcaaaatattggaagaattcattcaaaggataaggaaaacatagctgtaccaaattttcgccttactctgcctgaagtatgttctgaatgtggccatcaatttgttatggggggacctctttggagttatccaatacatgacaaggtatgggctgcttcaatattatcagatattcatgctatgagagaagcatatccagcttatccaaaaatttcggctatactatcttcagtctcagaggaattgctggaggcacctttatttgtgagtcttcacaatctgtgtgcaatactgaagtgcactactccaaccatggttatgttacaatgtgctatcagaaatgctgggtatcaagtatcaggaagtcatgtggacccgctagctcttaaaacagatgccccgatgtcagtgatctgggacatcatgcgatgctgggtcaagcttcacccagttaaacatcgacctggaaatcatcctggcaatgtgatactttcccaagagcctaaatttcaggcaaaattttccagagtactgggggcctcggtcacccggaagcgcgcaagattcatgccaaatcctgagaagtattggggtcctgggacgaaggctggcaggaatccgagaacatttcagatggataaccgtaactgacgcgatctccgcgccagagcccagaagacggataatttagtttattgctttgtcaattgatatagtttgtgcgattgcaatatttgaatgatgtttgtgagtttgttccttaagttcacccttcctaaaattttaggttgagtccaccggtgaccggcagcatggctccaacactagacaggacatacgttaggtatttttggtcgaagatcgttatggacagtcttcattatcatcaaagatacatctatgattttttgaagagaaaaacgacttctac

SEQ ID NO: 53914 - DNA, 1870 bp, Zea Mays
caccaaactcagacccacacactgaaattcccctaaaatcactacggaccacttcaccggcggctcgccgtactccgccgccgtaaaccgatgaccctttcattaggcttgttgcggtcaggcctcctcaaccggcgcatcaaccaaccggcgaatcaagtccttcgcctccacctcgcattctcctccgcctcgccgtccccgtccgacccctccgccgccgccgccggcccccagaccaccatcagggaagggaaagtggaaatatttttggacgagtccaactcagtcttctacaacaagacccaggttaacaatagagatatttccattgctgtattgagatcatttattttgaaaagacatgaagaatatgctgcccgatcaagaaaagcaggaccaggagacactacattgagtgcgcaagctaagtataaagagccgaaagttcttgaggcattagctgcatcagggctaagagccattaggtatgctgttgaggtagatggaattggtgaagttactgctgttgacaataatgaagccgctgtagaagcctgcaagaaaaatatacagcacaatggcagtcttgcatcttcgaaggtggtaccacatcacgctgatgcacgtgtctacatgctcacacacccaaaagaatttgatgtggttgaccttgatccttatgggtcaccagctgcattccttgattcagcggttcaatgtgtagcagatgggggcatcttgatgtgctcagctacagacatggcagtgcttgctggtggaaatgcagaagtttgtttttctaagtatggttcttatccattaagaggtaaacactgccatgaaatggcgctgaggattcttcttgcctgcattgagtcacatgcaatccgtcacaagcgctacatagttcctataatatcagtacacatggatttctacattagggtttttctcggctagcacagtaaaaagctcaccactcaaattggcacatgtttaccaatgcactgggtgcaattcattttacctgcaaaatattggaagaattcattcaaaggataaggaaaacatagctgtaccaaattttcgccttactctgcctgaaatattcatgctatgagagaagcatatccagcttatccaaaaatttcggctatactatcttcagtctcagaggaattgctggaggcacctttatttgtgagtcttcacaatctgtgtgcaatactgaagtgcactactccaaccatggttatgttacaatgtgctatcagaaatgctgggtatcaagtatcaggaagtcatgtggacccgctagctcttaaaacagatgccccgatgtcagtgatctgggacatcatgcgatgctgggtcaagcttcacccagttaaacatcgacctggaaatcatcctggcaatgtgatactttcccaagagcctaaatttcaggcaaaattttccagagtactgggggcctcggtcacccggaagcgcgcaagattcatgccaaatcctgagaagtattggggtcctgggacgaaggctggcaggaatccgagaacatttcagatggataaccgtaactgacgcgatctccgcgccagagcccagaagacggataatttagtttattgctttgtcaattgatatagtttgtgcgattgcaatatttgaatgatgtttgtgagtttgttccttaagttcacccttcctaaaattttaggttgagtccaccggtgaccggcagcatggctccaacactagacaggacatacgttaggtatttttggtcgaagatcgttatggacagtcttcattatcatcaaagatacatctatgattttttgaagagaaaaacgacttctac

SEQ ID NO: 53915 - DNA, 1978 bp, Zea Mays
caccaaactcagacccacacactgaaattcccctaaaatcactacggaccacttcaccggcggctcgccgtactccgccgccgtaaaccgatgaccctttcattaggcttgttgcggtcaggcctcctcaaccggcgcatcaaccaaccggcgaatcaagtccttcgcctccacctcgcattctcctccgcctcgccgtccccgtccgacccctccgccgccgccgccggcccccagaccaccatcagggaagggaaagtggaaatatttttggacgagtccaactcagtcttctacaacaagacccaggttaacaatagagatatttccattgctgtattgagatcatttattttgaaaagacatgaagaatatgctgcccgatcaagaaaagcaggaccaggagacactacattgagtgcgcaagctaagtataaagagccgaaagttcttgaggcattagctgcatcagggctaagagccattaggtatgctgttgaggtagatggaattggtgaagttactgctgttgacaataatgaagccgctgtagaagcctgcaagaaaaatatacagcacaatggcagtcttgcatcttcgaaggtggtaccacatcacgctgatgcacgtgtctacatgctcacacacccaaaagaatttgatgtggttgaccttgatccttatgggtcaccagctgcattccttgattcagcggttcaatgtgtagcagatgggggcatcttgatgtgctcagctacagacatggcagtgcttgctggtggaaatgcagaagtttgtttttctaagtatggttcttatccattaagaggtaaacactgccatgaaatggcgctgaggattcttcttgcctgcattgagtcacatgcaatccgtcacaagcgctacatagttcctataatatcagtacacatggatttctacattagggtttttgtgcgaatcttcacctcggctagcacagtaaaaagctcaccactcaaattggcacatgtttaccaatgcactgggtgcaattcattttacctgcaaaatattggaagaattcattcaaaggataaggaaaacatagctgtaccaaattttcgccttactctgcctgaagtatgttctgaatgtggccatcaatttgttatggggggacctctttggagttatccaatacatgacaaggtatgggctgcttcaatattatcagatattcatgctatgagagaagcatatccagcttatccaaaaatttcggctatactatcttcagtctcagaggaattgctggaggcacctttatttgtgagtcttcacaatctgtgtgcaatactgaagtgcactactccaaccatggttatgttacaatgtgctatcagaaatgctgggtatcaagtatcaggaagtcatgtggacccgctagctcttaaaacagatgccccgatgtcagtgatctgggacatcatgcgatgctgggtcaagcttcacccagttaaacatcgacctggaaatcatcctggcaatgtgatactttcccaagagcctaaatttcaggcaaaattttccagagtactgggggcctcggtcacccggaagcgcgcaagattcatgccaaatcctgagaagtattggggtcctgggacgaaggctggcaggaatccgagaacatttcagatggataaccgtaactgacgcgatctccgcgccagagcccagaagacggataatttagtttattgctttgtcaattgatatagtttgtgcgattgcaatatttgaatgatgtttgtgagtttgttccttaagttcacccttcctaaaattttaggttgagtccaccggtgaccggcagcatggctccaacactagacaggacatacgttaggtatttttggtcgaagatcgttatggacagtcttcattatcatcaaagatacatctatgattttttgaagagaaaaacgacttctac

SEQ ID NO: 53916 - DNA, 1781 bp, Zea Mays
caccaaactcagacccacacactgaaattcccctaaaatcactacggaccacttcaccggcggctcgccgtactccgccgccgtaaaccgatgaccctttcattaggcttgttgcggtcaggcctcctcaaccggcgcatcaaccaaccggcgaatcaagtccttcgcctccacctcgcattctcctccgcctcgccgtccccgtccgacccctccgccgccgccgccggcccccagaccaccatcagggaagggaaagtggaaatatttttggacgagtccaactcagtcttctacaacaagacccagagatatttccattgctgtattgagatcatttattttgaaaagacatgaagaatatgctgcccgatcaagaaaagcaggaccaggagacactacattgagtgcgcaagctaagtataaagagccgaaagttcttgaggcattagctgcatcagggctaagagccattaggtatgctgttgaggtagatggaattggtgaagttactgctgttgacaataatgaagatgggggcatcttgatgtgctcagctacagacatggcagtgcttgctggtggaaatgcagaagtttgtttttctaagtatggttcttatccattaagaggtaaacactgccatgaaatggcgctgaggattcttcttgcctgcattgagtcacatgcaatccgtcacaagcgctacatagttcctataatatcagtacacatggatttctacattagggtttttgtgcgaatcttcacctcggctagcacagtaaaaagctcaccactcaaattggcacatgtttaccaatgcactgggtgcaattcattttacctgcaaaatattggaagaattcattcaaaggataaggaaaacatagctgtaccaaattttcgccttactctgcctgaagtatgttctgaatgtggccatcaatttgttatggggggacctctttggagttatccaatacatgacaaggtatgggctgcttcaatattatcagatattcatgctatgagagaagcatatccagcttatccaaaaatttcggctatactatcttcagtctcagaggaattgctggaggcacctttatttgtgagtcttcacaatctgtgtgcaatactgaagtgcactactccaaccatggttatgttacaatgtgctatcagaaatgctgggtatcaagtatcaggaagtcatgtggacccgctagctcttaaaacagatgccccgatgtcagtgatctgggacatcatgcgatgctgggtcaagcttcacccagttaaacatcgacctggaaatcatcctggcaatgtgatactttcccaagagcctaaatttcaggcaaaattttccagagtactgggggcctcggtcacccggaagcgcgcaagattcatgccaaatcctgagaagtattggggtcctgggacgaaggctggcaggaatccgagaacatttcagatggataaccgtaactgacgcgatctccgcgccagagcccagaagacggataatttagtttattgctttgtcaattgatatagtttgtgcgattgcaatatttgaatgatgtttgtgagtttgttccttaagttcacccttcctaaaattttaggttgagtccaccggtgaccggcagcatggctccaacactagacaggacatacgttaggtatttttggtcgaagatcgttatggacagtcttcattatcatcaaagatacatctatgattttttgaagagaaaaacgacttctac

SEQ ID NO: 53917 - DNA, 1973 bp, Zea Mays
caccaaactcagacccacacactgaaattcccctaaaatcactacggaccacttcaccggcggctcgccgtactccgccgccgtaaaccgatgaccctttcattaggcttgttgcggtcaggcctcctcaaccggcgcatcaaccaaccggcgaatcaagtccttcgcctccacctcgcattctcctccgcctcgccgtccccgtccgacccctccgccgccgccgccggcccccagaccaccatcagggaagggaaagtggaaatatttttggacgagtccaactcagtcttctacaacaagacccagagatatttccattgctgtattgagatcatttattttgaaaagacatgaagaatatgctgcccgatcaagaaaaggaccaggagacactacattgagtgcgcaagctaagtataaagagccgaaagttcttgaggcattagctgcatcagggctaagagccattaggtatgctgttgaggtagatggaattggtgaagttactgctgttgacaataatgaaggttgaccttgatccttatgggtcaccagctgcattccttgattcagcggttcaatgtgtagcagatgggggcatcttgatgtgctcagctacagacatggcagtgcttgctggtggaaatgcagaagtttgtttttctaagtatggttcttatccattaagaggtaaacactgccatgaaatggcgctgaggattcttcttgcctgcattgagtcacatgcaatccgtcacaagcgctacatagttcctataatatcagtacacatggatttctacattagggtttttgtgcgaatcttcacgttgtctcctgcttccatctttttcctgatacattcttttccttatggttaagatatgctattttctctatgatggtacttttttggtatctaataatatttctttgccaatgttcctctattatattcagctcggctagcacagtaaaaagctcaccactcaaattggcacatgtttaccaatgcactgggtgcaattcattttacctgcaaaatattggaagaattcattcaaaggataaggaaaacatagctgtaccaaattttcgccttactctgcctgaagtatgttctgaatgtggccatcaatttgttatggggggacctctttggagttatccaatacatgacaaggtatgggctgcttcaatattatcagatattcatgctatgagagaagcatatccagcttatccaaaaatttcggctatactatcttcagtctcagaggaattgctggaggcacctttatttgtgagtcttcacaatctgtgtgcaatactgaagtgcactactccaaccatggttatgttacaatgtgctatcagaaatgctgggtatcaagtatcaggaagtcatgtggacccgctagctcttaaaacagatgccccgatgtcagtgatctgggacatcatgcgatgctgggtcaagcttcacccagttaaacatcgacctggaaatcatcctggcaatgtgatactttcccaagagcctaaatttcaggcaaaattttccagagtactgggggcctcggtcacccggaagcgcgcaagattcatgccaaatcctgagaagtattggggtcctgggacgaaggctggcaggaatccgagaacatttcagatggataaccgtaactgacgcgatctccgcgccagagcccagaagacggataatttagtttattgctttgtcaattgatatagtttgtgcgattgcaatatttgaatgatgtttgtgagtttgttccttaagttcacccttcctaaaattttaggttgagtccaccggtgaccggcagcatggctccaacactagacaggacatacgttaggtatttttggtcgaagatcgttatggacagtcttcattatcatcaaagatacatctatgattttttgaagagaaaaacgacttctac

SEQ ID NO: 53918 - DNA, 2013 bp, Zea Mays
caccaaactcagacccacacactgaaattcccctaaaatcactacggaccacttcaccggcggctcgccgtactccgccgccgtaaaccgatgaccctttcattaggcttgttgcggtcaggcctcctcaaccggcgcatcaaccaaccggcgaatcaagtccttcgcctccacctcgcattctcctccgcctcgccgtccccgtccgacccctccgccgccgccgccggcccccagaccaccatcagggaagggaaagtggaaatatttttggacgagtccaactcagtcttctacaacaagacccaggttaacaatagagatatttccattgctgtattgagatcatttattttgaaaagacatgaagaatatgctgcccgatcaagaaaagcaggaccaggagacactacattgagtgcgcaagctaagtataaagagccgaaagttcttgaggcattagctgcatcagggctaagagccattaggtatgctgttgaggtagatggaattggtgaagttactgctgttgacaataatgaagccgctgtagaagcctgcaagaaaaatatacagcacaatggcagtcttgcatcttcgaaggtggtaccacatcacgctgatgcacgtgtctacatgctcacacacccaaaagaatttgatgtggttgaccttgatccttatgggtcaccagctgcattccttgattcagcggttcaatgtgtagcagatgggggcatcttgatgtgctcagctacagacatggcagtgcttgctggtggaaatgcagaagtttgtttttctaagtatggttcttatccattaagaggtaaacactgccatgaaatggcgctgaggattcttcttgcctgcattgagtcacatgcaatccgtcacaagcgctacatagttcctataatatcagtacacatggatttctacattagggtttttgtgcgaatcttcacgttgtctcctgcttccatctttttcctgatacattcttttccttatggttaagatatgctattttctctatgatggtacttttttggtatctaataatatttctttgccaatgttcctctattatattcagctcggctagcacagtaaaaagctcaccactcaaattggcacatgtttaccaatgcactgggtgcaattcattttacctgcaaaatattggaagaattcattcaaaggataaggaaaacatagctgtaccaaattttcgccttactctgcctgaagtatgttctgaatgtggccatcaatttgttatggggggacctctttggagttatccaatacatgacaaggaattgctggaggcacctttatttgtgagtcttcacaatctgtgtgcaatactgaagtgcactactccaaccatggttatgttacaatgtgctatcagaaatgctgggtatcaagtatcaggaagtcatgtggacccgctagctcttaaaacagatgccccgatgtcagtgatctgggacatcatgcgatgctgggtcaagcttcacccagttaaacatcgacctggaaatcatcctggcaatgtgatactttcccaagagcctaaatttcaggcaaaattttccagagtactgggggcctcggtcacccggaagcgcgcaagattcatgccaaatcctgagaagtattggggtcctgggacgaaggctggcaggaatccgagaacatttcagatggataaccgtaactgacgcgatctccgcgccagagcccagaagacggataatttagtttattgctttgtcaattgatatagtttgtgcgattgcaatatttgaatgatgtttgtgagtttgttccttaagttcacccttcctaaaattttaggttgagtccaccggtgaccggcagcatggctccaacactagacaggacatacgttaggtatttttggtcgaagatcgttatggacagtcttcattatcatcaaagatacatctatgattttttgaagagaaaaacgacttctac

SEQ ID NO: 53919 - DNA, 2090 bp, Zea Mays
gtcgaagagcaatctggttaacaatagagatatttccattgctgtattgagatcatttattttgaaaagacatgaagaatatgctgcccgatcaagaaaaggaccaggagacactacattgagtgcgcaagctaagtataaagagccgaaagttcttgaggcattagctgcatcagggctaagagccattaggtatgctgttgaggtagatggaattggtgaagttactgctgttgacaataatgaagaagcctgcaagaaaaatatacagcacaatggcagtcttgcatcttcgaaggtggtaccacatcacgctgatgcacgtgtctacatgctcacacacccaaaagaatttgatgtgtggatgggcttccacaccttgttgtccttcgaggtgcattgcgagaggaaaaacagcttgcacttgtggatccaggagacaggcttgtggctgtcatcatacttcagaacgtgagcggttgctggtcctgagcaggtgaccttgatcggcttcagcatggatacctcatccttgatggaagtggtttccgcaaggatcttccaacagcattcttaaaatcgatagctgagatgatgccccccctctgattgggtttgtggtgatggccgatgcagtggtggcagaagtaaggatggatgcatgattgcatcggtaggcactgtgatattactagatgcagaagagcgtcgggctcctaataaactaacattctgctaattatccttttgattatctaatgcttgaagcagcaaactcaaaacaaaacttagggcagacctagtgccaaaggctcccacatgagtggaatcaggggaagggataaactgaggcgagccttccccgcaaatgtggaggggctgcttgaatctgcgacttggtgactcaatgagacaactctcactgaggctaactccagcaacctccatatcccacctcctatctcactctctatttcaaactccactctgtaaacagtgcaaaacaatgttttgcacgaccatatgcacgctttgctgtcctcaccactgcaccaagcctgcctttcttaaactcaaaacaaaattaaggtacttaaatttctctgccacttgtggacgcttgattgttccttttgcacaagtactccttggtcttgccaatggaagtctccacaacatttcaagatttaagaggtagaaatgttgatagtttttcttggtgtattaataattgaattatcaaaatgctgtactattttaactgaaactttaacagtttaacacatattcctaataaaagataacaaagttctcttacctttccgaagttcgtagaaccagtttaagttttatcatttatgtttatgtgatattgagtagtcaatgccccacatacagaaatgttcataattgttcttgtgatcctgtctaccctttttcctaaccagttttgacaaggttattctagattaccttctataggatattagccatgaatttagtttctgtcaacacagcatgtgtgcatctttaggtggtcattaatcaataacacatatcacataggacaacaatgtgttatgggactcctagttcacataaaccctggtgtggattagaaacattgaatgcagtaatgtgaacctcataatactataagaccttgtgggtttagaaggagcaggttggtttggaagtttattcgctagcttagaatttaatatatacatttctaccccttaagtcctctcacattgcagttttgcactggtctgtcttgctagcaaacataattattcaaactagcacaagaaaagccatgtagtgtctattgaatcccctgtaccaaaaataactagaaggagccagcctgcctaatgctcttggttgcgacagggagggaggtttaatattaggaattgtatcatagaatgatagaagtgctttggtgacaaatttacatttgttcagttcatatgaccaatttagatatttcattacatagcattgaatctgtggaaatttgtaccatagggaagcaacagaggcatttgctaactacctgtcacatatttgccacctgcattttg

SEQ ID NO: 53920 - DNA, 2001 bp, Zea Mays
cgacactccccgagcacacacgccgcaacagcaccacccccagacccaagtcctgtcaaggcctcaacacacacacacactctctcgcttgacctacccccctccgccccccgcccgagcgccgccacggcatggcttcctccatctccgccgccgctaaggcctccgcggccttcgcccacaagaaggagctggccgcgccggcgccgcaccgcgcgggctcgagccgccggaccaagccgtgccgcgtgcgcgccgtcgcgtcgcccgcgcgcaccccccgcgccccgtcgtccaccggctcggtgaagaccgcgatgacgatgacggagaagatcctggcgagggcgtcggagcgcgcggcgctggagcccggggagaacgtgtgggtggacatcgacgtgctcatgacgcacgacgtctgcgggcccggcaccatcggcatcttcaagaaggagttcggggaggatgccaaggtctgggaccgcgagaaggtcgtcatcatccccgaccactacatcttcaccagcgacgagcgcgccaaccgcaacgtcgatatcctcagggacttctgtctggagcagaacatcaagtacttctatgatatcaaggacctcagcgatttcagggctaatccagactacaagggtgtctgccacattgcacttgctcaggaaggccactgccgaccaggcgaggttctcctgggtactgattctcatacgtgcaatgctggagcctttggtcaatttgcaaccggaattggaaacactgatgcaggttttgtgatgggcactggaaaggctcttcttcaggtgccacctactatcaggtttgtattagatggagaaatgccgccttatttacttgcgaaggatctgattttgcaaattattggtgagatttcagtatctggtgcaacctacaaatcgatggagtttgttggatcaactgtagaaagtctaaccatggaagaacgtatgacactatgcaacatggttgttgaagctggtggaaagaacggtgtcgtgcctgctgatgaaactacatttaaataccttgagggtaggacatcagttgattatcaacctgtctacagtgatgctgaggccagattttttagtgactaccggtttgatgtatcgaaactggagccagtagttgccaagccacattcgcctgacaaccgtgccctagcaagagaatgcaaagatgtcaagatcgaccgagtctatattggttcctgcactggtggcaagactgaggacttccttgctgccgcaaaggtgttcttagcctcgggaaagaaggttaaagttcccacattccttgtccctgccacacaaaaggtgtggatggacgtatatagccttcctgtaccaggatctggcggcaaaacttgcgcccagatattcgaggaggctggttgtgatacaccagcaagtcctaattgcggcgcttgtctgggtggccctcgcgatacgtatgcacggatgaatgaacctacggtctgcgtgtccaccacgaacaggaacttcccgggcaggatggggcacaaggaagggcagatctacctggcgtccccctacaccgctgcagcctcggccctgacggggtacgtcacggaccccagggacttcctcatgtgaacgatcttgaaacagccacagagtgcctgcaccgctgttttttgtgttgaaccttagtttaggcgtgtgcccttcgttgagaaataaactcccatgtcgggaggctgccattgccatttatgttttttgcgttatatttattacagtgactgccgataacgtagttgagcgttacaagggaaatacattcattctttccagtatcgatggcagtcactagactccgttcttacaaaaaaaaggcatgtcgagagatcttgtagttcatacacttgttaaaacacttttttgtacaatgtatgggaaagaagctcagtcgatctttcttgttttgaatgctctacgacacgtc

SEQ ID NO: 53921 - DNA, 1982 bp, Zea Mays
cgacactccccgagcacacacgccgcaacagcaccacccccagacccaagtcctgtcaaggcctcaacacacacacacactctctcgcttgacctacccccctccgccccccgcccgagcgccgccacggcatggcttcctccatctccgccgccgctaaggcctccgcggccttcgcccacaagaaggagctggccgcgccggcgccgcaccgcgcgggctcgagccgccggaccaagccgtgccgcgtgcgcgccgtcgcgtcgcccgcgcgcaccccccgcgccccgtcgtccaccggctcggtgaagaccgcgatgacgatgacggagaagatcctggcgagggcgtcggagcgcgcggcgctggagcccggggagaacgtgtgggtggacatcgacgtgctcatgacgcacgacgtctgcgggcccggcaccatcggcatcttcaagaaggagttcggggaggatgccaaggtctgggaccgcgagaaggtcgtcatcatccccgaccactacatcttcaccagcgacgagcgcgccaaccgcaacgtcgatatcctcagggacttctgtctggagcagaacatcaagtacttctatgatatcaaggacctcagcgatttcagggctaatccagactacaagggtgtctgccacattgcacttgctcaggaaggccactgccgaccaggcgaggttctcctgggtactgattctcatacgtgcaatgctggagcctttggtcaatttgcaaccggaattggaaacactgatgcaggttttgtgatgggcactggaaaggctcttcttcaggtgccacctactatcaggtttgtattagatggagaaatgccgccttatttacttgcgaaggatctgattttgcaatatctggtgcaacctacaaatcgatggagtttgttggatcaactgtagaaagtctaaccatggaagaacgtatgacactatgcaacatggttgttgaagctggtggaaagaacggtgtcgtgcctgctgatgaaactacatttaaataccttgagggtaggacatcagttgattatcaacctgtctacagtgatgctgaggccagattttttagtgactaccggtttgatgtatcgaaactggagccagtagttgccaagccacattcgcctgacaaccgtgccctagcaagagaatgcaaagatgtcaagatcgaccgagtctatattggttcctgcactggtggcaagactgaggacttccttgctgccgcaaaggtgttcttagcctcgggaaagaaggttaaagttcccacattccttgtccctgccacacaaaaggtgtggatggacgtatatagccttcctgtaccaggatctggcggcaaaacttgcgcccagatattcgaggaggctggttgtgatacaccagcaagtcctaattgcggcgcttgtctgggtggccctcgcgatacgtatgcacggatgaatgaacctacggtctgcgtgtccaccacgaacaggaacttcccgggcaggatggggcacaaggaagggcagatctacctggcgtccccctacaccgctgcagcctcggccctgacggggtacgtcacggaccccagggacttcctcatgtgaacgatcttgaaacagccacagagtgcctgcaccgctgttttttgtgttgaaccttagtttaggcgtgtgcccttcgttgagaaataaactcccatgtcgggaggctgccattgccatttatgttttttgcgttatatttattacagtgactgccgataacgtagttgagcgttacaagggaaatacattcattctttccagtatcgatggcagtcactagactccgttcttacaaaaaaaaggcatgtcgagagatcttgtagttcatacacttgttaaaacacttttttgtacaatgtatgggaaagaagctcagtcgatctttcttgttttgaatgctctacgacacgtc

SEQ ID NO: 53922 - DNA, 1572 bp, Zea Mays
ctcaacctagctccgccactggagtcgaagatccacgggccggacatcaatgagccggcatctcggacctccacggatatgcctccgcacagggagtcctgcctagctccacagatccgtgcagaccgcgacgaaggctgcctcaccggccaccaccaaggcttcctcgccgatagatgcaggcccgcagcccccgacctcttttactggcatcaggaatctggcgacatagatggttccaggaacttgccctcaccaaaagaagcaaaagggcaggaacaatgccggctgccaaccagcagccaccacgcacaccagtcagattgacaaggcaaagtgcagtcatgccttcgcctggaggctgcccgccacctaagccaagacatcccttgcctcctaagaccacttcgaaagccacccctaaaagaaatgccatttccagtagtacccaacaacaggtccaggccagtacaacaactactgagaccactgaaactacaaacccagtgtcttttcctccaaaaatgaccaggtccactcaagcaatgtcttcaccagttcgaaacacaatgcctggacctactagacacaccatgcatagtcctcctagattcactagggctagtgcagccatgtcttctcctggtgcaaaccctcaccatagtcctcctagattcactagggctagtgcagccatgtcttctcctggtgcaaaccctcaccatagtcctcctagattcactagggctagtgcagccatgtcttctcctagtgcaaaacctcaccatagtactcctgcagccactgctatcgtatctcatcaacctagtcccacaactagtgttaacaaaatagttcctacggacaactcaccaggtgggcacagctctaggcaaagcaatgccatcattgagtcagctaagcaatttgatgttgctacttcagagggtaatccgaatgaaggagaaccagttggtgacttagttccagcccttttagcgcccaaaaagaatgtccgcaagaaaaccatgggtcatggcttagagaagatgcttaataggggaaaccggttggctatccacgaggctgaagggaagaaaagaccggaggtcccacttcaagctacctatctacaaatcttggaagctggcatcggaaactggtgttgcccttagagacaacctacctatctacaaatcttggaagctttatgacaatgtcgtggggcaggcaaaagtacgaaaagtgcttgacaaagtcacttcaaggttggatgtcgatgttaagaatgagggaccaagcaaagatgcatgcacagatatcataaagaggggagtgaggcagacgatgtataacctgaaaaggaagtacttcgacgagtcacttacaaaagaacagttgttggccatgcaacctccacctaaaatgaataaagaggattggactgggctggtagagtattggtgtgacccaaagaatcaggaaaaatctgctaagaacaaagcaaaccgaggcaacgtgtagcttcaccaaaggactggagctaggtcctatatagcccatcattacaac

SEQ ID NO: 53923 - DNA, 1576 bp, Zea Mays
ctgttttctcccactgagtcactgacatacggcctcaacatgactcctgccctaccttatcctctcggctgctcaccacgacaagtccagtcctctccctcccctaaacctagcgccgccactcacgcccaccacgctgccatgtcctcctcactcccctcaacctagctccgccactggagtcgaagatccacgggccggacatcaatgagccggcatctcggacctccacggatatgcctccgcacagggagtcctgcctagctccacagatccgtgcagaccgcgacgaaggctgcctcaccggccaccaccaaggcttcctcgccgatagatgcaggcccgcagcccccgacctcttttactggcatcaggaatctggcgacatagatggttccaggaacttgccctcaccaaaagaagcaaaagggcaggaacaatgccggctgccaaccagcagccaccacgcacaccagtcagattgacaaggcaaagtgcagtcatgccttcgcctggaggctgcccgccacctaagccaagacatcccttgcctcctaagaccacttcgaaagccacccctaaaagaaatgccatttccagtagtacccaacaacaggtccaggccagtacaacaactactgagaccactgaaactacaaacccagtgtcttttcctccaaaaatgaccaggtccactcaagcaatgtcttcaccagttcgaaacacaatgcctggacctactagacacaccatgcatagtcctcctagattcactagggctagtgcagccatgtcttctcctggtgcaaaccctcaccatagtcctcctagattcactagggctagtgcagccatgtcttctcctggtgcaaaccctcaccatagtcctcctagattcactagggctagtgcagccatgtcttctcctagtgcaaaacctcaccatagtactcctgcagccactgctatcgtatctcatcaacctagtcccacaactagtgttaacaaaatagttcctacggacaactcaccaggtgggcacagctctaggcaaagcaatgccatcattgagtcagctaagcaatttgatgttgctacttcagagggtaatccgaatgaaggagaaccagttggtgacttagttccagcccttttagcgcccaaaaagaatgtccgcaagaaaaccatgggtcatggcttagagaagatgcttaataggggaaaccggttggctatccacgaggctgaagggaagaaaagaccggagtcaaggttggatgtcgatgttaagaatgagggaccaagcaaagatgcatgcacagatatcataaagaggggagtgaggcagacgatgtataacctgaaaaggaagtacttcgacgagtcacttacaaaagaacagttgttggccatgcaacctccacctaaaatgaataaagaggattggactgggctggtagagtattggtgtgacccaaagaatcaggaaaaatctgctaagaacaaagcaaaccgaggcaacgtgtagcttcaccaaaggactggagctaggtcctatatagcccatcattacaac

SEQ ID NO: 53924 - DNA, 929 bp, Zea Mays
tttgggagaaggcagctgcattcctgtgcgtagcagtcccagggcagggaatctatagctgcaaaacttgtagctaatatgattaccgaagctggtgccaaccgtgtccttgtttgtgatcttcattctagtcaagcaatgggatactttgacatcccagtagatcacgtttatggccagcctgttattcttgattatctcgccagcaagacaatatgttcagatgacttggtagttgtatctcctgatgttggaggtgttgccagggcacgtgcctttgccaaaaagctgtcagatgcacctctagctattgtagataaaagaaggcaaggacataatgtcgctgaggtgatgaatcttattggagacgtgagaggaaaagtggctgttatgatggatgatatgatcgacacagcaggtaccatttccaaaggagctgagctactgcaccaggaaggcgcccgagaagtatatgcttgctgcacacatggtgtttttagcccacccgccatcgaaaggctatcaagtggattgttccaagaagtaatcatcacaaacaccatccctctgaaggaggagaagagttttccgcagctgactattctttcggttgctaacctcttgggggaaacaatctggcgcgttcacgatgattgctcggttggtcatgagccatactccagcttggatattgactgatgcttaagttgtggcagctcgcaaccttctctttcttttcttttggcctcggtttttgtctgtgcgtgtaataagcaatgtttttgtggaattctgttagcgcagaacctcagccttgtatttgagtgacagcacataagatgacattccagattgtagtgcagtgtttcagctatcctcaatcacagcacataatatgtgtttgcttgcagtattattaggctttatat

SEQ ID NO: 53925 - DNA, 1354 bp, Zea Mays
cacgtagtaagctgggattcttcgtatagaccggattaaaaccctaggccctagccaccgcccaccgtcgcctcagcaaatcctcctcccgtttcaccatgccgccctgctgctcccccaccacctccgccgtcaccgctgcggcggcatctcccggcgcctcgcgcagcgggggcctcctgcgccgctcgcgcccagcccccgccgccgtggagatagcaagttacttggggctagaacttgggaagataaccataaagaggtttgctgatggtgaaatatatgttcagttgcaagaaagtgtacggggctgtgatgttttccttgtgcaaccgtcgtgtcctccagcaaatgaaaatcttatggagcttctgatcatgattgatgcctgtaggagagcatctgctaagaatatcactgcagttatcccttattttggttatgcaagggctgacaggaagtcccagggcagggaatctatagctgcaaaacttgtagctaatatgattaccgaagctggtgccaaccgtgtccttgtttgtgatcttcattctagtcaagcaatgggatactttgacatcccagtagatcacgtttatggccagcctgttattcttgattatctcgccagcaagacaatatgttcagatgacttggtagttgtatctcctgatgttggaggtgttgccagggcacgtgcctttgccaaaaagctgtcagatgcacctctagctattgtagataaaagaaggcaaggacataatgtcgctgaggtgatgaatcttattggagacgtgagaggaaaagtggctgttatgatggatgatatgatcgacacagcaggtaccatttccaaaggagctgagctactgcaccaggaaggcgcccgagaagtatatgcttgctgcacacatggtgtttttagcccacccgccatcgaaaggctatcaagtggattgttccaagaagtaatcatcacaaacaccatccctctgaaggaggagaagagttttccgcagctgactattctttcggttgctaacctcttgggggaaacaatctggcgcgttcacgatgattgctcggttggtcatgagccatactccagcttggatattgactgatgcttaagttgtggcagctcgcaaccttctctttcttttcttttggcctcggtttttgtctgtgcgtgtaataagcaatgtttttgtggaattctgttagcgcagaacctcagccttgtatttgagtgacagcacataagatgacattccagattgtagtgcagtgtttcagctatcctcaatcacagcacataatatgtgtttgcttgcagtattattaggctttatat

SEQ ID NO: 53926 - DNA, 1940 bp, Zea Mays
aacacgtcttccacaagagtgagtgtgagaccagtcgtcaccgtcctccactcccaaatttgttgccttgaggcggcggccggcgggagagagcagctctagagagaacagagagcgcataactagcggcggcggcgatgaggatagaggaggtgcaatcgacctcgaagaagcagcgcatcgccacccacactcacatcaagggcctcggcctcgacgccaatggaatgtcgatgccgttggcggcggggttcgtgggccaggcggcggcgcgcgaggcggccgggctggcggtcgacatgatccgccagaagaagatggccggtcgcgcgctgctccttgcgggcccgcccgccacgggcaaaacggcgctagcgctcggcatagcgcaggagctcggcagcaaggtcccattctgtcctatggtaggatcagaagtgtactcctcagaggtcaagaaaactgaggtgctgatggaaaatttccgtagagctataggtttgcgtataaaggaaaacaaagaggtttatgaaggagaggttattgaactttccccagaagaggctgagagcacaactggtggatatgcgaaaagcattagccacgtaatcattggcttaaagactgtcaaagggactaagcaattgaaattagacccttcaatttatgatgctttgatcaaggaaaaggtggcagtgggtgatgttatatacattgaagcaaatagtggagcagtgaaaagagttggtagatgtgattcttttgctacagaatatgatcttgaagctgaagagtatgttcctatccccaaaggtgaagtccataagaaaaaggaaatagtgcaggatgtcacactccatgaccttgatgcagcaaatgcccagccacaaggtggccaagatattttgtcccttatgggccagatgatgaagccacggaagactgaaatcaccgaaaagctacgccaagaaatcaataaggtggtaaacagatatatcgacgaaggaatcgcagagcttgtacctggtgttttgttcattgatgaggtccacatgttggatattgaatgcttttcttatcttaaccgtgcattggagagcccattatcaccaattgtgatactcgctacgaatagaggaatatgtaatgtgagaggaaccgatatgacgagtccacatggtataccagtggaccttctagataggttggtgattattcggacagaaacatatggccctactgagatgatacagatactggctatccgagcacaagtggaagagattgatatcgatgaagaaagtcttgcttatttaggcgagatcggacagcagacatctttgagacatgctattcagttgctatcacctgccagcgtggtcgcaaagaccaacgggagagaaaagatgtgcaaggctgacctcgaggaagtcagcgggctctatttggatgccaaatcctcggctcgcctgctccaggagcaacaagaaagatacatcacctagacttgcatctcctgctgtggaaggaaaagcctcgaagagaaatgcattctgcaaagtgcgtcgatctgcttcagtatgtcgtagtctacaagtcttggagagagcacgtttctgcggggaaggaaaactgtttgaattttgtagtacctgttttttgttagcctccagcgaagacttgattccggcatattgcttgttcacgcaccgttaacaccgattaagattggcccagccgtgcaggaattgccgggtgtgttttcaccccctcgctaatcgatgtccagaatctgtgtgcccacgggtgttgtattgaccctagctttgtaaccatgcacatgatttcttttttaacgctgatggatggcacctggatctctgtccatggccatcgtaatcccactgtctggagcagggtttcatgaaaaaaagaaaaac

SEQ ID NO: 53927 - DNA, 1888 bp, Zea Mays
ataacagcccaaagcggcccactggaggcggcaacacgtcttccacaagagtgagtgtgagaccagtcgtcaccgtcctccactcccaaatttgttgccttgaggcggcggccggcgggagagagcagctctagagagaacagagagcgcataactagcggcggcggcgatgaggatagaggaggtgcaatcgacctcgaagaagcagcgcatcgccacccacactcacatcaagggcctcggcctcgacgccaatggaatgtcgatgccgttggcggcggggttcgtgggccaggcggcggcgcgcgaggcggccgggctggcggtcgacatgatccgccagaagaagatggccggtcgcgcgctgctccttgcgggcccgcccgccacgggcaaaacggcgctagcgctcggcatagcgcaggagctcggcagcaaggtcccattctgtcctatggtaggatcagaagtgtactcctcagaggtcaagaaaactgaggttattgaactttccccagaagaggctgagagcacaactggtggatatgcgaaaagcattagccacgtaatcattggcttaaagactgtcaaagggactaagcaattgaaattagacccttcaatttatgatgctttgatcaaggaaaaggtggcagtgggtgatgttatatacattgaagcaaatagtggagcagtgaaaagagttggtagatgtgattcttttgctacagaatatgatcttgaagctgaagagtatgttcctatccccaaaggtgaagtccataagaaaaaggaaatagtgcaggatgtcacactccatgaccttgatgcagcaaatgcccagccacaaggtggccaagatattttgtcccttatgggccagatgatgaagccacggaagactgaaatcaccgaaaagctacgccaagaaatcaataaggtggtaaacagatatatcgacgaaggaatcgcagagcttgtacctggtgttttgttcattgatgaggtccacatgttggatattgaatgcttttcttatcttaaccgtgcattggagagcccattatcaccaattgtgatactcgctacgaatagaggaatatgtaatgtgagaggaaccgatatgacgagtccacatggtataccagtggaccttctagataggttggtgattattcggacagaaacatatggccctactgagatgatacagatactggctatccgagcacaagtggaagagattgatatcgatgaagaaagtcttgcttatttaggcgagatcggacagcagacatctttgagacatgctattcagttgctatcacctgccagcgtggtcgcaaagaccaacgggagagaaaagatgtgcaaggctgacctcgaggaagtcagcgggctctatttggatgccaaatcctcggctcgcctgctccaggagcaacaagaaagatacatcacctagacttgcatctcctgctgtggaaggaaaagcctcgaagagaaatgcattctgcaaagtgcgtcgatctgcttcagtatgtcgtagtctacaagtcttggagagagcacgtttctgcggggaaggaaaactgtttgaattttgtagtacctgttttttgttagcctccagcgaagacttgattccggcatattgcttgttcacgcaccgttaacaccgattaagattggcccagccgtgcaggaattgccgggtgtgttttcaccccctcgctaatcgatgtccagaatctgtgtgcccacgggtgttgtattgaccctagctttgtaaccatgcacatgatttcttttttaacgctgatggatggcacctggatctctgtccatggccatcgtaatcccactgtctggagcagggtttcatgaa

SEQ ID NO: 53928 - DNA, 548 bp, Zea Mays
tgtgcctgctaagtacatggggtttccccgcgagagttcgaatctctcaggcgtcgttttcctttttattttttccccatctttctcaggcaatattttttccccctccatgccaaaaaggaatctgaaaaatcacctattgtactccgttgcgacctcaccgacgcacgaggaatttccaggagaaaacaactgccatgtgtcataaaaccgtacgacaaaagcttgtaatcaccagaaccgcagacgatctcttttttattgtaaaaaaaagtagacaaaacaaccacgtgcaccaccagcacacaagatcaacatcgccggcattgcatccgttcaacaatttacaaacaatctcaggagagaaaaaaaagtacgcgagtccctgccggatgaacaactggctcatatgataccaacacggcaacaccgaccgaaggaactccaccaccaccagcgggcagccacacccaccaaaggaatgcgctcgcgctggagcatattcttgtgggcttgctgtcagttggctgaggcactgagctcacttg

SEQ ID NO: 53929 - DNA, 1614 bp, Zea Mays
atacactactgcacgtctacactagtactgactactgaggtggcccgaacaacctttatccgattatccccccgcattatctctctcggtagttcccccgtccccctcgcgtgcgctctgtggcgacgactgctcggccgccgccgccctacgcgcaggcgcccaggtttccaccttcgccggcgacgagcgcccacaaggaaaacaatggagtggtgggctgctgatggtttgtactacttccggacctgaaaggagctttttacaatggcaccgggaagcagcattgtgactgtagtccccgagtcggactgtggagatgacgatgggctttctgaatcacttgggggtatcatgcttgacgtagactctgcaagtaaaccgtggtctacatcggcatcgctagccaatgttgcattgtcgtcgctgtgtggcttgaatgatttgctcgaatgcccagtgtgtaccaactcgatgcgcccacctatactccagtgcccaaatggccacacgatctgctctagttgcaagcacagggtagagaaccattgcccaacctgtcgccaggaactgggaaacatcaggtgcctagctctcgagaaggtggcagagcaactccagcttccgtgcaagtaccagagcacgggatgcaccgagatccacccatacaagagcaaactgaagcacgaggagctctgcaggttcaggccgtacagctgcccgtacgcaggttccgagtgcctgatcgcaggcgacgtcccgttcctggtgtcccatctcatcaacgaccataaggtggacttgcacgagggctgcacgttcaaccaccggttttcaagtgtttcgggcagcacttctgcctgcacttcgaggcgttcgtgctggggatggcgccggtgtacatggcgttcctgcggttcatgggcgaggagagcgaggcgcaggggttcgggtacagcctggaggtgggcgggggcgggcggaagctgacgtggcagggcacgccgcggagcgtcagggacagccaccggaaggtgcgggacagcttcgacgggctcatcatccacaggaacatggcgctcttcttctcgggcggcggcaggcaggagctcaagctgcgggtcaccggccgcatctggagggagcaagggcaatgaaaagcacccccgcacacattccgttgactggtggttatggtggtacaccgctgtgttccattccatcccatcatccgggggcagccttctgctcagctcctcgccatgattcaagaccccattccgtgttcgtcctgtgcatttgctgtatgtacagatattttgcatacctagcctggaactagaccgtctgcagacatgattaacacgtggggaaagccccggcaaaacctgccagtctggtatgtgctcatgttaatgccttttgcaatgtccccctgcgaggctgtcagaacaggcgttatcgttaaagcatctccacacctataaaaataccatataatttaaaaataaatatattttataaaatttagggtaccaataaaacattttgctctaatattaaagacttaaatttagattatagaacaacctactatgatgtagtatatttgag

SEQ ID NO: 53930 - DNA, 6958 bp, Zea Mays
cttggagaaccgttttggtgtctctccactgtacatgcccttagctatactgcttggacgtctcctgttaaaattttaacaggtaactattagatttagtgcatttaagcacaccctaaataccttaaacttagcaataccacgatatttccagcctattgcttcgggagactagggacggatccagcggtgggacggacggggctcgagccccctaccacttcggatccaatggagcctcactacagcctcccataatctaaaatgtatataatataatgtagaatgagcttttatactgcagcaatttagtttagtccctcctaaacttttttctggctccgtccctgctagacacgaaggatatcttggctccccataagcacccaatccaatatatcgatagaagaaagaagaccctcttcatatagatttttgaattccatatcgaaactccgcacgaaatcgaaaatagacctgcagatgatctcatcaagcctcagtgtgttagtttttttcgtctttttagagtatggcattgaaacaaagcggggtagaaggcactctaaaggtaagtgttcaaatacaagggaaatggtttttttttttgcaattgtgataaattgaattgtaggtatcttaaatcgctatgtttggttttggtaattgagagaattagtggtctactctaatgttgcgtgcgaggcaagttaaatccacgtccaatattgagctaggatggtaatcataaagatgatggtgatggtcacaagtggtaattaagtgctcaacttgaaaaataagaaagcggaaaaaacaaaatggaaacaaatgactgtactattaagaggggagcctaattggactatgatgcactcggagagtatgcaaaactatttataaaaaaacactttcaaaaggctaaattgactcgaacttgtttgcgaaaacatttgagagttaccgcgcttgcaaacagatgatcatgtgctctcagtgttgctgcatgtgctcagcgttgctgtcgagcacgcaccagatgtgtcccttgtgtttgcaacgtttgttacaatttgtcctttataggacttgggacatcaaacatacaacgatacaaccaattatctttaatatacgctttatttatatctagaactacagttagatctcttatatttccatgtaaacttcaaaatgagtactagcaatcagtgttttagctggctatatagcctttggggaggtttgaagctaagagatgcatcatttaacgctaattgaaattagccgctaatagcctttatttggcccgctaaaaacacaatattagctagatttagcgctgctaaacttgttagccttttaatgggatgaacctttggaacattgaggacaaaaataaactacaggcaggctctttacacgtgttgttgaatttgcatgcacgttgatttgttattagacatttgaactagtgtttgaactatcaaattcagatattgaacatttgagctatagtttatgctctatctatgaagatatgtcatgcatttttttctctctaaaactgctaaatgctggtttagctcgcagctatatatagccggctatatagacttcatatataggtgatctaaaaacttactcgccgctaagagagccttagccggacatttaaaacattgctagtaatgcatggtaaatttcagctgaaccctttaattataccagaaaaggtcccctgtaaccagaccattcgtaccatgcatagcgtagctggattgaactgcagagagattaattgattcagactgcttttactgctaccacgggctcacgtcgattgtaagcatccagatttggctgagctggaggcccgttgataattggtctacttctgcgggtgcttggctgcttgcttggggtcttcttctgggtaagcagtgctggaatagggaattaggggtagagatagagagagagagccgggatggccggcaagttacagcaagaacgcatgcttagggtttaagctaagactcatatgattgggattccagctgtcggatcagcgtcattatagaaataacccagtgctgttgctactgaggaacagatccacgtgcccatggactatgtaattaacatcaccttcatgatgatcttgtacccatgcccaagtgggtattgggttcgtttttttttcttacatatatatattataggtatgagaaaggcgagtcttcagtgattaggtgtccaggaaaggaatatatgatgctcgtggatcaagattcttttttctatgaggaaaagacaaagtagccgattggccgcactagttggccctccatgcctggcgtttgaacctgcttcagtgattatatgtgtgtgtttttttttactttgctttgtagcggttggaatattaattaaatcgacagccgcccaggagaacatgctctgaaaagctgtcgaggaatataaactaagttagggtctgttcggtttggtctcgatcctggattggatgtgattagatgagtttaaatcctaagtaattcaaaatcatcgtgaagatcttcaccgagtgggtttaactagcttggacgggcaaacattgcttgcttttggccggccagtcattcagctcactgcttccattataccttgcacttgcagaacttcagaacatctccacctgccaggttaaacctttctgcatccaagtggactggacttccaggtgcatccgagtggatccattttgacacgccagcgctcgatcacagccgttgatataggatcgaacggtgcacacctcgcatctgatggagaacagcactgcacagcggctttccgactttatactattactaccccgggggcttccactctgatgatgaggcttctgaacaatgataggaaccttccagaaccttccgcgtccgcgccgctggccccgccgcgcctcacttctcctccaccgcatctgcacccgcgcgccgcgtcatgccggcgacgtcggccgatggaactctgacatcatggcgcacttccgcgccggcagggtcggggcggcgcgccgggtgttcgacgaaatgcgcgagcggaacgtgttcacgtggaactgcatggtctcgggcctggccaggaacgggttgctcgccgacgcgcgcggggtgttcgacgcgatgccgtccaggaactccgtctcgtgggctgcgctgctgacgggctacgcgcggcgcgggagggtggccgaggccagggacctgttcgaccggatgcctcaccggaacgtggtctcgtggaacgcgatggtgtcgggctacctgcggaacgggatggtcgacagggcgcgggagctgttcgacgcgatgccggcgagggacgacgtgtcgtggctcatgatggtctctgggtatatgaggaggaagcgtttccgtgaagcgagggagatcttcgaccgcgcgccgtcgccgccgccgacttcagtatgcaacgcgttgctgtccggttacgcggggtatggttacctgaaggatgcggaggagctgtttggtcggatgcagagaccggaccgtgtttcttggaatgccatgatcacaggctacacccgggctgggatgatgcaggttgcacggagactgtttgatgagatgcccggaaaggatactgtatcatggacagccattgtgcgtgggtatttacagaacggagatgttgatgctgcgtgggaggtgttccaggacatgcctgaccgtgatgtccttgcttggaacacaatgatgggtggttttgtggtgagtgataggttggatgatgcgttaaggttgtttgctgacatgcctgatagagatctggtgtcatggaatacaatcttacaaggatacatccaacaaggggacatggatagtgcaactacatggtttaggagcatgctagagaaagacgagacatcatggaacacagtgatctctgggtacaaagatgaaggagcacttagtttgctgtccgaaatgactcgaggaggatatagaccggaccaggccacttggagcgtggttatttctgtctgcgcctcccttgctgctctcggctgtggaagaatggtgcacatttgcacgatcaaaaccggcttcgagcatgatgctttggtgatgagctcattgatctctatgtactccaagtgtgggctaattactgaagcttcccaggtttttgacctgattgtgcaaagggatacagtgacatggaacgcgatgattgcgacatatgcttatcatggtctagctgctgaagctctggcactctttgacaggatgacaaaagataggtttagcccagatcatgcaacgtttctgagtgtgttgtctgcttgtgcgcacaaagggtatctatatgaaggctgccactattttagaagtatgcagcaagattggaacttggttccaagatctgatcactattcgtgcatggtcgatctcttaggaagatcaggttttgtacatcaggcttataattttacaagaaaaatcccttccaaccttcaaataaatgcatgggagacactgtttagttcatgcaatgctcacggggatatccagcttggggaactcgtagcaaaaaatgttcttcagtcgagaccttctgatggaggaatgtatacactcttgtcaaacatatacgccgctaaagggatgtggagcagtgctgctactgtcagaggtctcatgaaagaacaggggttgaagaaggagactgggtgtagttggattgagcttaagggggacgttgtttccttctcatcaaatgataatgcacatcctttgattgagcagatatgccaagaagttgataatctttctattctgatagaagaggcaagttaaatgggaacatcctttgacatggctatcaaaaggaattcagattgtttctttgagattattcacaaccacatggatataacactagtatatggtagaagcgatgaatgtctgaatttgaaatcctttggaggaattacacagtgctgatttgccggagctcaatctattcctttttggagattccttcaagatcagaatcagtggtgagagctgtcttactgaatcaccagctcgtggttcgaagcaacctctcggcactggatctgtccttttgcccttcaagatcccaatcgtggaattcaaaacagcacactgatgacatcatttggaaccctggtcgctggccaagcgagtcaatgtgatattactccaaaatagtttacttttcagatgcaatatcaaatggactggtgttaaactcgacacattgtaactggcccgctagaggatggatgaagatggagcattgaagcttattccttcttcaaatgtgaagcagtacatgcttgctggtgacgtcgcagttagaagagctcagatatctgttaatgcggtgattaaggtggcctgcagattgtacatatggccatgcaaactgtagattgcactgtttgcagagggaagtttaaagtgagagataagcaagctgctggagatagactaaaagttaaaagaagttgtgctgagcgtatggaggggaaccaggaaaccagcttaggatctttgttctcacgttggtgtggtgctagagaagaaataaaatgaccctaaggctagtttgggaactttatttttcgaataaatttctattttccaagagaaaatggcctaatttcccaaaaaaatggggtttccaaactagccctaaataaacaatacaagtacagatggaattttgtgaagtcagtggttaatggaattgattttccagattaagaaacagtaccagttgaattttctttccagctagtatatttttttcctgagaagttgttacttatatcctagttattaatcagaatcttaatatatgcagtgcaggggaaaagtctacttattactaactagagcagcatgttcacacagtcatgtaaatgtctcatggttgtatttaaccaggttcacgcgaacgaatctggtgggttcagcttttgagcctccaagtgttagggagaactagtcgatgggttagctcatcgtgacttcatgagatgaattggggtcaccatgtaggatgtggttgttcacatggtcccatacatctttgcaaacggcaagggttctctgtgcttttgttttgaccctgcaaaccatgaggactcacgaggcttctgctccaggttgtggacaaccaaggcttgatcaggtttatgtgtctttctacgccgaggagctgcaagcttccatgaccttggaggttttgcctcaaaggtagatttcgctcgagaagaagcctactggcaaatgcaggatgcaatacaattactccctccgtttcgttttaattgtcgctggataatacaaaattgaactatcaagggacaactaaaaagaaacggagggagtacttgtgttggttagctttgacaggcggatccatcggagaaggtgattgaagtatggtgactaggtgagaaaaggctgtagttattgtaaatcccatgctgttacagaaaatgcaagctctcctttattttttgggatatgtgaagttttttagtgacaaaaaaggtctatcaagagactcagagagagaagaacttccatataatttgtggttatttattgttagggtgtatttggtttttaggaactaatttttagtccaacattttattctattttattctctaaattgacgaatacagaaactaaaactctatttcagtttctgtatttaataatttagagactaaaaattagtctctataaaccaaacacctattagtctgattgtgatgctcaactactcgttattgatgaattgtttcttatgttcttacctcttcctatgtggtcgtactcccatttagaaataaactatctaaatattgctaaaaaat

SEQ ID NO: 53931 - DNA, 430 bp, Zea Mays
cttctcatgaaaagatctgtggctctaaagaaagggctgcccattcttggtgttttcaggtgcccggtgcgtggctactcttctaaatgaaatgaagcgtcggggcaaagactgcagatttggtgttgtcaccatgtgtatcggatctagaatggggacagcagctgtgttcgagctgtgttcggcccggctggaggtatcgaccatcactcgtcactgtaacccgatggtgatcggtgatcgtgagcttccatgttattgcattctgatacttgagacttttattatgactatgtatgagatattgtctcttattagtactgggatgatgagatgtgtcttattatgactatggatgagacttttgtgatgtaattgatgagacttttgtgatgtaattgatgagactatgtatttaaatattgttatg

SEQ ID NO: 53932 - DNA, 423 bp, Zea Mays
cttctcatgaaaagatctgtggctctaaagaaagggctgcccattcttggtgttttcaggtgcccggtgcgtggctactcttctaaatgaaatgaagcgtcggggcaaagactgcagatttggtgttgtcaccatgtgtatcgaatggggacagcagctgtgttcgagctgtgttcggcccggctggaggtatcgaccatcactcgtcactgtaacccgatggtgatcggtgatcgtgagcttccatgttattgcattctgatacttgagacttttattatgactatgtatgagatattgtctcttattagtactgggatgatgagatgtgtcttattatgactatggatgagacttttgtgatgtaattgatgagacttttgtgatgtaattgatgagactatgtatttaaatattgttatg

SEQ ID NO: 53933 - DNA, 685 bp, Zea Mays
gttcttctcatgaaaagatctgtggctctaaagaaagggctgcccattcttggtgttttcaggttgcccaatctgccctatcttgattagtccacgttgtgtttgtcgtcgatgtttagacacattttgctcaattccttgttacatttaacgctgcttggcatcgtccattaggagctttatcgctgttggagtggatctagctgttatgggcgctggtcttactgtggccattcctgctgctgtgaagtttacttacctgctatttttttctgagcaaagtcggttaaacttgtgattctttgtatgttcaggtgcccggtgcgtggctactcttctaaatgaaatgaagcgtcggggcaaagactgcagatttggtgttgtcaccatgtgtatcggatctagaatggggacagcagctgtgttcgagctgtgttcggcccggctggaggtatcgaccatcactcgtcactgtaacccgatggtgatcggtgatcgtgagcttccatgttattgcattctgatacttgagacttttattatgactatgtatgagatattgtctcttattagtactgggatgatgagatgtgtcttattatgactatggatgagacttttgtgatgtaattgatgagacttttgtgatgtaattgatgagactatgtatttaaatattgttatg

SEQ ID NO: 53934 - DNA, 1770 bp, Zea Mays
cccaggtgcgtgcgcgttgccggtcggccatcgacactcacagatacgaaatgatgggtgtatatatatgcgtgggtggctcgcattgtctgtctggatgggttgacagactgcctcaatgtggttggttgatgccgatgacgccggcaacgcaacgcaattacgcaatgtatggccatggcggcgactgcttgactggctctcatcgtcagtcgtcacttgattatcaggcgttcgcgagcgcgtggaagacggcgtgctcgctggacaacgcggtgttcctggtgcccgccggccgtcgctacaaggtcggcgccatccagttcgtgggtccctgcaaggacaggaggatgatcatccagatccagggcacggtcgtggcgcccgaggagccgtcggagtgggacccgcggagcccccggctgtggctgctcttctcgggcctcgccggcgcgcgcatccagggcggcggcgtcatcgacggctccggctccaagtggtgggccagctcctgcaagatcaacaggtccaacccgtgcaggccggccccgacggccgtgacgatcgactcgtgccggggcgtgcgcgtgcggggcctccgcgtgcagaacgcgcagcagatgcacgtgacggtgtcacgctcacgcggcgtgcgcgtcgccgggctgcgcatcgacgcgcccgaggacagccccaacacggacggcatccacgtggccgagtccacggcggtcaccatccagagctgccgcatcggcaccggcgacgactgcatctccatcgtcaacggcagcttcggcgtcaagatgcgggacatcgactgcgggcccgggcacggcatcagcatcgggagcctcggcaagggcggcgcgttcgcggctgtggcggacgtggcgctggacagggcgcggatcagccgcgcgcagaacggggtgcggatcaagacgtggcagggcggggccgggtacgtccgcggcgtgcgcttcgccgacgtggccgtggacggcgtcgaccaccccatcgtcatcgaccagttctactgcgacgtgacccgccggcagagggacggcggcggaggcggcgcctgcgccaaccagacctccgccgtggccgtgtccgacgtgtcctaccgcaacatcagcggcacgtcgcgccgcgccgaggccatccggttcgcctgcagcgacgccgtgccgtgcaccggcatcgttctcagcaacatcaacctgcgccgcgccgacgatgacggcgaggtgcagacggtgtgcaactgcgccgtcggcctcgactacggccgcgtccagcccgccgccgactgcctccgtagcagcacctgcggcggcacgcctgatggccaccaccaccacgacgacgacgacgaggagcaggggaaggacgacgccgtcctgcacaccgagctctgataaaagcaagcagctgcacgcctgcaagtgaaaccaatggccgccgcgctcgttcgtccgacatttaggagattgattggtctaaaatctcttattatatatttttaaatagtaagaaattataaccctcgaatcttctcccttccatttgttcacaaacagacctttactggggtaacactgaatgctaatgcttagcgagaggctctctccaacagagcgtgtaaaggctcctctaccataaatatgataatcgaacggtcatctactctctcgagcaaagttctctaaatttagagaactttgttgcattctctatatatagagtttctctaaatggtcattt

SEQ ID NO: 53935 - DNA, 1724 bp, Zea Mays
ctctcttccctgtgaactttttcttaaatcaatcgatcaatcacgcgcacaagaaccggcaataaatcgcggaattcccaacgccgcaccttcaccgccgggctccccagtccaatccaacccaaccccagtccggcgacggttccgggcagcgcgcgatcggatcgtcgcgggttcggcttctcgtcgaacggcgcggattcctgcccccgatcggagggcgtcggctgcggcgcctcggcgtctgatctgctgcggtcggcttcttcttgggagaggagtgggatggacggggaagcgatccggatgggtggcggcaacttggcgcccgcctacctctccggcgccgccaccgccaccgccatcaccatgcaggatccgaaccagaaccagaaccagaaccagaaccagaaccaaagccagttcctgttcagcgccaactccacggcgctgcagctgttcggaagcgccgcggtccccacggttggtcctgctggttatataaattacactggaaacacccaccttcctgttatgaaccaagcaagtacttcaaacatcggcgcagggaatgagaacttgctgaagcttcaggtgccattgagcgactatcaccaacagagtgctggccggttagcacgtgttggcaatccgggtgctgtatcgactggtctaaggctgtcttacgaggacgatgagcgcaattcgtccatcacatctggcagcggtagcatggcctcgttgcctgccacgatgtcctgtgtcgatggtttcatggctgaactggacaaggaaagcaaagagattaacttctacttgagactccagaccaaatctgcaagcggatgaaggaggcgaaccagcggtggatggtctcgttcctggcgagcgtcaatcaggcggtggggaagaagctgcgggacaaggaactggaggtggaggcggtgaacaggaagagcaaggagctgaacgagcagatgaggcaggtcgccatggaggtgcagtcgtggcagtcagcggccatgtacaaccagtcggtcgtgaacaccctgaagaacaagctgatgcaattggtggcgcagaacaccaacctcgcgagagaaggcatgggcgacagcgaggatgtagcctccagccaaagccccgacgccggaggagacgccctgggtggtctcaggggcacggctaccgtcgggctgggggcctgcaggtgttgcggcaggaaggaggcgtcggtgctggtgatggcgtgccgccacctctgcctgtgcgccgactgcgacaaggtctccgacgtgtgccccgtctgccggttccccaagagcggcagcgtggagatcaacatgtcctgacaaggacctatgctatgcaaggacgtcgtgtcgaccaaaatcatcatcggcggggcagggcgggggtatacacagtgactagtagatggtgtacatgtcagcatactttttccttgacttgggatttcttcttcagatggtaaaggaggagatcaatatgtcctgacaaggacctatgctatcgatcgaagttggcggggcggaggtatacacagtaactagtactagatggtgtacatgtcagcgtgcttttccttgagttggcatttcttcagatggtaaaggagacgatcaggtttgcgtattgcaaatcttttttttttctagtgaaaaggttggccctcgctctgttggcattaaagcgtaacaaag

SEQ ID NO: 53936 - DNA, 1603 bp, Zea Mays
ctctcttccctgtgaactttttcttaaatcaatcgatcaatcacgcgcacaagaaccggcaataaatcgcggaattcccaacgccgcaccttcaccgccgggctccccagtccaatccaacccaaccccagtccggcgacggttccgggagaggagtgggatggacggggaagcgatccggatgggtggcggcaacttggcgcccgcctacctctccggcgccgccaccgccaccgccatcaccatgcaggatccgaaccagaaccagaaccagaaccagaaccagaaccaaagccagttcctgttcagcgccaactccacggcgctgcagctgttcggaagcgccgcggtccccacggttggtcctgctggttatataaattacactggaaacacccaccttcctgttatgaaccaagcaagtacttcaaacatcggcgcagggaatgagaacttgctgaagcttcaggtgccattgagcgactatcaccaacagagtgctggccggttagcacgtgttggcaatccgggtgctgtatcgactggtctaaggctgtcttacgaggacgatgagcgcaattcgtccatcacatctggcagcggtagcatggcctcgttgcctgccacgatgtcctgtgtcgatggtttcatggctgaactggacaaggaaagcaaagagattaacttctacttgagactccaggcagaccaaatctgcaagcggatgaaggaggcgaaccagcggtggatggtctcgttcctggcgagcgtcaatcaggcggtggggaagaagctgcgggacaaggaactggaggtggaggcggtgaacaggaagagcaaggagctgaacgagcagatgaggcaggtcgccatggaggtgcagtcgtggcagtcagcggccatgtacaaccagtcggtcgtgaacaccctgaagaacaagctgatgcaattggtggcgcagaacaccaacctcgcgagagaaggcatgggcgacagcgaggatgtagcctccagccaaagccccgacgccggaggagacgccctgggtggtctcaggggcacggctaccgtcgggctgggggcctgcaggtgttgcggcaggaaggaggcgtcggtgctggtgatggcgtgccgccacctctgcctgtgcgccgactgcgacaaggtctccgacgtgtgccccgtctgccggttccccaagagcggcagcgtggagatcaacatgtcctgacaaggacctatgctatgcaaggacgtcgtgtcgaccaaaatcatcatcggcggggcagggcgggggtatacacagtgactagtagatggtgtacatgtcagcatactttttccttgacttgggatttcttcttcagatggtaaaggaggagatcaatatgtcctgacaaggacctatgctatcgatcgaagttggcggggcggaggtatacacagtaactagtactagatggtgtacatgtcagcgtgcttttccttgagttggcatttcttcagatggtaaaggagacgatcaggtttgcgtattgcaaatcttttttttttctagtgaaaaggttggccctcgctctgttggcattaaagcgtaacaaag

SEQ ID NO: 53937 - DNA, 1189 bp, Zea Mays
tcctggcggaacggacggcggagaacagcgggggagcaggcacaaagcggagctcctgcgccgccccatctctcctctcctcccgtccgtatctctctcttgctcgcactcgcggagatcgaagagaagcgcaggaggccccagcactagcgccgccccgccgccgcatcagacatggcgctggccgctcgcctcgtctcgcgctcccgtcagctatattcggttcaagccactttggggaatggaggtgtcactcaagttcgctcctttgccaaggatgcagctccagctgaccgtcctcctgtcggtggggatgatctcctgaagggcatattctttgaggtaaagaagaagtttgagacagctcttggtgttcttaaaaaggaaaagatcactattgatccagatgacccagcggcagtttctcgttatgcccaagtcatgaagactgtaagggaaaaggcggatcttctctctgattctcaaaggattaaatataccattgagaccttcaccaagggcatccctgatgcacggacttacttgaatactcttcaacagctcagaataaagagtggtcttatagatcatcttggaattgagcctttgatgatggaagctcttgagaagattgagaaggacattaagaaaccacttttgaggagcgacaagaagaacatggccaccctcttggcagagtttgacaagattaacaaaaagcttggctttcggaaggaggatcttcccaagatcgaggaagagcttgaattggaaattgccaaaagtgagctgactgaacttaagaaggaatgcgttgaagcaatggagactcaactcaagagggaggagtttcaagatgaggagatgcctgatgtcaggaaattggacatcagaaacttcctgtaggcctgatcgacgataatctttgaggcccaacgcacctctggttttggtttcaagttgatcggtgctccacacctatgaatgctgctccttccctttttgtaataaaagaaactgcacggttgggtatgagttggattaaatcttgcctttctgttgttctggactcttgtggctgcagcaacaatgggatgtccttgtgttatagcatatgaactcgttacgaggcattcaggaaaatggtgatacctggtatttaacctttattttggtactcaaaaaaaca

SEQ ID NO: 53938 - DNA, 1069 bp, Zea Mays
tcctggcggaacggacggcggagaacagcgggggagcaggcacaaagcggagctcctgcgccgccccatctctcctctcctcccgtccgtatctctctcttgctcgcactcgcggagatcgaagagaagcgcaggaggccccagcactagcgccgccccgccgccgcatcagacatggcgctggccgctcgcctcgtctcgcgctcccgtcagctatattcggttcaagccactttggggaatggaggtgtcactcaagttcgctcctttgccaaggatgcagctccagctgaccgtcctcctgtcggtggggatgatctcctgaagggcatattctttgaggtaaagaagaagtttgagacagctcttggtgttcttaaaaaggaaaagatcactattgatccagatgacccagcggcagtttctcgttatgcccaagtcatgaagactgtaagggaaaaggcggatcttctctctgattctcaaaggattaaatataccattgagaccttcaccaagggcatccctgatgcacggacttacttgaatactcttcaacagctcagaataaagagtggtcttatagatcatcttggaattgagcctttgatgatggaagctcttgagaagattgagaaggacattaagaaaccacttttgaggagcgacaagaagaacatggccaccctcttggcagagtttgacaagattaacaaaaagcttggctttcggaaggaggatcttcccaagatcgaggaagagcttgaattggaaattgccaaaagtgagctgactgaacttaagaaggaatgcgttgaagcaatggagactcaactcaagagggaggagtttcaagatgaggagatgcctgatgtcaggaaattggacatcagaaacttcctgtaggcctgatcgacgataatctttgaggcccaacgcacctctggttttggtttcaagttgatcggtgctccacacctatgaatgctgctccttccctttttgtaataaaagaaactgcacggttgggtatgagttggattaaatcttgcctttctgttaaaaaaca

SEQ ID NO: 53939 - DNA, 1320 bp, Zea Mays
tcctggcggaacggacggcggagaacagcgggggagcaggcacaaagcggagctcctgcgccgccccatctctcctctcctcccgtccgtatctctctcttgctcgcactcgcggagatcgaagagaagcgcaggaggccccagcactagcgccgccccgccgccgcatcagacatggcgctggccgctcgcctcgtctcgcgctcccgtcagctatattcggttcaagccactttggggaatggaggtgtcactcaagttcgctcctttgccaaggatgcagctccagctgaccgtcctcctgtcggtggggatgggcatattctttgaggtaaagaagaagtttgagacagctcttggtgttcttaaaaaggaaaagatcactattgatccagatgacccagcggcagtttctcgttatgcccaagtcatgaagactgtaagggaaaaggcggatcttctctctgattctcaaaggattaaatataccattgagaccttcaccaagggcatccctgatgcacggacttacttgaatactcttcaacagctcagaataaagagtggtcttatagatcatcttggaattgagcctttgatgatggaagctcttgagaagattgagaaggacattaagaaaccacttttgaggagcgacaagaagaacatggccaccctcttggcagagtttgacaagattaacaaaaagcttggctttcggaaggaggatcttcccaagatcgaggaagagcttgaattggaaattgccaaaagtgagctgactgaacttaagaaggaatgcgttgaagcaatggagactcaactcaagagggaggagtttcaagatgaggagatgcctgatgtcaggaaattggacatcagaaacttcctgtaggcctgatcgacgataatctttgaggcccaacgcacctctggttttggtttcaagttgatcggtgctccacacctatgaatgctgctccttccctttttgtaataaaagaaactgcacggttgggtatgagttggattaaatcttgcctttctgttgttctggactcttgtggctgcagcaacaatgggatgtccttgtgttatagcatatgaactcgttacgaggcattcaggaaaatggtgatacctggtatttaacctttattttggtactcagtttggagagcaaagatccatttgttttattatgtcatttatttttgcaccttgtaaaggaatttgtttctgttgtatcaaccctccctaaagacccacatcttcgattaatgaagagtaaaatataccggctgtctctaaatttatgac

SEQ ID NO: 53940 - DNA, 9840 bp, Zea Mays
gttcaaccaagcagtgcttcttttgaggagtcagttccagaacatcaacataacttaggtgcgacaaatgacacagtgcagcaagacacactggaagcaactaagcaaacaaaaggaggtcagcaataccaggatctaggaccagaaaatgcaactgagaacacacaacctgcaagcatggcaaacattcctgatgttgatgttataaccaaagcatcttctggaattcaaactcctgttgagatcaaccgggacatctctgatgccattccagatgctactgatggaagcacagaaacaactgaaccagctaaagcgcacagtatcattcatcctgaaaagaaagagagctttcaagaagatacatctaccgcagaacctacagaagaggtgatcaaagtagaagatagacagagccagcaagctgaagcaatggatgcagacgtggtgcaggaagatgtgcctaaatctgaacatgctgatgagccaacagctgatgctcttgaagtgctgaatcaagaatctattgaagaaaccaatagcccagtgaatgaagagactgaagaagcaaccaaccagagcaacatgccagcatctgaggagacaataccaaaatatgacgcggcaacaagggatcaacctgtaaatattcaagcgcagaaccaggaaccagtagatgaaggagaagctactgtagaagaaagagaagtggctgaagcagttcatactgaagcaccagtgcaacaaagcagtgttgcttttgaggaggcagttccagaagaccaacataatttaggtgttgcaaataatacagtgcaagaagacatgatggaagctactgggcaaacaaaagaaggtcagcgataccaagatctaggaccagaaaatgcaatagagaacacacaacctgcaagcacggcaaacattcctgaggttgaggttataaccgaagcaccttctggatttcaaactcctgtggagatcaatctggacatctctgatgccattgcagatactactgatggaaacacaggaacagatgaactagttaaagcagaaggtgttatccatcctgaaaacaaagagagttttctagaagatacatctaccacagaacctttagaagaggtggccaatgtagaagatcagcacagccagcaagctgatgcaatggatgcagacgtggtgcaagaagaggtgcctaaatctaaagccgatgagccagcaactgatacccttgaagtgctcaatcaagaatatgctgaagaaaccagtggcccagcgaatgaaaagattgaagaaacagccaaccagagcaacatgctaacatctgaggagacagtaccagagtatgacacagcaacaagggatccacctgtaaatattcaagcacagaaccaggaatcattagaagaaagagaagctactgtagcagaaaatgaagttgctgaagcagttgatactgaagcaccagtgcaacaaagcagtgttgctcttgaggacgcagttccagaagatcaacataacttaggtgctacaaataacacagcgcaggaagacacgcaggacgctattgggcaaacaaaagaaggtcagcaattccatgatctaggaccagaaaatgcaactgagaacacacaacctgcaagcatggccaacattgctgatgttgatgtaacaaccgaagcaccttctggaattcaaactcctgtggagatcaatctggacatctctgatgccattcctgatactactgatggaaacacagaaacagataaactagttaaaacagaaggtgttatccatcctgaaaagaaagagagttttcctgaagatacatctaccgcagaacctacagaagaggtggccaatgtagaagatcagcaaagccagagagctgatgcaatggatgcagacgtggtggatgaagaggtgcctaaatctgaacatgctgatgagccagcaactgatgctcttgaagtgctgaatcaagattatgctgaagaaaccaatgacccagtgaatgaaaagactgaagaaacaggcaaccagagcaacatgccaccatctgaggagacaacaccagaatatgacacgacaacaagggagccacctgtaaatattcaagcacagaaccaggaatcattagaagaaagagaagctactgtagaagaaagtgaagttgccgaagcagttgatactgaagcaccagtgcaacaaagcagtgttgctcttgaggatgcagttccagaagatcaatataacttaattgctacaaataacacagtacaggaagacacacaagaagctattggacaaacaaaagaaggtcaacaataccatgatctaggaccagaaaatgcaactgagaacacagaacctgcaagcacggccaacactcctgatgttgatgtaataaccgaagcaccttctggaattcaaacttctattgagatcaatctggacatctccgatgccattccagatactaccgatggaaatgcaaaaacagatgaactagttaaagtagatggtgttatccttcctgaccacaaagagagcttttctgaagacacatgtgttgtagaacctacagaagagatgatagaagtagatcaacttggtcaacaagctgatgcgatacatgcagaggtattgcaggaagaggtgcctgagatgatagaagtagatcaacttggtcaacaagctgatgtgatacatgcagaggtattgcaggaagaggtgcataaatctgaacagtctgatgagccaggggtcgatgctcaagaagtgctgaaccaagaatctgctgaagaaactgatggcctggtgaatgtaaagactgatgaaactgagcacaagagcaacatggtggtccctgatgacacaattccagaacatgatgcacaaacgagagagccacctgtaaatattcaagaacaaagccgggaatcagtaggagatgctgaagcagtcaatactgaagcagaaatgcaacaaaacagtgttgcttttgaggagacaactccagaaaaccatgtagcaacctcagagccatgttctgaaatccaacatgcacatcatgtggaaccagaggaaatcaatggccctgaagatggcaaagatgatgagatcaccaacatgagcagcagagaatatctagttcgagataatgttctgcagagtggaccaataatagatatacaaccagttcaggagttggaacaaattaaaacggatgaagcttctaaccagactcatgctgttatcttcaatgacctagctcaggaagatgctacagcaacaagtgaaccacaagtgactgaaacagaactaaaggacattgaagccactgaagctgaagaaatcaccaaacttgaccatgttactcattccaaggaacttgcagtagaaaatgattcaacagcagatgaaccacataagggtgaaatccatcaaactcttgaacaagatttagttgaagttaaggacactggaacttaccatgaaaaaacaatatctacttcagaggacacagtacaagataatttgacagaagatgagccaagttttggtagtcaagaagtagatgatgcagagtcaacagaagaaactaagcaaaacatagctgagaatattgcagaagtctctgatgtggcgattgttgatgacgcaattgaacagaatgtgctacagactgaggatatcgttgaaatgcataaacaggagctggaacgagaagaaacagagagaatagaacctgttgaatcagaggaagcttctgatcagaggaatgatgcaccattcgattattcagctcgagaagataatacaaaggaaagtgagatacagcagacagaatcagcaacggaaacaaatgaaattgaacccactgaaattgaagcagttcctcgagaaagcaatacctgtgtttcagaggagccttctcaagaagatcatataaaagaaagtgaaacaagttttgacaatcaagaagtgaacatcacagaatcttcagaagtaaatgatagtcacaaagatataatatctggaggaatctctgacccaagcaacacagcttctgctggggattcatctgaaggaagcaatgtccctgaaggcgagccacctgaacaggctgtgcaggaactgggatcagaggagataaagaacactcaaattgatgaagtgaatgaaacatcccttgaaatgaatgctactgtctttcagataccaagtcaagaagaaaatccagacacaaccaaattgcatgaatcaacagaggtgagcaacattgaagccacagaaatgcacggaaacccccaccaaagtgatctggctgctcagtcagaggagcaaacaacagaaggaatatcaagtggtctgaaaccagaatcaattgaaggtaatgatacagaagccaaaaaatgtcaaagtacctctcaggaaaaaacaatctctgcctctgagtctgtcccagaagatgcaaccactgaaccagatgttgatcaccaacaacttcaggatcaagaatctgccaaactcaaggaaaccgaagctgataaatttcaagaaattgtctcatctaacactctttcttctgaggagttcacatcaacagaaccaagttctgacaccgaagcagacaattcacagttagcagaagaaactgaggacaccgaaattgtgaaaagtaatactgctcttgctgaggcagcagctccagaaacagatgcaactgctgatacatcatctttccatgagacagatctagaagagaacaaggacacaggaacaattgaaacagaggatggtatggtatcaagtgactatacatcagaaaagatggacacggaaaccatggagactgaagcagtccctcatgatagtagtgatgcaaatataaaagaacacactgaagacgatacttcaacaccaaatgccccacatgctggtactgaacctgttcatgagctagaatcagttgaagtcagcgctgacacaacggaacatccaggagagacccatgactctgcttctgatgagcttactccaacagaagaaaatacagcagtaacagaaccatcttttagtacacaggaagtgcagaatctgacatctcaagaaatcaaggacagcgaagatgacaaaactgatgaattctcagatatcaatagctttcctattcctggagaggcagaccaagtaccaagaagtgaaacaactcctgatgtccaagaagtggaagaactgggtttaacagaagaaacaagagacattgaagccatagagcctggagatcagcaagaagacatagtttctacccttgagaagccagaaatagacggtgaaccaagtgctgataatcagcaggttcatgaggacaaactaccagaagtggaagacaataaagcaattgaagctgaagcctccaagcaaagtaatattgccactcctgataatgcagctgaagaaaggaatgaactggaaagtgatccagatccatatgcccagccagcagaacaggtagaattatccaaagacaatgagaacagccagcttgtgaagacagaagaaacctcagaccaaagcaattttgtcgtccttagaaggactacagaagattctgttgcaagagaaattgacccacctgttgccattaaacaagagcaaccagtggaagaaatcaagggtgtcgatgccactgaagctgaagaagactttcgtacaacccaagctgttgcaatagagaaactagcttcagtcaataaaatagcaacagtagaaccgacttatgatattcagcgaatggatgacttggaagcaacagaggaaaagaagcacgctgaagccattaatgaaggagatcaatccaatattgctgtttcagaggaacaaactccaacatataatggagaaacaccagaagatcatcatgtagaatcaaatgaaggaacgatggggaatgaaactgacaatatcattttggcacacggaatcaaagatgaaatacagaagtcagcagaactaaaggacggtccatgtgatttgtctgaaactgttttaacaactcggagaagtgagaacatgattgatgaagataatgttcaaacttatggcaatgatacagtagaggcttcaaacagtatccatcaagtcaaagaagagccagatgctggaaccgaacataattcaagccaaatgataagtgaatgtagtggagagaacgaaactcatgtccaagatagagatgtagacatgtggattctcacagaaggtgtcattgcagaagcatcacaggctttattggaaaatgatcctcaggcagcacaagatactatagaaaaggatgatacaacgaaaagtagtgagccaatcagtgatcacgatagcaggcaacattgtgatgtagaagcacttcaacaacaaagttgtgagacagaggccttatccattttggaacaagatgaggctctgcaaaagattgactcagatcaaaagcagaaagaagttgaggagattgaaagtcagaatgatgaacttcaggtagatgaacagaaacatgaagacaagagggatgatttagccaaagaaccactagtggagtaccagaatttcgaaaacagagcttcaaacaacacaaaagacaatgatgcattcaaggttgaacaaacagaggcagccaatagtgagattctcaagaataaagccctacatatatccaaggaatccaccccaagcattatggctatgaaggttgaaaacattaaggaaacaagtgaaggaactgaagaagatgatgctgccaaaaatgataacaaagatgaacaggagaatgcagaaaatgttgatatagtatcaaaaacttctactaatgaacaaggccaaacaactgatgaaattagaaaagaagaggatcctgttcacatcattcaagcatcagagaaagagatcgcagatgaaatagaagaaagtaaagaaatacatgaagacaatgctatttgtcatgataaattacagacaaattctgaaaaggaagagtcacctcaaccgcattccaatgaaccatacaatgtggatgctaaaattgatgatacaacatctctatgcgaagaaataatccatgacaatacaagtataaatcctagagaaattgaagagataggagaaaacaaaggaccagacttcacttctgaaccttctgtagaatcatccatacagaacaatgttgaagactcaagcagtcatcacaaggttagcggagctgatggagcaccgtctaacggaagtctcaagacctttactgacactggaagggatattgatgttccattggtaattacaacatcaaaggaagaaagtgtgaacgacactatggaaaacctcaatcttgaccttcctggacatcaggcacaggatggcaacaccgctgaaaaggtgctcagcttagaggaaagagaaagagagatgccttcatcagagaagctccttcaaactgaaccaggagagaatcaaattcccaatgaacaggatgaaaaggacatacgagatgagaatcaaactctaaaagaaaaggatgaagatgacatgcaagatacagaatttggagaggctaagaaagaagttcaacaagaattacctgtctcccattttctgatgaatctaatattgggaaaagagagcagtgatgcaaatgaagattcagaatctgaggctgcaaggaagcaaggtgaagcgacagaagatgacagctgcacgttcatttctgaacaagaagaaagtctggggtcacttcctacagaaaataaggtggatgacaatcccacctttgttgaacaagaaaaacatgaagttaaatgctctgaagaaacacaggaaatggtcgaagaacaaagtgatgatcagctgcacacagaaagatcaattgaaattgatgaggatatcaaaaagaacactcgtgctttagaaataccagcataccaagacaatccccaggatggaatttctggtgaattgcagacagaagaagcagctggtgtttctacaaaaatggtaactagagatattgatatttcgagtgttgtgctggacaacagaacagttggtactgtgtgtcaggaaaaaatggaggtatcaacaaaaaatgaaaatggaagcttgaggagcagcctgaatgactcaacaaacacaatggctccccaagacgatactctaggagaaggacaatcaaggctcgtgcttgaacctttacctgaagacaaaagtgttgatgtagtttctgagcaagcacctttgttgacagaatcaggaatgactgacgcgaatgacttatctagcgatactacaagtgctcaaaaccctgtgtctacaaaacccactgaatctgccagagttgaggccacatattctactgatattcaactggagaatgaagaagtagataagaaagaagaggaccagcatgcaaacacaaccaaagatgaagtttctaaagagattgtagaaagttcacatataaatctgcagaaaataacaaggcctgaagaaaaatctaatgagctagaaactcaaattaccgaaccagtttgtgacagtcaggcaattttggcccatgaaaaggaaatatctgaagaaaactttccaacagcagtcgaaattcaggctgatggtccaaacatgcagatcaaccaagataagcaagatgaagctgctgacatcgaaactgaaatgaagccagaaaaattaggggaatctaattttcaggaacaccaggacaatggtactgagcaaaagtctcctaaagagactgatgaaggagaccagcaacttgtggccaagaaagagattctgacccaagaaatggatgtgcatgagacagttgaaagacctcagcaagcagttgaaagtcctcagcaaacagtgagcataacatccaatgaagaccaggaactgtttgattcaaaggtccaggaacgtgatctcaatgtagtttcacccagagaagcttctgaggctgaagaaaactttgtggacgtaaccaagccagaattcagcacagatgaagaacaaagtccaaaggctgatgcagaagagaagatttatgacgagaagataaaggacatagagggaactaagaatttaactgatgaagcagcaataaaaactgaagcaccaggagcagcccagaagacacgtaaaaaatatagcctattgtctggcgtgggatcgaaggtaaaacaccaactcgcaaaagtgaagaaagccattgtaggcaaacctgggcacacaaaaccagtatctccgacggcataaaactccagtcaccttagaacatgtacattattgtattgtttgtagtcttgtgagccatttatttcggtggtagtgtttgcgatgggctaggagaaggtcctcttcacaaccatagcattggaattctatgatgttgcacatgaaacaccccccccccccctcgagagtatgttgaagatgtttgtaaatatgtctagtgtgtaaattcaagtttccctgaaactttgaggtagaatcaaggacatgtaattggtcaattgtttgtattcttcgttgaaatgcacaagcagtttgtggtcatgatgcagcttgcagcatattcttcacttcactcaagtgctcctggtctgttcagtccctatctgagtttaaaatgggacaatgcaattccaatcagatcatgatgatgaacaacttgatatgaaaaataaaatgattaaagaatttggcttaaatggatataatgtaatcactaaactaatgaagaagctagataaaagaaaagcaagccttgatgctcaataagac

SEQ ID NO: 53941 - DNA, 12855 bp, Zea Mays
agccactccatctttctttttttcctttttccaactttcttcttcttcctcctccttctcattctgatctggaacaatggcgacagaagacgaagagcgagaagcagcagatgggacggaagtcccagtggaagctgtggttttgggaacattccatttgcatgcacacccagaaggcaagctttcatctctgatggatatcaagagcatgggagaaaccatcgattcaactgaaggaacgttgaagattccagaggatcaagttttagtagaagcaccctctgatgtccaacttcctccagaacataatctaaatggtgaagcatcttctttgaatggccatacagacaaagaagagaaggtttcagtcgagcagccacatgacaatgatcaggaagaagcagaactagatcagaacaacagaatcaacaaagaagatgcggctgatggtttaagtcatggagagagcacaacagaagacagctgccttctgaagcacaagaaagatgaagaatccaagggtgatgaacaacaagatttaggtgttacagtggatgatgacttggtgcaggaagacacgctgaaaactgacaatgctattgagcaaacagatgatggtcagcaagaccaggatcaagaacctgaaaaggcaaacgagaacacagaacctgcaagcatcgcaaacaatgacgatgttgagattgtagctgagacacctactggactccaagctcctgtggagtcacgtatgaatgattctgatggcattccggagactattgatgaagagacagaaacagatgaaccagctcaggcagatggcgttgttcatcctgaagacgtggccaaagtagaagatcaacagagtcaacaagatgacacggtggatgcagatgtggccccagaagaggttaaatgtgaagaaactgatcagcaggaagagaagcccaaatctgaagctcatgagccaacgattgatactcgagaagcgttgaatcaagaacctgctgaagaaactgatgactcgatgaataaaaagattgaagaaactgcacaccagaggaacctacagaagaggtggtcaaagtagaagctcaacagagccagcaagcagatgtgatggatgcaaacatggtgcaggaagaggtgcctaaatctgaacatgctgatgagccagcaactgatgcttttgaagtgctgaatcaagaatctgttgatgagccagcaattcaagcacctgtaactattcaagtgcagaaccaggaaccattagaagaaatagaacttgctgaagcagttgatactgaagcaacagtgcaacaaagcagtgctgcttttgaggagtcggttccagaacatcaatgtaatttaggtgctacacataacacagagcaggaagacacgctggaagctagtgggcaatcaaaaggaggtcaggaataccaagacctaggaccagaaaatgcaactgaaaacacacaacaagcaagcatgacaaatattcttgatgttgaggttataactgaaacaccctctggaattcaaactcccatggagatcaatctggttatctctgatgccattccagatgcaactgatggaaacacagaaacagatgaaccagctaaagcacacactttcgttcatcctgaaaagaatgaagtctttccagaaaatacatttaccaccaaacctacagcagaggtagtcaaagtagaagatcagcagaaccagcaagatgatgcaatggatgcagaagtggtgctggaagaggtgcctaaatctgaacgtgctgatgagccagcaactgatgctcttgaagtgctggaatctgttgaagaaactgatgacccaatgaatgaaaagactgaagaaacaacccaacagagcaacataccagcatctgaggagacaacggcagaatatgacgcgacaagggagccacctgcaaataatcaagtgcagaacaaggaaccagtagatgaaagagaatctactgtagaagaaagagaagttgctgaagcagttgatactgaagcaccagtgcaacaaagcagtgttgcttttgatgaggcagttccagaagagcaccataatttaggtgttgcaaataacacagtgcaagaagacacaatggaagccactggacaaacacaagaaggtcagcaataccaagatctaggaccagaaaatgcagctgagaacacacaacctgcaagcacggaaaacattcctgatgttgaggttataaccaaagcaccttctgaaattcaaagtcctgtggagatcaatctggacatctctgatgccattccagatactaacgatggaaacacagaaacagatgagccagctaaagcaaacactgtcgctcgtcctgatacggaagagagctttgcagaagatacatctactggacctacagaagaggtggtcacactagaagatcaacagagccaacaagttgatgcaaaggatgcagacgtggtgcaggaagaggtgcctacatcggagcacaccgatgagccagcaaccgatgctgttgaagcgctgaatcaagaatctgatgaagaaacagatggcccagtatatgaaaatactgaagaaacaacacaccagagcaacatgcccgcatctgaggagacactaccagaaaatgatgtgacaacaagggagccatctgtaactattcaagcacagaaccaggaatcattagaagaaagagaagttcatgaagcagttgatactgaagcaacagttcaaccaagcagtgcttcttttgaggagtcagttccagaacatcaacataacttaggtgcgacaaatgacacagtgcagcaagacacactggaagcaactaagcaaacaaaaggaggtcagcaataccaggatctaggaccagaaaatgcaactgagaacacacaacctgcaagcatggcaaacattcctgatgttgatgttataaccaaagcatcttctggaattcaaactcctgttgagatcaaccgggacatctctgatgccattccagatgctactgatggaagcacagaaacaactgaaccagctaaagcgcacagtatcattcatcctgaaaagaaagagagctttcaagaagatacatctaccgcagaacctacagaagaggtgatcaaagtagaagatagacagagccagcaagctgaagcaatggatgcagacgtggtgcaggaagatgtgcctaaatctgaacatgctgatgagccaacagctgatgctcttgaagtgctgaatcaagaatctattgaagaaaccaatagcccagtgaatgaagagactgaagaagcaaccaaccagagcaacatgccagcatctgaggagacaataccaaaatatgacgcggcaacaagggatcaacctgtaaatattcaagcgcagaaccaggaaccagtagatgaaggagaagctactgtagaagaaagagaagtggctgaagcagttcatactgaagcaccagtgcaacaaagcagtgttgcttttgaggaggcagttccagaagaccaacataatttaggtgttgcaaataatacagtgcaagaagacatgatggaagctactgggcaaacaaaagaaggtcagcgataccaagatctaggaccagaaaatgcaatagagaacacacaacctgcaagcacggcaaacattcctgaggttgaggttataaccgaagcaccttctggatttcaaactcctgtggagatcaatctggacatctctgatgccattgcagatactactgatggaaacacaggaacagatgaactagttaaagcagaaggtgttatccatcctgaaaacaaagagagttttctagaagatacatctaccacagaacctttagaagaggtggccaatgtagaagatcagcacagccagcaagctgatgcaatggatgcagacgtggtgcaagaagaggtgcctaaatctaaagccgatgagccagcaactgatacccttgaagtgctcaatcaagaatatgctgaagaaaccagtggcccagcgaatgaaaagattgaagaaacagccaaccagagcaacatgctaacatctgaggagacagtaccagagtatgacacagcaacaagggatccacctgtaaatattcaagcacagaaccaggaatcattagaagaaagagaagctactgtagcagaaaatgaagttgctgaagcagttgatactgaagcaccagtgcaacaaagcagtgttgctcttgaggacgcagttccagaagatcaacataacttaggtgctacaaataacacagcgcaggaagacacgcaggacgctattgggcaaacaaaagaaggtcagcaattccatgatctaggaccagaaaatgcaactgagaacacacaacctgcaagcatggccaacattgctgatgttgatgtaacaaccgaagcaccttctggaattcaaactcctgtggagatcaatctggacatctctgatgccattcctgatactactgatggaaacacagaaacagataaactagttaaaacagaaggtgttatccatcctgaaaagaaagagagttttcctgaagatacatctaccgcagaacctacagaagaggtggccaatgtagaagatcagcaaagccagagagctgatgcaatggatgcagacgtggtggatgaagaggtgcctaaatctgaacatgctgatgagccagcaactgatgctcttgaagtgctgaatcaagattatgctgaagaaaccaatgacccagtgaatgaaaagactgaagaaacaggcaaccagagcaacatgccaccatctgaggagacaacaccagaatatgacacgacaacaagggagccacctgtaaatattcaagcacagaaccaggaatcattagaagaaagagaagctactgtagaagaaagtgaagttgccgaagcagttgatactgaagcaccagtgcaacaaagcagtgttgctcttgaggatgcagttccagaagatcaatataacttaattgctacaaataacacagtacaggaagacacacaagaagctattggacaaacaaaagaaggtcaacaataccatgatctaggaccagaaaatgcaactgagaacacagaacctgcaagcacggccaacactcctgatgttgatgtaataaccgaagcaccttctggaattcaaacttctattgagatcaatctggacatctccgatgccattccagatactaccgatggaaatgcaaaaacagatgaactagttaaagtagatggtgttatccttcctgaccacaaagagagcttttctgaagacacatgtgttgtagaacctacagaagagatgatagaagtagatcaacttggtcaacaagctgatgcgatacatgcagaggtattgcaggaagaggtgcctgagatgatagaagtagatcaacttggtcaacaagctgatgtgatacatgcagaggtattgcaggaagaggtgcataaatctgaacagtctgatgagccaggggtcgatgctcaagaagtgctgaaccaagaatctgctgaagaaactgatggcctggtgaatgtaaagactgatgaaactgagcacaagagcaacatggtggtccctgatgacacaattccagaacatgatgcacaaacgagagagccacctgtaaatattcaagaacaaagccgggaatcagtaggagatgctgaagcagtcaatactgaagcagaaatgcaacaaaacagtgttgcttttgaggagacaactccagaaaaccatgtagcaacctcagagccatgttctgaaatccaacatgcacatcatgtggaaccagaggaaatcaatggccctgaagatggcaaagatgatgagatcaccaacatgagcagcagagaatatctagttcgagataatgttctgcagagtggaccaataatagatatacaaccagttcaggagttggaacaaattaaaacggatgaagcttctaaccagactcatgctgttatcttcaatgacctagctcaggaagatgctacagcaacaagtgaaccacaagtgactgaaacagaactaaaggacattgaagccactgaagctgaagaaatcaccaaacttgaccatgttactcattccaaggaacttgcagtagaaaatgattcaacagcagatgaaccacataagggtgaaatccatcaaactcttgaacaagatttagttgaagttaaggacactggaacttaccatgaaaaaacaatatctacttcagaggacacagtacaagataatttgacagaagatgagccaagttttggtagtcaagaagtagatgatgcagagtcaacagaagaaactaagcaaaacatagctgagaatattgcagaagtctctgatgtggcgattgttgatgacgcaattgaacagaatgtgctacagactgaggatatcgttgaaatgcataaacaggagctggaacgagaagaaacagagagaatagaacctgttgaatcagaggaagcttctgatcagaggaatgatgcaccattcgattattcagctcgagaagataatacaaaggaaagtgagatacagcagacagaatcagcaacggaaacaaatgaaattgaacccactgaaattgaagcagttcctcgagaaagcaatacctgtgtttcagaggagccttctcaagaagatcatataaaagaaagtgaaacaagttttgacaatcaagaagtgaacatcacagaatcttcagaagtaaatgatagtcacaaagatataatatctggaggaatctctgacccaagcaacacagcttctgctggggattcatctgaaggaagcaatgtccctgaaggcgagccacctgaacaggctgtgcaggaactgggatcagaggagataaagaacactcaaattgatgaagtgaatgaaacatcccttgaaatgaatgctactgtctttcagataccaagtcaagaagaaaatccagacacaaccaaattgcatgaatcaacagaggtgagcaacattgaagccacagaaatgcacggaaacccccaccaaagtgatctggctgctcagtcagaggagcaaacaacagaaggaatatcaagtggtctgaaaccagaatcaattgaaggtaatgatacagaagccaaaaaatgtcaaagtacctctcaggaaaaaacaatctctgcctctgagtctgtcccagaagatgcaaccactgaaccagatgttgatcaccaacaacttcaggatcaagaatctgccaaactcaaggaaaccgaagctgataaatttcaagaaattgtctcatctaacactctttcttctgaggagttcacatcaacagaaccaagttctgacaccgaagcagacaattcacagttagcagaagaaactgaggacaccgaaattgtgaaaagtaatactgctcttgctgaggcagcagctccagaaacagatgcaactgctgatacatcatctttccatgagacagatctagaagagaacaaggacacaggaacaattgaaacagaggatggtatggtatcaagtgactatacatcagaaaagatggacacggaaaccatggagactgaagcagtccctcatgatagtagtgatgcaaatataaaagaacacactgaagacgatacttcaacaccaaatgccccacatgctggtactgaacctgttcatgagctagaatcagttgaagtcagcgctgacacaacggaacatccaggagagacccatgactctgcttctgatgagcttactccaacagaagaaaatacagcagtaacagaaccatcttttagtacacaggaagtgcagaatctgacatctcaagaaatcaaggacagcgaagatgacaaaactgatgaattctcagatatcaatagctttcctattcctggagaggcagaccaagtaccaagaagtgaaacaactcctgatgtccaagaagtggaagaactgggtttaacagaagaaacaagagacattgaagccatagagcctggagatcagcaagaagacatagtttctacccttgagaagccagaaatagacggtgaaccaagtgctgataatcagcaggttcatgaggacaaactaccagaagtggaagacaataaagcaattgaagctgaagcctccaagcaaagtaatattgccactcctgataatgcagctgaagaaaggaatgaactggaaagtgatccagatccatatgcccagccagcagaacaggtagaattatccaaagacaatgagaacagccagcttgtgaagacagaagaaacctcagaccaaagcaattttgtcgtccttagaaggactacagaagattctgttgcaagagaaattgacccacctgttgccattaaacaagagcaaccagtggaagaaatcaagggtgtcgatgccactgaagctgaagaagactttcgtacaacccaagctgttgcaatagagaaactagcttcagtcaataaaatagcaacagtagaaccgacttatgatattcagcgaatggatgacttggaagcaacagaggaaaagaagcacgctgaagccattaatgaaggagatcaatccaatattgctgtttcagaggaacaaactccaacatataatggagaaacaccagaagatcatcatgtagaatcaaatgaaggaacgatggggaatgaaactgacaatatcattttggcacacggaatcaaagatgaaatacagaagtcagcagaactaaaggacggtccatgtgatttgtctgaaactgttttaacaactcggagaagtgagaacatgattgatgaagataatgttcaaacttatggcaatgatacagtagaggcttcaaacagtatccatcaagtcaaagaagagccagatgctggaaccgaacataattcaagccaaatgataagtgaatgtagtggagagaacgaaactcatgtccaagatagagatgtagacatgtggattctcacagaaggtgtcattgcagaagcatcacaggctttattggaaaatgatcctcaggcagcacaagatactatagaaaaggatgatacaacgaaaagtagtgagccaatcagtgatcacgatagcaggcaacattgtgatgtagaagcacttcaacaacaaagttgtgagacagaggccttatccattttggaacaagatgaggctctgcaaaagattgactcagatcaaaagcagaaagaagttgaggagattgaaagtcagaatgatgaacttcaggtagatgaacagaaacatgaagacaagagggatgatttagccaaagaaccactagtggagtaccagaatttcgaaaacagagcttcaaacaacacaaaagacaatgatgcattcaaggttgaacaaacagaggcagccaatagtgagattctcaagaataaagccctacatatatccaaggaatccaccccaagcattatggctatgaaggttgaaaacattaaggaaacaagtgaaggaactgaagaagatgatgctgccaaaaatgataacaaagatgaacaggagaatgcagaaaatgttgatatagtatcaaaaacttctactaatgaacaaggccaaacaactgatgaaattagaaaagaagaggatcctgttcacatcattcaagcatcagagaaagagatcgcagatgaaatagaagaaagtaaagaaatacatgaagacaatgctatttgtcatgataaattacagacaaattctgaaaaggaagagtcacctcaaccgcattccaatgaaccatacaatgtggatgctaaaattgatgatacaacatctctatgcgaagaaataatccatgacaatacaagtataaatcctagagaaattgaagagataggagaaaacaaaggaccagacttcacttctgaaccttctgtagaatcatccatacagaacaatgttgaagactcaagcagtcatcacaaggttgaagatgaaaagctttcaatgtctgagaaaaatgatgtagatactgaagctatgcaagaaataaatgatgaatctggcgcggatataaaccaaacagaacaatgtcaagaagaaattactgcagatgatgttctgcaacttgaaacagaaggaaattcatttgacaagattgaagagactgcttcaaatgaggaaacagagactagtacagcagccactgaagcagtaacgttcaatgaagatattactgacaaggttagcggagctgatggagcaccgtctaacggaagtctcaagacctttactgacactggaagggatattgatgttccattggtaattacaacatcaaaggaagaaagtgtgaacgacactatggaaaacctcaatcttgaccttcctggacatcaggcacaggatggcaacaccgctgaaaaggtgctcagcttagaggaaagagaaagagagatgccttcatcagagaagctccttcaaactgaaccaggagagaatcaaattcccaatgaacaggatgaaaaggacatacgagatgagaatcaaactctaaaagaaaaggatgaagatgacatgcaagatacagaatttggagaggctaagaaagaagttcaacaagaattacctgtctcccattttctgatgaatctaatattgggaaaagagagcagtgatgcaaatgaagattcagaatctgaggctgcaaggaagcaaggtgaagcgacagaagatgacagctgcacgttcatttctgaacaagaagaaagtctggggtcacttcctacagaaaataaggtggatgacaatcccacctttgttgaacaagaaaaacatgaagttaaatgctctgaagaaacacaggaaatggtcgaagaacaaagtgatgatcagctgcacacagaaagatcaattgaaattgatgaggatatcaaaaagaacactcgtgctttagaaataccagcataccaagacaatccccaggatggaatttctggtgaattgcagacagaagaagcagctggtgtttctacaaaaatggtaactagagatattgatatttcgagtgttgtgctggacaacagaacagttggtactgtgtgtcaggaaaaaatggaggtatcaacaaaaaatgaaaatggaagcttgaggagcagcctgaatgactcaacaaacacaatggctccccaagacgatactctaggagaaggacaatcaaggctcgtgcttgaacctttacctgaagacaaaagtgttgatgtagtttctgagcaagcacctttgttgacagaatcaggaatgactgacgcgaatgacttatctagcgatactacaagtgctcaaaaccctgtgtctacaaaacccactgaatctgccagagttgaggccacatattctactgatattcaactggagaatgaagaagtagataagaaagaagaggaccagcatgcaaacacaaccaaagatgaagtttctaaagagattgtagaaagttcacatataaatctgcagaaaataacaaggcctgaagaaaaatctaatgagctagaaactcaaattaccgaaccagtttgtgacagtcaggcaattttggcccatgaaaaggaaatatctgaagaaaactttccaacagcagtcgaaattcaggctgatggtccaaacatgcagatcaaccaagataagcaagatgaagctgctgacatcgaaactgaaatgaagccagaaaaattaggggaatctaattttcaggaacaccaggacaatggtactgagcaaaagtctcctaaagagactgatgaaggagaccagcaacttgtggccaagaaagagattctgacccaagaaatggatgtgcatgagacagttgaaagacctcagcaagcagttgaaagtcctcagcaaacagtgagcataacatccaatgaagaccaggaactgtttgattcaaaggtccaggaacgtgatctcaatgtagtttcacccagagaagcttctgaggctgaagaaaactttgtggacgtaaccaagccagaattcagcacagatgaagaacaaagtccaaaggctgatgcagaagagaagatttatgacgagaagataaaggacatagagggaactaagaatttaactgatgaagcagcaataaaaactgaagcaccaggagcagcccagaagacacgtaaaaaatatagcctattgtctggcgtgggatcgaaggtaaaacaccaactcgcaaaagtgaagaaagccattgtaggcaaacctgggcacacaaaaccagtatctccgacggcataaaactccagtcaccttagaacatgtacattattgtattgtttgtagtcttgtgagccatttatttcggtggtagtgtttgcgatgggctaggagaaggtcctcttcacaaccatagcattggaattctatgatgttgcacatgaaacaccccccccccccctcgagagtatgttgaagatgtttgtaaatatgtctagtgtgtaaattcaagtttccctgaaactttgaggtagaatcaaggacatgtaattggtcaattgtttgtattcttcgttgaaatgcacaagcagtttgtggtcatgatgcagcttgcagcatattcttcacttcactcaagtgctcctggtctgttcagtccctatctgagtttaaaatgggacaatgcaattccaatcagatcatgatgatgaacaacttgatatgaaaaataaaatgattaaagaatttggcttaaatggatataatgtaatcactaaactaatgaagaagctagataaaagaaaagcaagccttgatgctcaataagac

SEQ ID NO: 53942 - DNA, 13146 bp, Zea Mays
agaccaccagcttttcgagataccaccggcctttttcagggagaagccactccatctttctttttttcctttttccaactttcttcttcttcctcctccttctcattctgatctggaacaatggcgacagaagacgaagagcgagaagcagcagatgggacggaagtcccagtggaagctgtggttttgggaacattccatttgcatgcacacccagaaggcaagctttcatctctgatggatatcaagagcatgggagaaaccatcgattcaactgaaggaacgttgaagattccagaggatcaagttttagtagaagcaccctctgatgtccaacttcctccagaacataatctaaatggtgaagcatcttctttgaatggccatacagacaaagaagagaaggtttcagtcgagcagccacatgacaatgatcaggaagaagcagaactagatcagaacaacagaatcaacaaagaagatgcggctgatggtttaagtcatggagagagcacaacagaagacagctgccttctgaagcacaagaaagatgaagaatccaagggtgatgaacaacaagatttaggtgttacagtggatgatgacttggtgcaggaagacacgctgaaaactgacaatgctattgagcaaacagatgatggtcagcaagaccaggatcaagaacctgaaaaggcaaacgagaacacagaacctgcaagcatcgcaaacaatgacgatgttgagattgtagctgagacacctactggactccaagctcctgtggagtcacgtatgaatgattctgatggcattccggagactattgatgaagagacagaaacagatgaaccagctcaggcagatggcgttgttcatcctgaagacgtggccaaagtagaagatcaacagagtcaacaagatgacacggtggatgcagatgtggccccagaagaggttaaatgtgaagaaactgatcagcaggaagagaagcccaaatctgaagctcatgagccaacgattgatactcgagaagcgttgaatcaagaacctgctgaagaaactgatgactcgatgaataaaaagattgaagaaactgcacaccagaggaacatggcagctccaaaggagacaacactagaacatgaagcaacaatgagtgctacaccagtaaatacacaagtgcaggaccaggaaccattagaagaaatagaagataccgaaaaaggaatccaaccaagcagtggttctggggatgcaattccagaagatcaatctaatttaagtgttactatagacaatgacactgtgaatgaggatacagtgataggtattgagcaacaggatgatggtcagcaagatgaggatctagaaccagaaaaggcaactgaggatacacaacctgcaagcatgacaaacattccccaggttgaggttgtaactgaagcatcttctggagtccaaactcctggggacctgaatctcaacaactctgatgctgttccagatactattgatgcaaacacagaaacagatgagccatctaaagcacactctgttgttcatcctgaaaagaaagagagatttctagaagacgcaaccactgaggaacctacagaagaggtggtcaaagtagaagctcaacagagccagcaagcagatgtgatggatgcaaacatggtgcaggaagaggtgcctaaatctgaacatgctgatgagccagcaactgatgcttttgaagtgctgaatcaagaatctgttgatgagccagcaattcaagcacctgtaactattcaagtgcagaaccaggaaccattagaagaaatagaacttgctgaagcagttgatactgaagcaacagtgcaacaaagcagtgctgcttttgaggagtcggttccagaacatcaatgtaatttaggtgctacacataacacagagcaggaagacacgctggaagctagtgggcaatcaaaaggaggtcaggaataccaagacctaggaccagaaaatgcaactgaaaacacacaacaagcaagcatgacaaatattcttgatgttgaggttataactgaaacaccctctggaattcaaactcccatggagatcaatctggttatctctgatgccattccagatgcaactgatggaaacacagaaacagatgaaccagctaaagcacacactttcgttcatcctgaaaagaatgaagtctttccagaaaatacatttaccaccaaacctacagcagaggtagtcaaagtagaagatcagcagaaccagcaagatgatgcaatggatgcagaagtggtgctggaagaggtgcctaaatctgaacgtgctgatgagccagcaactgatgctcttgaagtgctggaatctgttgaagaaactgatgacccaatgaatgaaaagactgaagaaacaacccaacagagcaacataccagcatctgaggagacaacggcagaatatgacgcgacaagggagccacctgcaaataatcaagtgcagaacaaggaaccagtagatgaaagagaatctactgtagaagaaagagaagttgctgaagcagttgatactgaagcaccagtgcaacaaagcagtgttgcttttgatgaggcagttccagaagagcaccataatttaggtgttgcaaataacacagtgcaagaagacacaatggaagccactggacaaacacaagaaggtcagcaataccaagatctaggaccagaaaatgcagctgagaacacacaacctgcaagcacggaaaacattcctgatgttgaggttataaccaaagcaccttctgaaattcaaagtcctgtggagatcaatctggacatctctgatgccattccagatactaacgatggaaacacagaaacagatgagccagctaaagcaaacactgtcgctcgtcctgatacggaagagagctttgcagaagatacatctactggacctacagaagaggtggtcacactagaagatcaacagagccaacaagttgatgcaaaggatgcagacgtggtgcaggaagaggtgcctacatcggagcacaccgatgagccagcaaccgatgctgttgaagcgctgaatcaagaatctgatgaagaaacagatggcccagtatatgaaaatactgaagaaacaacacaccagagcaacatgcccgcatctgaggagacactaccagaaaatgatgtgacaacaagggagccatctgtaactattcaagcacagaaccaggaatcattagaagaaagagaagttcatgaagcagttgatactgaagcaacagttcaaccaagcagtgcttcttttgaggagtcagttccagaacatcaacataacttaggtgcgacaaatgacacagtgcagcaagacacactggaagcaactaagcaaacaaaaggaggtcagcaataccaggatctaggaccagaaaatgcaactgagaacacacaacctgcaagcatggcaaacattcctgatgttgatgttataaccaaagcatcttctggaattcaaactcctgttgagatcaaccgggacatctctgatgccattccagatgctactgatggaagcacagaaacaactgaaccagctaaagcgcacagtatcattcatcctgaaaagaaagagagctttcaagaagatacatctaccgcagaacctacagaagaggtgatcaaagtagaagatagacagagccagcaagctgaagcaatggatgcagacgtggtgcaggaagatgtgcctaaatctgaacatgctgatgagccaacagctgatgctcttgaagtgctgaatcaagaatctattgaagaaaccaatagcccagtgaatgaagagactgaagaagcaaccaaccagagcaacatgccagcatctgaggagacaataccaaaatatgacgcggcaacaagggatcaacctgtaaatattcaagcgcagaaccaggaaccagtagatgaaggagaagctactgtagaagaaagagaagtggctgaagcagttcatactgaagcaccagtgcaacaaagcagtgttgcttttgaggaggcagttccagaagaccaacataatttaggtgttgcaaataatacagtgcaagaagacatgatggaagctactgggcaaacaaaagaaggtcagcgataccaagatctaggaccagaaaatgcaatagagaacacacaacctgcaagcacggcaaacattcctgaggttgaggttataaccgaagcaccttctggatttcaaactcctgtggagatcaatctggacatctctgatgccattgcagatactactgatggaaacacaggaacagatgaactagttaaagcagaaggtgttatccatcctgaaaacaaagagagttttctagaagatacatctaccacagaacctttagaagaggtggccaatgtagaagatcagcacagccagcaagctgatgcaatggatgcagacgtggtgcaagaagaggtgcctaaatctaaagccgatgagccagcaactgatacccttgaagtgctcaatcaagaatatgctgaagaaaccagtggcccagcgaatgaaaagattgaagaaacagccaaccagagcaacatgctaacatctgaggagacagtaccagagtatgacacagcaacaagggatccacctgtaaatattcaagcacagaaccaggaatcattagaagaaagagaagctactgtagcagaaaatgaagttgctgaagcagttgatactgaagcaccagtgcaacaaagcagtgttgctcttgaggacgcagttccagaagatcaacataacttaggtgctacaaataacacagcgcaggaagacacgcaggacgctattgggcaaacaaaagaaggtcagcaattccatgatctaggaccagaaaatgcaactgagaacacacaacctgcaagcatggccaacattgctgatgttgatgtaacaaccgaagcaccttctggaattcaaactcctgtggagatcaatctggacatctctgatgccattcctgatactactgatggaaacacagaaacagataaactagttaaaacagaaggtgttatccatcctgaaaagaaagagagttttcctgaagatacatctaccgcagaacctacagaagaggtggccaatgtagaagatcagcaaagccagagagctgatgcaatggatgcagacgtggtggatgaagaggtgcctaaatctgaacatgctgatgagccagcaactgatgctcttgaagtgctgaatcaagattatgctgaagaaaccaatgacccagtgaatgaaaagactgaagaaacaggcaaccagagcaacatgccaccatctgaggagacaacaccagaatatgacacgacaacaagggagccacctgtaaatattcaagcacagaaccaggaatcattagaagaaagagaagctactgtagaagaaagtgaagttgccgaagcagttgatactgaagcaccagtgcaacaaagcagtgttgctcttgaggatgcagttccagaagatcaatataacttaattgctacaaataacacagtacaggaagacacacaagaagctattggacaaacaaaagaaggtcaacaataccatgatctaggaccagaaaatgcaactgagaacacagaacctgcaagcacggccaacactcctgatgttgatgtaataaccgaagcaccttctggaattcaaacttctattgagatcaatctggacatctccgatgccattccagatactaccgatggaaatgcaaaaacagatgaactagttaaagtagatggtgttatccttcctgaccacaaagagagcttttctgaagacacatgtgttgtagaacctacagaagagatgatagaagtagatcaacttggtcaacaagctgatgcgatacatgcagaggtattgcaggaagaggtgcctgagatgatagaagtagatcaacttggtcaacaagctgatgtgatacatgcagaggtattgcaggaagaggtgcataaatctgaacagtctgatgagccaggggtcgatgctcaagaagtgctgaaccaagaatctgctgaagaaactgatggcctggtgaatgtaaagactgatgaaactgagcacaagagcaacatggtggtccctgatgacacaattccagaacatgatgcacaaacgagagagccacctgtaaatattcaagaacaaagccgggaatcagtaggagatgctgaagcagtcaatactgaagcagaaatgcaacaaaacagtgttgcttttgaggagacaactccagaaaaccatgtagcaacctcagagccatgttctgaaatccaacatgcacatcatgtggaaccagaggaaatcaatggccctgaagatggcaaagatgatgagatcaccaacatgagcagcagagaatatctagttcgagataatgttctgcagagtggaccaataatagatatacaaccagttcaggagttggaacaaattaaaacggatgaagcttctaaccagactcatgctgttatcttcaatgacctagctcaggaagatgctacagcaacaagtgaaccacaagtgactgaaacagaactaaaggacattgaagccactgaagctgaagaaatcaccaaacttgaccatgttactcattccaaggaacttgcagtagaaaatgattcaacagcagatgaaccacataagggtgaaatccatcaaactcttgaacaagatttagttgaagttaaggacactggaacttaccatgaaaaaacaatatctacttcagaggacacagtacaagataatttgacagaagatgagccaagttttggtagtcaagaagtagatgatgcagagtcaacagaagaaactaagcaaaacatagctgagaatattgcagaagtctctgatgtggcgattgttgatgacgcaattgaacagaatgtgctacagactgaggatatcgttgaaatgcataaacaggagctggaacgagaagaaacagagagaatagaacctgttgaatcagaggaagcttctgatcagaggaatgatgcaccattcgattattcagctcgagaagataatacaaaggaaagtgagatacagcagacagaatcagcaacggaaacaaatgaaattgaacccactgaaattgaagcagttcctcgagaaagcaatacctgtgtttcagaggagccttctcaagaagatcatataaaagaaagtgaaacaagttttgacaatcaagaagtgaacatcacagaatcttcagaagtaaatgatagtcacaaagatataatatctggaggaatctctgacccaagcaacacagcttctgctggggattcatctgaaggaagcaatgtccctgaaggcgagccacctgaacaggctgtgcaggaactgggatcagaggagataaagaacactcaaattgatgaagtgaatgaaacatcccttgaaatgaatgctactgtctttcagataccaagtcaagaagaaaatccagacacaaccaaattgcatgaatcaacagaggtgagcaacattgaagccacagaaatgcacggaaacccccaccaaagtgatctggctgctcagtcagaggagcaaacaacagaaggaatatcaagtggtctgaaaccagaatcaattgaaggtaatgatacagaagccaaaaaatgtcaaagtacctctcaggaaaaaacaatctctgcctctgagtctgtcccagaagatgcaaccactgaaccagatgttgatcaccaacaacttcaggatcaagaatctgccaaactcaaggaaaccgaagctgataaatttcaagaaattgtctcatctaacactctttcttctgaggagttcacatcaacagaaccaagttctgacaccgaagcagacaattcacagttagcagaagaaactgaggacaccgaaattgtgaaaagtaatactgctcttgctgaggcagcagctccagaaacagatgcaactgctgatacatcatctttccatgagacagatctagaagagaacaaggacacaggaacaattgaaacagaggatggtatggtatcaagtgactatacatcagaaaagatggacacggaaaccatggagactgaagcagtccctcatgatagtagtgatgcaaatataaaagaacacactgaagacgatacttcaacaccaaatgccccacatgctggtactgaacctgttcatgagctagaatcagttgaagtcagcgctgacacaacggaacatccaggagagacccatgactctgcttctgatgagcttactccaacagaagaaaatacagcagtaacagaaccatcttttagtacacaggaagtgcagaatctgacatctcaagaaatcaaggacagcgaagatgacaaaactgatgaattctcagatatcaatagctttcctattcctggagaggcagaccaagtaccaagaagtgaaacaactcctgatgtccaagaagtggaagaactgggtttaacagaagaaacaagagacattgaagccatagagcctggagatcagcaagaagacatagtttctacccttgagaagccagaaatagacggtgaaccaagtgctgataatcagcaggttcatgaggacaaactaccagaagtggaagacaataaagcaattgaagctgaagcctccaagcaaagtaatattgccactcctgataatgcagctgaagaaaggaatgaactggaaagtgatccagatccatatgcccagccagcagaacaggtagaattatccaaagacaatgagaacagccagcttgtgaagacagaagaaacctcagaccaaagcaattttgtcgtccttagaaggactacagaagattctgttgcaagagaaattgacccacctgttgccattaaacaagagcaaccagtggaagaaatcaagggtgtcgatgccactgaagctgaagaagactttcgtacaacccaagctgttgcaatagagaaactagcttcagtcaataaaatagcaacagtagaaccgacttatgatattcagcgaatggatgacttggaagcaacagaggaaaagaagcacgctgaagccattaatgaaggagatcaatccaatattgctgtttcagaggaacaaactccaacatataatggagaaacaccagaagatcatcatgtagaatcaaatgaaggaacgatggggaatgaaactgacaatatcattttggcacacggaatcaaagatgaaatacagaagtcagcagaactaaaggacggtccatgtgatttgtctgaaactgttttaacaactcggagaagtgagaacatgattgatgaagataatgttcaaacttatggcaatgatacagtagaggcttcaaacagtatccatcaagtcaaagaagagccagatgctggaaccgaacataattcaagccaaatgataagtgaatgtagtggagagaacgaaactcatgtccaagatagagatgtagacatgtggattctcacagaaggtgtcattgcagaagcatcacaggctttattggaaaatgatcctcaggcagcacaagatactatagaaaaggatgatacaacgaaaagtagtgagccaatcagtgatcacgatagcaggcaacattgtgatgtagaagcacttcaacaacaaagttgtgagacagaggccttatccattttggaacaagatgaggctctgcaaaagattgactcagatcaaaagcagaaagaagttgaggagattgaaagtcagaatgatgaacttcaggtagatgaacagaaacatgaagacaagagggatgatttagccaaagaaccactagtggagtaccagaatttcgaaaacagagcttcaaacaacacaaaagacaatgatgcattcaaggatcctgttcacatcattcaagcatcagagaaagagatcgcagatgaaatagaagaaagtaaagaaatacatgaagacaatgctatttgtcatgataaattacagacaaattctgaaaaggaagagtcacctcaaccgcattccaatgaaccatacaatgtggatgctaaaattgatgatacaacatctctatgcgaagaaataatccatgacaatacaagtataaatcctagagaaattgaagagataggagaaaacaaaggaccagacttcacttctgaaccttctgtagaatcatccatacagaacaatgttgaagactcaagcagtcatcacaaggttgaagatgaaaagctttcaatgtctgagaaaaatgatgtagatactgaagctatgcaagaaataaatgatgaatctggcgcggatataaaccaaacagaacaatgtcaagaagaaattactgcagatgatgttctgcaacttgaaacagaaggaaattcatttgacaagattgaagagactgcttcaaatgaggaaacagagactagtacagcagccactgaagcagtaacgttcaatgaagatattactgacaaggttagcggagctgatggagcaccgtctaacggaagtctcaagacctttactgacactggaagggatattgatgttccattggtaattacaacatcaaaggaagaaagtgtgaacgacactatggaaaacctcaatcttgaccttcctggacatcaggcacaggatggcaacaccgctgaaaaggtgctcagcttagaggaaagagaaagagagatgccttcatcagagaagctccttcaaactgaaccaggagagaatcaaattcccaatgaacaggatgaaaaggacatacgagatgagaatcaaactctaaaagaaaaggatgaagatgacatgcaagatacagaatttggagaggctaagaaagaagttcaacaagaattacctgtctcccattttctgatgaatctaatattgggaaaagagagcagtgatgcaaatgaagattcagaatctgaggctgcaaggaagcaaggtgaagcgacagaagatgacagctgcacgttcatttctgaacaagaagaaagtctggggtcacttcctacagaaaataaggtggatgacaatcccacctttgttgaacaagaaaaacatgaagttaaatgctctgaagaaacacaggaaatggtcgaagaacaaagtgatgatcagctgcacacagaaagatcaattgaaattgatgaggatatcaaaaagaacactcgtgctttagaaataccagcataccaagacaatccccaggatggaatttctggtgaattgcagacagaagaagcagctggtgtttctacaaaaatggtaactagagatattgatatttcgagtgttgtgctggacaacagaacagttggtactgtgtgtcaggaaaaaatggaggtatcaacaaaaaatgaaaatggaagcttgaggagcagcctgaatgactcaacaaacacaatggctccccaagacgatactctaggagaaggacaatcaaggctcgtgcttgaacctttacctgaagacaaaagtgttgatgtagtttctgagcaagcacctttgttgacagaatcaggaatgactgacgcgaatgacttatctagcgatactacaagtgctcaaaaccctgtgtctacaaaacccactgaatctgccagagttgaggccacatattctactgatattcaactggagaatgaagaagtagataagaaagaagaggaccagcatgcaaacacaaccaaagatgaagtttctaaagagattgtagaaagttcacatataaatctgcagaaaataacaaggcctgaagaaaaatctaatgagctagaaactcaaattaccgaaccagtttgtgacagtcaggcaattttggcccatgaaaaggaaatatctgaagaaaactttccaacagcagtcgaaattcaggctgatggtccaaacatgcagatcaaccaagataagcaagatgaagctgctgacatcgaaactgaaatgaagccagaaaaattaggggaatctaattttcaggaacaccaggacaatggtactgagcaaaagtctcctaaagagactgatgaaggagaccagcaacttgtggccaagaaagagattctgacccaagaaatggatgtgcatgagacagttgaaagacctcagcaagcagttgaaagtcctcagcaaacagtgagcataacatccaatgaagaccaggaactgtttgattcaaaggtccaggaacgtgatctcaatgtagtttcacccagagaagcttctgaggctgaagaaaactttgtggacgtaaccaagccagaattcagcacagatgaagaacaaagtccaaaggctgatgcagaagagaagatttatgacgagaagataaaggacatagagggaactaagaatttaactgatgaagcagcaataaaaactgaagcaccaggagcagcccagaagacacgtaaaaaatatagcctattgtctggcgtgggatcgaaggtaaaacaccaactcgcaaaagtgaagaaagccattgtaggcaaacctgggcacacaaaaccagtatctccgacggcataaaactccagtcaccttagaacatgtacattattgtattgtttgtagtcttgtgagccatttatttcggtggtagtgtttgcgatgggctaggagaaggtcctcttcacaaccatagcattggaattctatgatgttgcacatgaaacaccccccccccccctcgagagtatgttgaagatgtttgtaaatatgtctagtgtgtaaattcaagtttccctgaaactttgaggtagaatcaaggacatgtaattggtcaattgtttgtattcttcgttgaaatgcacaagcagtttgtggtcatgatgcagcttgcagcatattcttcacttcactcaagtgctcctggtctgttcagtccctatctgagtttaaaatgggacaatgcaattccaatcagatcatgatgatgaacaacttgatatgaaaaataaaatgattaaagaatttggcttaaatggatataatgtaatcactaaactaatgaagaagctagataaaagaaaagcaagccttgatgctcaataagac

SEQ ID NO: 53943 - DNA, 12767 bp, Zea Mays
agaccaccagcttttcgagataccaccggcctttttcagggagaagccactccatctttctttttttcctttttccaactttcttcttcttcctcctccttctcattctgatctggaacaatggcgacagaagacgaagagcgagaagcagcagatgggacggaagtcccagtggaagctgtggttttgggaacattccatttgcatgcacacccagaaggcaagctttcatctctgatggatatcaagagcatgggagaaaccatcgattcaactgaaggaacgttgaagattccagaggatcaagttttagtagaagcaccctctgatgtccaacttcctccagaacataatctaaatggtgaagcatcttctttgaatggccatacagacaaagaagagaaggtttcagtcgagcagccacatgacaatgatcaggaagaagcagaactagatcagaacaacagaatcaacaaagaagatgcggctgatggtttaagtcatggagagagcacaacagaagacagctgccttctgaagcacaagaaagatgaagaatccaagggtgatgaacaacaagatttaggtgttacagtggatgatgacttggtgcaggaagacacgctgaaaactgacaatgctattgagcaaacagatgatggtcagcaagaccaggatcaagaacctgaaaaggcaaacgagaacacagaacctgcaagcatcgcaaacaatgacgatgttgagattgtagctgagacacctactggactccaagctcctgtggagtcacgtatgaatgattctgatggcattccggagactattgatgaagagacagaaacagatgaaccagctcaggcagatggcgttgttcatcctgaagacgtggccaaagtagaagatcaacagagtcaacaagatgacacggtggatgcagatgtggccccagaagaggttaaatgtgaagaaactgatcagcaggaagagaagcccaaatctgaagctcatgagccaacgattgatactcgagaagcgttgaatcaagaacctgctgaagaaactgatgactcgatgaataaaaagattgaagaaactgcacaccagaggaacatggcagctccaaaggagacaacactagaacatgaagcaacaatgagtgctacaccagtaaatacacaagtgcaggaccaggaaccattagaagaaatagaagataccgaaaaaggaatccaaccaagcagtggttctggggatgcaattccagaagatcaatctaatttaagtgttactatagacaatgacactgtgaatgaggatacagtgataggtattgagcaacaggatgatggtcagcaagatgaggatctagaaccagaaaaggcaactgaggatacacaacctgcaagcatgacaaacattccccaggttgaggttgtaactgaagcatcttctggagtccaaactcctggggacctgaatctcaacaactctgatgctgttccagatactattgatgcaaacacagaaacagatgagccatctaaagcacactctgttgttcatcctgaaaagaaagagagatttctagaagacgcaaccactgaggaacctacagaagaggtggtcaaagtagaagctcaacagagccagcaagcagatgtgatggatgcaaacatggtgcaggaagaggtgcctaaatctgaacatgctgatgagccagcaactgatgcttttgaagtgctgaatcaagaatctgttgatgagccagcaattcaagcacctgtaactattcaagtgcagaaccaggaaccattagaagaaatagaacttgctgaagcagttgatactgaagcaacagtgcaacaaagcagtgctgcttttgaggagtcggttccagaacatcaatgtaatttaggtgctacacataacacagagcaggaagacacgctggaagctagtgggcaatcaaaaggaggtcaggaataccaagacctaggaccagaaaatgcaactgaaaacacacaacaagcaagcatgacaaatattcttgatgttgaggttataactgaaacaccctctggaattcaaactcccatggagatcaatctggttatctctgatgccattccagatgcaactgatggaaacacagaaacagatgaaccagctaaagcacacactttcgttcatcctgaaaagaatgaagtctttccagaaaatacatttaccaccaaacctacagcagaggtagtcaaagtagaagatcagcagaaccagcaagatgatgcaatggatgcagaagtggtgctggaagaggtgcctaaatctgaacgtgctgatgagccagcaactgatgctcttgaagtgctggaatctgttgaagaaactgatgacccaatgaatgaaaagactgaagaaacaacccaacagagcaacataccagcatctgaggagacaacggcagaatatgacgcgacaagggagccacctgcaaataatcaagtgcagaacaaggaaccagtagatgaaagagaatctactgtagaagaaagagaagttgctgaagcagttgatactgaagcaccagtgcaacaaagcagtgttgcttttgatgaggcagttccagaagagcaccataatttaggtgttgcaaataacacagtgcaagaagacacaatggaagccactggacaaacacaagaaggtcagcaataccaagatctaggaccagaaaatgcagctgagaacacacaacctgcaagcacggaaaacattcctgatgttgaggtcagcaataccaggatctaggaccagaaaatgcaactgagaacacacaacctgcaagcatggcaaacattcctgatgttgatgttataaccaaagcatcttctggaattcaaactcctgttgagatcaaccgggacatctctgatgccattccagatgctactgatggaagcacagaaacaactgaaccagctaaagcgcacagtatcattcatcctgaaaagaaagagagctttcaagaagatacatctaccgcagaacctacagaagaggtgatcaaagtagaagatagacagagccagcaagctgaagcaatggatgcagacgtggtgcaggaagatgtgcctaaatctgaacatgctgatgagccaacagctgatgctcttgaagtgctgaatcaagaatctattgaagaaaccaatagcccagtgaatgaagagactgaagaagcaaccaaccagagcaacatgccagcatctgaggagacaataccaaaatatgacgcggcaacaagggatcaacctgtaaatattcaagcgcagaaccaggaaccagtagatgaaggagaagctactgtagaagaaagagaagtggctgaagcagttcatactgaagcaccagtgcaacaaagcagtgttgcttttgaggaggcagttccagaagaccaacataatttaggtgttgcaaataatacagtgcaagaagacatgatggaagctactgggcaaacaaaagaaggtcagcgataccaagatctaggaccagaaaatgcaatagagaacacacaacctgcaagcacggcaaacattcctgaggttgaggttataaccgaagcaccttctggatttcaaactcctgtggagatcaatctggacatctctgatgccattgcagatactactgatggaaacacaggaacagatgaactagttaaagcagaaggtgttatccatcctgaaaacaaagagagttttctagaagatacatctaccacagaacctttagaagaggtggccaatgtagaagatcagcacagccagcaagctgatgcaatggatgcagacgtggtgcaagaagaggtgcctaaatctaaagccgatgagccagcaactgatacccttgaagtgctcaatcaagaatatgctgaagaaaccagtggcccagcgaatgaaaagattgaagaaacagccaaccagagcaacatgctaacatctgaggagacagtaccagagtatgacacagcaacaagggatccacctgtaaatattcaagcacagaaccaggaatcattagaagaaagagaagctactgtagcagaaaatgaagttgctgaagcagttgatactgaagcaccagtgcaacaaagcagtgttgctcttgaggacgcagttccagaagatcaacataacttaggtgctacaaataacacagcgcaggaagacacgcaggacgctattgggcaaacaaaagaaggtcagcaattccatgatctaggaccagaaaatgcaactgagaacacacaacctgcaagcatggccaacattgctgatgttgatgtaacaaccgaagcaccttctggaattcaaactcctgtggagatcaatctggacatctctgatgccattcctgatactactgatggaaacacagaaacagataaactagttaaaacagaaggtgttatccatcctgaaaagaaagagagttttcctgaagatacatctaccgcagaacctacagaagaggtggccaatgtagaagatcagcaaagccagagagctgatgcaatggatgcagacgtggtggatgaagaggtgcctaaatctgaacatgctgatgagccagcaactgatgctcttgaagtgctgaatcaagattatgctgaagaaaccaatgacccagtgaatgaaaagactgaagaaacaggcaaccagagcaacatgccaccatctgaggagacaacaccagaatatgacacgacaacaagggagccacctgtaaatattcaagcacagaaccaggaatcattagaagaaagagaagctactgtagaagaaagtgaagttgccgaagcagttgatactgaagcaccagtgcaacaaagcagtgttgctcttgaggatgcagttccagaagatcaatataacttaattgctacaaataacacagtacaggaagacacacaagaagctattggacaaacaaaagaaggtcaacaataccatgatctaggaccagaaaatgcaactgagaacacagaacctgcaagcacggccaacactcctgatgttgatgtaataaccgaagcaccttctggaattcaaacttctattgagatcaatctggacatctccgatgccattccagatactaccgatggaaatgcaaaaacagatgaactagttaaagtagatggtgttatccttcctgaccacaaagagagcttttctgaagacacatgtgttgtagaacctacagaagagatgatagaagtagatcaacttggtcaacaagctgatgcgatacatgcagaggtattgcaggaagaggtgcctgagatgatagaagtagatcaacttggtcaacaagctgatgtgatacatgcagaggtattgcaggaagaggtgcataaatctgaacagtctgatgagccaggggtcgatgctcaagaagtgctgaaccaagaatctgctgaagaaactgatggcctggtgaatgtaaagactgatgaaactgagcacaagagcaacatggtggtccctgatgacacaattccagaacatgatgcacaaacgagagagccacctgtaaatattcaagaacaaagccgggaatcagtaggagatgctgaagcagtcaatactgaagcagaaatgcaacaaaacagtgttgcttttgaggagacaactccagaaaaccatgtagcaacctcagagccatgttctgaaatccaacatgcacatcatgtggaaccagaggaaatcaatggccctgaagatggcaaagatgatgagatcaccaacatgagcagcagagaatatctagttcgagataatgttctgcagagtggaccaataatagatatacaaccagttcaggagttggaacaaattaaaacggatgaagcttctaaccagactcatgctgttatcttcaatgacctagctcaggaagatgctacagcaacaagtgaaccacaagtgactgaaacagaactaaaggacattgaagccactgaagctgaagaaatcaccaaacttgaccatgttactcattccaaggaacttgcagtagaaaatgattcaacagcagatgaaccacataagggtgaaatccatcaaactcttgaacaagatttagttgaagttaaggacactggaacttaccatgaaaaaacaatatctacttcagaggacacagtacaagataatttgacagaagatgagccaagttttggtagtcaagaagtagatgatgcagagtcaacagaagaaactaagcaaaacatagctgagaatattgcagaagtctctgatgtggcgattgttgatgacgcaattgaacagaatgtgctacagactgaggatatcgttgaaatgcataaacaggagctggaacgagaagaaacagagagaatagaacctgttgaatcagaggaagcttctgatcagaggaatgatgcaccattcgattattcagctcgagaagataatacaaaggaaagtgagatacagcagacagaatcagcaacggaaacaaatgaaattgaacccactgaaattgaagcagttcctcgagaaagcaatacctgtgtttcagaggagccttctcaagaagatcatataaaagaaagtgaaacaagttttgacaatcaagaagtgaacatcacagaatcttcagaagtaaatgatagtcacaaagatataatatctggaggaatctctgacccaagcaacacagcttctgctggggattcatctgaaggaagcaatgtccctgaaggcgagccacctgaacaggctgtgcaggaactgggatcagaggagataaagaacactcaaattgatgaagtgaatgaaacatcccttgaaatgaatgctactgtctttcagataccaagtcaagaagaaaatccagacacaaccaaattgcatgaatcaacagaggtgagcaacattgaagccacagaaatgcacggaaacccccaccaaagtgatctggctgctcagtcagaggagcaaacaacagaaggaatatcaagtggtctgaaaccagaatcaattgaaggtaatgatacagaagccaaaaaatgtcaaagtacctctcaggaaaaaacaatctctgcctctgagtctgtcccagaagatgcaaccactgaaccagatgttgatcaccaacaacttcaggatcaagaatctgccaaactcaaggaaaccgaagctgataaatttcaagaaattgtctcatctaacactctttcttctgaggagttcacatcaacagaaccaagttctgacaccgaagcagacaattcacagttagcagaagaaactgaggacaccgaaattgtgaaaagtaatactgctcttgctgaggcagcagctccagaaacagatgcaactgctgatacatcatctttccatgagacagatctagaagagaacaaggacacaggaacaattgaaacagaggatggtatggtatcaagtgactatacatcagaaaagatggacacggaaaccatggagactgaagcagtccctcatgatagtagtgatgcaaatataaaagaacacactgaagacgatacttcaacaccaaatgccccacatgctggtactgaacctgttcatgagctagaatcagttgaagtcagcgctgacacaacggaacatccaggagagacccatgactctgcttctgatgagcttactccaacagaagaaaatacagcagtaacagaaccatcttttagtacacaggaagtgcagaatctgacatctcaagaaatcaaggacagcgaagatgacaaaactgatgaattctcagatatcaatagctttcctattcctggagaggcagaccaagtaccaagaagtgaaacaactcctgatgtccaagaagtggaagaactgggtttaacagaagaaacaagagacattgaagccatagagcctggagatcagcaagaagacatagtttctacccttgagaagccagaaatagacggtgaaccaagtgctgataatcagcaggttcatgaggacaaactaccagaagtggaagacaataaagcaattgaagctgaagcctccaagcaaagtaatattgccactcctgataatgcagctgaagaaaggaatgaactggaaagtgatccagatccatatgcccagccagcagaacaggtagaattatccaaagacaatgagaacagccagcttgtgaagacagaagaaacctcagaccaaagcaattttgtcgtccttagaaggactacagaagattctgttgcaagagaaattgacccacctgttgccattaaacaagagcaaccagtggaagaaatcaagggtgtcgatgccactgaagctgaagaagactttcgtacaacccaagctgttgcaatagagaaactagcttcagtcaataaaatagcaacagtagaaccgacttatgatattcagcgaatggatgacttggaagcaacagaggaaaagaagcacgctgaagccattaatgaaggagatcaatccaatattgctgtttcagaggaacaaactccaacatataatggagaaacaccagaagatcatcatgtagaatcaaatgaaggaacgatggggaatgaaactgacaatatcattttggcacacggaatcaaagatgaaatacagaagtcagcagaactaaaggacggtccatgtgatttgtctgaaactgttttaacaactcggagaagtgagaacatgattgatgaagataatgttcaaacttatggcaatgatacagtagaggcttcaaacagtatccatcaagtcaaagaagagccagatgctggaaccgaacataattcaagccaaatgataagtgaatgtagtggagagaacgaaactcatgtccaagatagagatgtagacatgtggattctcacagaaggtgtcattgcagaagcatcacaggctttattggaaaatgatcctcaggcagcacaagatactatagaaaaggatgatacaacgaaaagtagtgagccaatcagtgatcacgatagcaggcaacattgtgatgtagaagcacttcaacaacaaagttgtgagacagaggccttatccattttggaacaagatgaggctctgcaaaagattgactcagatcaaaagcagaaagaagttgaggagattgaaagtcagaatgatgaacttcaggtagatgaacagaaacatgaagacaagagggatgatttagccaaagaaccactagtggagtaccagaatttcgaaaacagagcttcaaacaacacaaaagacaatgatgcattcaaggttgaacaaacagaggcagccaatagtgagattctcaagaataaagccctacatatatccaaggaatccaccccaagcattatggctatgaaggttgaaaacattaaggaaacaagtgaaggaactgaagaagatgatgctgccaaaaatgataacaaagatgaacaggagaatgcagaaaatgttgatatagtatcaaaaacttctactaatgaacaaggccaaacaactgatgaaattagaaaagaagaggatcctgttcacatcattcaagcatcagagaaagagatcgcagatgaaatagaagaaagtaaagaaatacatgaagacaatgctatttgtcatgataaattacagacaaattctgaaaaggaagagtcacctcaaccgcattccaatgaaccatacaatgtggatgctaaaattgatgatacaacatctctatgcgaagaaataatccatgacaatacaagtataaatcctagagaaattgaagagataggagaaaacaaaggaccagacttcacttctgaaccttctgtagaatcatccatacagaacaatgttgaagactcaagcagtcatcacaaggttgaagatgaaaagctttcaatgtctgagaaaaatgatgtagatactgaagctatgcaagaaataaatgatgaatctggcgcggatataaaccaaacagaacaatgtcaagaagaaattactgcagatgatgttctgcaacttgaaacagaaggaaattcatttgacaagattgaagagactgcttcaaatgaggaaacagagactagtacagcagccactgaagcagtaacgttcaatgaagatattactgacaaggttagcggagctgatggagcaccgtctaacggaagtctcaagacctttactgacactggaagggatattgatgttccattggtaattacaacatcaaaggaagaaagtgtgaacgacactatggaaaacctcaatcttgaccttcctggacatcaggcacaggatggcaacaccgctgaaaaggtgctcagcttagaggaaagagaaagagagatgccttcatcagagaagctccttcaaactgaaccaggagagaatcaaattcccaatgaacaggatgaaaaggacatacgagatgagaatcaaactctaaaagaaaaggatgaagatgacatgcaagatacagaatttggagaggctaagaaagaagttcaacaagaattacctgtctcccattttctgatgaatctaatattgggaaaagagagcagtgatgcaaatgaagattcagaatctgaggctgcaaggaagcaaggtgaagcgacagaagatgacagctgcacgttcatttctgaacaagaagaaagtctggggtcacttcctacagaaaataaggtggatgacaatcccacctttgttgaacaagaaaaacatgaagttaaatgctctgaagaaacacaggaaatggtcgaagaacaaagtgatgatcagctgcacacagaaagatcaattgaaattgatgaggatatcaaaaagaacactcgtgctttagaaataccagcataccaagacaatccccaggatggaatttctggtgaattgcagacagaagaagcagctggtgtttctacaaaaatggtaactagagatattgatatttcgagtgttgtgctggacaacagaacagttggtactgtgtgtcaggaaaaaatggaggtatcaacaaaaaatgaaaatggaagcttgaggagcagcctgaatgactcaacaaacacaatggctccccaagacgatactctaggagaaggacaatcaaggctcgtgcttgaacctttacctgaagacaaaagtgttgatgtagtttctgagcaagcacctttgttgacagaatcaggaatgactgacgcgaatgacttatctagcgatactacaagtgctcaaaaccctgtgtctacaaaacccactgaatctgccagagttgaggccacatattctactgatattcaactggagaatgaagaagtagataagaaagaagaggaccagcatgcaaacacaaccaaagatgaagtttctaaagagattgtagaaagttcacatataaatctgcagaaaataacaaggcctgaagaaaaatctaatgagctagaaactcaaattaccgaaccagtttgtgacagtcaggcaattttggcccatgaaaaggaaatatctgaagaaaactttccaacagcagtcgaaattcaggctgatggtccaaacatgcagatcaaccaagataagcaagatgaagctgctgacatcgaaactgaaatgaagccagaaaaattaggggaatctaattttcaggaacaccaggacaatggtactgagcaaaagtctcctaaagagactgatgaaggagaccagcaacttgtggccaagaaagagattctgacccaagaaatggatgtgcatgagacagttgaaagacctcagcaagcagttgaaagtcctcagcaaacagtgagcataacatccaatgaagaccaggaactgtttgattcaaaggtccaggaacgtgatctcaatgtagtttcacccagagaagcttctgaggctgaagaaaactttgtggacgtaaccaagccagaattcagcacagatgaagaacaaagtccaaaggctgatgcagaagagaagatttatgacgagaagataaaggacatagagggaactaagaatttaactgatgaagcagcaataaaaactgaagcaccaggagcagcccagaagacacgtaaaaaatatagcctattgtctggcgtgggatcgaaggtaaaacaccaactcgcaaaagtgaagaaagccattgtaggcaaacctgggcacacaaaaccagtatctccgacggcataaaactccagtcaccttagaacatgtacattattgtattgtttgtagtcttgtgagccatttatttcggtggtagtgtttgcgatgggctaggagaaggtcctcttcacaaccatagcattggaattctatgatgttgcacatgaaacaccccccccccccctcgagagtatgttgaagatgtttgtaaatatgtctagtgtgtaaattcaagtttccctgaaactttgaggtagaatcaaggacatgtaattggtcaattgtttgtattcttcgttgaaatgcacaagcagtttgtggtcatgatgcagcttgcagcatattcttcacttcactcaagtgctcctggtctgttcagtccctatctgagtttaaaatgggacaatgcaattccaatcagatcatgatgatgaacaacttgatatgaaaaataaaatgattaaagaatttggcttaaatggatataatgtaatcactaaactaatgaagaagctagataaaagaaaagcaagccttgatgctcaataagac

SEQ ID NO: 53944 - DNA, 12732 bp, Zea Mays
agaccaccagcttttcgagataccaccggcctttttcagggagaagccactccatctttctttttttcctttttccaactttcttcttcttcctcctccttctcattctgatctggaacaatggcgacagaagacgaagagcgagaagcagcagatgggacggaagtcccagtggaagctgtggttttgggaacattccatttgcatgcacacccagaaggcaagctttcatctctgatggatatcaagagcatgggagaaaccatcgattcaactgaaggaacgttgaagattccagaggatcaagttttagtagaagcaccctctgatgtccaacttcctccagaacataatctaaatggtgaagcatcttctttgaatggccatacagacaaagaagagaaggtttcagtcgagcagccacatgacaatgatcaggaagaagcagaactagatcagaacaacagaatcaacaaagaagatgcggctgatggtttaagtcatggagagagcacaacagaagacagctgccttctgaagcacaagaaagatgaagaatccaagggtgatgaacaacaagatttaggtgttacagtggatgatgacttggtgcaggaagacacgctgaaaactgacaatgctattgagcaaacagatgatggtcagcaagaccaggatcaagaacctgaaaaggcaaacgagaacacagaacctgcaagcatcgcaaacaatgacgatgttgagattgtagctgagacacctactggactccaagctcctgtggagtcacgtatgaatgattctgatggcattccggagactattgatgaagagacagaaacagatgaaccagctcaggcagatggcgttgttcatcctgaagacgtggccaaagtagaagatcaacagagtcaacaagatgacacggtggatgcagatgtggccccagaagaggttaaatgtgaagaaactgatcagcaggaagagaagcccaaatctgaagctcatgagccaacgattgatactcgagaagcgttgaatcaagaacctgctgaagaaactgatgactcgatgaataaaaagattgaagaaactgcacaccagaggaacatggcagctccaaaggagacaacactagaacatgaagcaacaatgagtgctacaccagtaaatacacaagtgcaggaccaggaaccattagaagaaatagaagataccgaaaaaggaatccaaccaagcagtggttctggggatgcaattccagaagatcaatctaatttaagtgttactatagacaatgacactgtgaatgaggatacagtgataggtattgagcaacaggatgatggtcagcaagatgaggatctagaaccagaaaaggcaactgaggatacacaacctgcaagcatgacaaacattccccaggttgaggttgtaactgaagcatcttctggagtccaaactcctggggacctgaatctcaacaactctgatgctgttccagatactattgatgcaaacacagaaacagatgagccatctaaagcacactctgttgttcatcctgaaaagaaagagagatttctagaagacgcaaccactgaggaacctacagaagaggtggtcaaagtagaagctcaacagagccagcaagcagatgtgatggatgcaaacatggtgcaggaagaggtgcctaaatctgaacatgctgatgagccagcaactgatgcttttgaagtgctgaatcaagaatctgttgatgagccagcaattcaagcacctgtaactattcaagtgcagaaccaggaaccattagaagaaatagaacttgctgaagcagttgatactgaagcaacagtgcaacaaagcagtgctgcttttgaggagtcggttccagaacatcaatgtaatttaggtgctacacataacacagagcaggaagacacgctggaagctagtgggcaatcaaaaggaggtcaggaataccaagacctaggaccagaaaatgcaactgaaaacacacaacaagcaagcatgacaaatattcttgatgttgaggttataactgaaacaccctctggaattcaaactcccatggagatcaatctggttatctctgatgccattccagatgcaactgatggaaacacagaaacagatgaaccagctaaagcacacactttcgttcatcctgaaaagaatgaagtctttccagaaaatacatttaccaccaaacctacagcagaggtagtcaaagtagaagatcagcagaaccagcaagatgatgcaatggatgcagaagtggtgctggaagaggtgcctaaatctgaacgtgctgatgagccagcaactgatgctcttgaagtgctggaatctgttgaagaaactgatgacccaatgaatgaaaagactgaagaaacaacccaacagagcaacataccagcatctgaggagacaacggcagaatatgacgcgacaagggagccacctgcaaataatcaagtgcagaacaaggaaccagtagatgaaagagaatctactgtagaagaaagagaagttgctgaagcagttgatactgaagcaccagtgcaacaaagcagtgttgcttttgatgaggcagttccagaagagcaccataatttaggtgttgcaaataacacagtgcaagaagacacaatggaagccactggacaaacacaagaaggtcagcaataccaagatctaggaccagaaaatgcagctgagaacacacaacctgcaagcacggaaaacattcctgatgttgaggttataaccaaagcaccttctgaaattcaaagtcctgtggagatcaatctggacatctctgatgccattccagatactaacgatggaaacacagaaacagatgagccagctaaagcaaacactgtcgctcgtcctgatacggaagagagctttgcagaagatacatctactggacctacagaagaggtggtcacactagaagatcaacagagccaacaagttgatgcaaaggatgcagacgtggtgcaggaagaggtgcctacatcggagcacaccgatgagccagcaaccgatgctgttgaagcgctgaatcaagaatctgatgaagaaacagatggcccagtatatgaaaatactgaagaaacaacacaccagagcaacatgcccgcatctgaggagacactaccagaaaatgatgtgacaacaagggagccatctgtaactattcaagcacagaaccaggaatcattagaagaaagagaagttcatgaagcagttgatactgaagcaacagttcaaccaagcagtgcttcttttgaggagtcagttccagaacatcaacataacttaggtgcgacaaatgacacagtgcagcaagacacactggaagcaactaagcaaacaaaaggaggtcagcaataccaggatctaggaccagaaaatgcaactgagaacacacaacctgcaagcatggcaaacattcctgatgttgatgttataaccaaagcatcttctggaattcaaactcctgttgagatcaaccgggacatctctgatgccattccagatgctactgatggaagcacagaaacaactgaaccagctaaagcgcacagtatcattcatcctgaaaagaaagagagctttcaagaagatacatctaccgcagaacctacagaagaggtgatcaaagtagaagatagacagagccagcaagctgaagcaatggatgcagacgtggtgcaggaagatgtgcctaaatctgaacatgctgatgagccaacagctgatgctcttgaagtgctgaatcaagaatctattgaagaaaccaatagcccagtgaatgaagagactgaagaagcaaccaaccagagcaacatgccagcatctgaggagacaataccaaaatatgacgcggcaacaagggatcaacctgtaaatattcaagcgcagaaccaggaaccagtagatgaaggagaagctactgtagaagaaagagaagtggctgaagcagttcatactgaagcaccagtgcaacaaagcagtgttgcttttgaggaggcagttccagaagaccaacataatttaggtgttgcaaataatacagtgcaagaagacatgatggaagctactgggcaaacaaaagaaggtcagcgataccaagatctaggaccagaaaatgcaatagagaacacacaacctgcaagcacggcaaacattcctgaggttgaggttataaccgaagcaccttctggatttcaaactcctgtggagatcaatctggacatctctgatgccattgcagatactactgatggaaacacaggaacagatgaactagttaaagcagaaggtgttatccatcctgaaaacaaagagagttttctagaagatacatctaccacagaacctttagaagaggtggccaatgtagaagatcagcacagccagcaagctgatgcaatggatgcagacgtggtgcaagaagaggtggccaatgtagaagatcagcaaagccagagagctgatgcaatggatgcagacgtggtggatgaagaggtgcctaaatctgaacatgctgatgagccagcaactgatgctcttgaagtgctgaatcaagattatgctgaagaaaccaatgacccagtgaatgaaaagactgaagaaacaggcaaccagagcaacatgccaccatctgaggagacaacaccagaatatgacacgacaacaagggagccacctgtaaatattcaagcacagaaccaggaatcattagaagaaagagaagctactgtagaagaaagtgaagttgccgaagcagttgatactgaagcaccagtgcaacaaagcagtgttgctcttgaggatgcagttccagaagatcaatataacttaattgctacaaataacacagtacaggaagacacacaagaagctattggacaaacaaaagaaggtcaacaataccatgatctaggaccagaaaatgcaactgagaacacagaacctgcaagcacggccaacactcctgatgttgatgtaataaccgaagcaccttctggaattcaaacttctattgagatcaatctggacatctccgatgccattccagatactaccgatggaaatgcaaaaacagatgaactagttaaagtagatggtgttatccttcctgaccacaaagagagcttttctgaagacacatgtgttgtagaacctacagaagagatgatagaagtagatcaacttggtcaacaagctgatgcgatacatgcagaggtattgcaggaagaggtgcctgagatgatagaagtagatcaacttggtcaacaagctgatgtgatacatgcagaggtattgcaggaagaggtgcataaatctgaacagtctgatgagccaggggtcgatgctcaagaagtgctgaaccaagaatctgctgaagaaactgatggcctggtgaatgtaaagactgatgaaactgagcacaagagcaacatggtggtccctgatgacacaattccagaacatgatgcacaaacgagagagccacctgtaaatattcaagaacaaagccgggaatcagtaggagatgctgaagcagtcaatactgaagcagaaatgcaacaaaacagtgttgcttttgaggagacaactccagaaaaccatgtagcaacctcagagccatgttctgaaatccaacatgcacatcatgtggaaccagaggaaatcaatggccctgaagatggcaaagatgatgagatcaccaacatgagcagcagagaatatctagttcgagataatgttctgcagagtggaccaataatagatatacaaccagttcaggagttggaacaaattaaaacggatgaagcttctaaccagactcatgctgttatcttcaatgacctagctcaggaagatgctacagcaacaagtgaaccacaagtgactgaaacagaactaaaggacattgaagccactgaagctgaagaaatcaccaaacttgaccatgttactcattccaaggaacttgcagtagaaaatgattcaacagcagatgaaccacataagggtgaaatccatcaaactcttgaacaagatttagttgaagttaaggacactggaacttaccatgaaaaaacaatatctacttcagaggacacagtacaagataatttgacagaagatgagccaagttttggtagtcaagaagtagatgatgcagagtcaacagaagaaactaagcaaaacatagctgagaatattgcagaagtctctgatgtggcgattgttgatgacgcaattgaacagaatgtgctacagactgaggatatcgttgaaatgcataaacaggagctggaacgagaagaaacagagagaatagaacctgttgaatcagaggaagcttctgatcagaggaatgatgcaccattcgattattcagctcgagaagataatacaaaggaaagtgagatacagcagacagaatcagcaacggaaacaaatgaaattgaacccactgaaattgaagcagttcctcgagaaagcaatacctgtgtttcagaggagccttctcaagaagatcatataaaagaaagtgaaacaagttttgacaatcaagaagtgaacatcacagaatcttcagaagtaaatgatagtcacaaagatataatatctggaggaatctctgacccaagcaacacagcttctgctggggattcatctgaaggaagcaatgtccctgaaggcgagccacctgaacaggctgtgcaggaactgggatcagaggagataaagaacactcaaattgatgaagtgaatgaaacatcccttgaaatgaatgctactgtctttcagataccaagtcaagaagaaaatccagacacaaccaaattgcatgaatcaacagaggtgagcaacattgaagccacagaaatgcacggaaacccccaccaaagtgatctggctgctcagtcagaggagcaaacaacagaaggaatatcaagtggtctgaaaccagaatcaattgaaggtaatgatacagaagccaaaaaatgtcaaagtacctctcaggaaaaaacaatctctgcctctgagtctgtcccagaagatgcaaccactgaaccagatgttgatcaccaacaacttcaggatcaagaatctgccaaactcaaggaaaccgaagctgataaatttcaagaaattgtctcatctaacactctttcttctgaggagttcacatcaacagaaccaagttctgacaccgaagcagacaattcacagttagcagaagaaactgaggacaccgaaattgtgaaaagtaatactgctcttgctgaggcagcagctccagaaacagatgcaactgctgatacatcatctttccatgagacagatctagaagagaacaaggacacaggaacaattgaaacagaggatggtatggtatcaagtgactatacatcagaaaagatggacacggaaaccatggagactgaagcagtccctcatgatagtagtgatgcaaatataaaagaacacactgaagacgatacttcaacaccaaatgccccacatgctggtactgaacctgttcatgagctagaatcagttgaagtcagcgctgacacaacggaacatccaggagagacccatgactctgcttctgatgagcttactccaacagaagaaaatacagcagtaacagaaccatcttttagtacacaggaagtgcagaatctgacatctcaagaaatcaaggacagcgaagatgacaaaactgatgaattctcagatatcaatagctttcctattcctggagaggcagaccaagtaccaagaagtgaaacaactcctgatgtccaagaagtggaagaactgggtttaacagaagaaacaagagacattgaagccatagagcctggagatcagcaagaagacatagtttctacccttgagaagccagaaatagacggtgaaccaagtgctgataatcagcaggttcatgaggacaaactaccagaagtggaagacaataaagcaattgaagctgaagcctccaagcaaagtaatattgccactcctgataatgcagctgaagaaaggaatgaactggaaagtgatccagatccatatgcccagccagcagaacaggtagaattatccaaagacaatgagaacagccagcttgtgaagacagaagaaacctcagaccaaagcaattttgtcgtccttagaaggactacagaagattctgttgcaagagaaattgacccacctgttgccattaaacaagagcaaccagtggaagaaatcaagggtgtcgatgccactgaagctgaagaagactttcgtacaacccaagctgttgcaatagagaaactagcttcagtcaataaaatagcaacagtagaaccgacttatgatattcagcgaatggatgacttggaagcaacagaggaaaagaagcacgctgaagccattaatgaaggagatcaatccaatattgctgtttcagaggaacaaactccaacatataatggagaaacaccagaagatcatcatgtagaatcaaatgaaggaacgatggggaatgaaactgacaatatcattttggcacacggaatcaaagatgaaatacagaagtcagcagaactaaaggacggtccatgtgatttgtctgaaactgttttaacaactcggagaagtgagaacatgattgatgaagataatgttcaaacttatggcaatgatacagtagaggcttcaaacagtatccatcaagtcaaagaagagccagatgctggaaccgaacataattcaagccaaatgataagtgaatgtagtggagagaacgaaactcatgtccaagatagagatgtagacatgtggattctcacagaaggtgtcattgcagaagcatcacaggctttattggaaaatgatcctcaggcagcacaagatactatagaaaaggatgatacaacgaaaagtagtgagccaatcagtgatcacgatagcaggcaacattgtgatgtagaagcacttcaacaacaaagttgtgagacagaggccttatccattttggaacaagatgaggctctgcaaaagattgactcagatcaaaagcagaaagaagttgaggagattgaaagtcagaatgatgaacttcaggtagatgaacagaaacatgaagacaagagggatgatttagccaaagaaccactagtggagtaccagaatttcgaaaacagagcttcaaacaacacaaaagacaatgatgcattcaaggttgaacaaacagaggcagccaatagtgagattctcaagaataaagccctacatatatccaaggaatccaccccaagcattatggctatgaaggttgaaaacattaaggaaacaagtgaaggaactgaagaagatgatgctgccaaaaatgataacaaagatgaacaggagaatgcagaaaatgttgatatagtatcaaaaacttctactaatgaacaaggccaaacaactgatgaaattagaaaagaagaggatcctgttcacatcattcaagcatcagagaaagagatcgcagatgaaatagaagaaagtaaagaaatacatgaagacaatgctatttgtcatgataaattacagacaaattctgaaaaggaagagtcacctcaaccgcattccaatgaaccatacaatgtggatgctaaaattgatgatacaacatctctatgcgaagaaataatccatgacaatacaagtataaatcctagagaaattgaagagataggagaaaacaaaggaccagacttcacttctgaaccttctgtagaatcatccatacagaacaatgttgaagactcaagcagtcatcacaaggttgaagatgaaaagctttcaatgtctgagaaaaatgatgtagatactgaagctatgcaagaaataaatgatgaatctggcgcggatataaaccaaacagaacaatgtcaagaagaaattactgcagatgatgttctgcaacttgaaacagaaggaaattcatttgacaagattgaagagactgcttcaaatgaggaaacagagactagtacagcagccactgaagcagtaacgttcaatgaagatattactgacaaggttagcggagctgatggagcaccgtctaacggaagtctcaagacctttactgacactggaagggatattgatgttccattggtaattacaacatcaaaggaagaaagtgtgaacgacactatggaaaacctcaatcttgaccttcctggacatcaggcacaggatggcaacaccgctgaaaaggtgctcagcttagaggaaagagaaagagagatgccttcatcagagaagctccttcaaactgaaccaggagagaatcaaattcccaatgaacaggatgaaaaggacatacgagatgagaatcaaactctaaaagaaaaggatgaagatgacatgcaagatacagaatttggagaggctaagaaagaagttcaacaagaattacctgtctcccattttctgatgaatctaatattgggaaaagagagcagtgatgcaaatgaagattcagaatctgaggctgcaaggaagcaaggtgaagcgacagaagatgacagctgcacgttcatttctgaacaagaagaaagtctggggtcacttcctacagaaaataaggtggatgacaatcccacctttgttgaacaagaaaaacatgaagttaaatgctctgaagaaacacaggaaatggtcgaagaacaaagtgatgatcagctgcacacagaaagatcaattgaaattgatgaggatatcaaaaagaacactcgtgctttagaaataccagcataccaagacaatccccaggatggaatttctggtgaattgcagacagaagaagcagctggtgtttctacaaaaatggtaactagagatattgatatttcgagtgttgtgctggacaacagaacagttggtactgtgtgtcaggaaaaaatggaggtatcaacaaaaaatgaaaatggaagcttgaggagcagcctgaatgactcaacaaacacaatggctccccaagacgatactctaggagaaggacaatcaaggctcgtgcttgaacctttacctgaagacaaaagtgttgatgtagtttctgagcaagcacctttgttgacagaatcaggaatgactgacgcgaatgacttatctagcgatactacaagtgctcaaaaccctgtgtctacaaaacccactgaatctgccagagttgaggccacatattctactgatattcaactggagaatgaagaagtagataagaaagaagaggaccagcatgcaaacacaaccaaagatgaagtttctaaagagattgtagaaagttcacatataaatctgcagaaaataacaaggcctgaagaaaaatctaatgagctagaaactcaaattaccgaaccagtttgtgacagtcaggcaattttggcccatgaaaaggaaatatctgaagaaaactttccaacagcagtcgaaattcaggctgatggtccaaacatgcagatcaaccaagataagcaagatgaagctgctgacatcgaaactgaaatgaagccagaaaaattaggggaatctaattttcaggaacaccaggacaatggtactgagcaaaagtctcctaaagagactgatgaaggagaccagcaacttgtggccaagaaagagattctgacccaagaaatggatgtgcatgagacagttgaaagacctcagcaagcagttgaaagtcctcagcaaacagtgagcataacatccaatgaagaccaggaactgtttgattcaaaggtccaggaacgtgatctcaatgtagtttcacccagagaagcttctgaggctgaagaaaactttgtggacgtaaccaagccagaattcagcacagatgaagaacaaagtccaaaggctgatgcagaagagaagatttatgacgagaagataaaggacatagagggaactaagaatttaactgatgaagcagcaataaaaactgaagcaccaggagcagcccagaagacacgtaaaaaatatagcctattgtctggcgtgggatcgaaggtaaaacaccaactcgcaaaagtgaagaaagccattgtaggcaaacctgggcacacaaaaccagtatctccgacggcataaaactccagtcaccttagaacatgtacattattgtattgtttgtagtcttgtgagccatttatttcggtggtagtgtttgcgatgggctaggagaaggtcctcttcacaaccatagcattggaattctatgatgttgcacatgaaacaccccccccccccctcgagagtatgttgaagatgtttgtaaatatgtctagtgtgtaaattcaagtttccctgaaactttgaggtagaatcaaggacatgtaattggtcaattgtttgtattcttcgttgaaatgcacaagcagtttgtggtcatgatgcagcttgcagcatattcttcacttcactcaagtgctcctggtctgttcagtccctatctgagtttaaaatgggacaatgcaattccaatcagatcatgatgatgaacaacttgatatgaaaaataaaatgattaaagaatttggcttaaatggatataatgtaatcactaaactaatgaagaagctagataaaagaaaagcaagccttgatgctcaataagac

SEQ ID NO: 53945 - DNA, 12594 bp, Zea Mays
agaccaccagcttttcgagataccaccggcctttttcagggagaagccactccatctttctttttttcctttttccaactttcttcttcttcctcctccttctcattctgatctggaacaatggcgacagaagacgaagagcgagaagcagcagatgggacggaagtcccagtggaagctgtggttttgggaacattccatttgcatgcacacccagaaggcaagctttcatctctgatggatatcaagagcatgggagaaaccatcgattcaactgaaggaacgttgaagattccagaggatcaagttttagtagaagcaccctctgatgtccaacttcctccagaacataatctaaatggtgaagcatcttctttgaatggccatacagacaaagaagagaaggtttcagtcgagcagccacatgacaatgatcaggaagaagcagaactagatcagaacaacagaatcaacaaagaagatgcggctgatggtttaagtcatggagagagcacaacagaagacagctgccttctgaagcacaagaaagatgaagaatccaagggtgatgaacaacaagatttaggtgttacagtggatgatgacttggtgcaggaagacacgctgaaaactgacaatgctattgagcaaacagatgatggtcagcaagaccaggatcaagaacctgaaaaggcaaacgagaacacagaacctgcaagcatcgcaaacaatgacgatgttgagattgtagctgagacacctactggactccaagctcctgtggagtcacgtatgaatgattctgatggcattccggagactattgatgaagagacagaaacagatgaaccagctcaggcagatggcgttgttcatcctgaagacgtggccaaagtagaagatcaacagagtcaacaagatgacacggtggatgcagatgtggccccagaagaggttaaatgtgaagaaactgatcagcaggaagagaagcccaaatctgaagctcatgagccaacgattgatactcgagaagcgttgaatcaagaacctgctgaagaaactgatgactcgatgaataaaaagattgaagaaactgcacaccagaggaacatggcagctccaaaggagacaacactagaacatgaagcaacaatgagtgctacaccagtaaatacacaagtgcaggaccaggaaccattagaagaaatagaagataccgaaaaaggaatccaaccaagcagtggttctggggatgcaattccagaagatcaatctaatttaagtgttactatagacaatgacactgtgaatgaggatacagtgataggtattgagcaacaggatgatggtcagcaagatgaggatctagaaccagaaaaggcaactgaggatacacaacctgcaagcatgacaaacattccccaggttgaggttgtaactgaagcatcttctggagtccaaactcctggggacctgaatctcaacaactctgatgctgttccagatactattgatgcaaacacagaaacagatgagccatctaaagcacactctgttgttcatcctgaaaagaaagagagatttctagaagacgcaaccactgaggaacctacagaagaggtggtcaaagtagaagctcaacagagccagcaagcagatgtgatggatgcaaacatggtgcaggaagaggtgcctaaatctgaacatgctgatgagccagcaactgatgcttttgaagtgctgaatcaagaatctgttgatgagccagcaattcaagcacctgtaactattcaagtgcagaaccaggaaccattagaagaaatagaacttgctgaagcagttgatactgaagcaacagtgcaacaaagcagtgctgcttttgaggagtcggttccagaacatcaatgtaatttaggtgctacacataacacagagcaggaagacacgctggaagctagtgggcaatcaaaaggaggtcaggaataccaagacctaggaccagaaaatgcaactgaaaacacacaacaagcaagcatgacaaatattcttgatgttgaggttataactgaaacaccctctggaattcaaactcccatggagatcaatctggttatctctgatgccattccagatgcaactgatggaaacacagaaacagatgaaccagctaaagcacacactttcgttcatcctgaaaagaatgaagtctttccagaaaatacatttaccaccaaacctacagcagaggtagtcaaagtagaagatcagcagaaccagcaagatgatgcaatggatgcagaagtggtgctggaagaggtgcctaaatctgaacgtgctgatgagccagcaactgatgctcttgaagtgctggaatctgttgaagaaactgatgacccaatgaatgaaaagactgaagaaacaacccaacagagcaacataccagcatctgaggagacaacggcagaatatgacgcgacaagggagccacctgcaaataatcaagtgcagaacaaggaaccagtagatgaaagagaatctactgtagaagaaagagaagttgctgaagcagttgatactgaagcaccagtgcaacaaagcagtgttgcttttgatgaggcagttccagaagagcaccataatttaggtgttgcaaataacacagtgcaagaagacacaatggaagccactggacaaacacaagaaggtcagcaataccaagatctaggaccagaaaatgcagctgagaacacacaacctgcaagcacggaaaacattcctgatgttgaggttataaccaaagcaccttctgaaattcaaagtcctgtggagatcaatctggacatctctgatgccattccagatactaacgatggaaacacagaaacagatgagccagctaaagcaaacactgtcgctcgtcctgatacggaagagagctttgcagaagatacatctactggacctacagaagaggtggtcacactagaagatcaacagagccaacaagttgatgcaaaggatgcagacgtggtgcaggaagaggtgcctacatcggagcacaccgatgagccagcaaccgatgctgttgaagcgctgaatcaagaatctgatgaagaaacagatggcccagtatatgaaaatactgaagaaacaacacaccagagcaacatgcccgcatctgaggagacactaccagaaaatgatgtgacaacaagggagccatctgtaactattcaagcacagaaccaggaatcattagaagaaagagaagttcatgaagcagttgatactgaagcaacagttcaaccaagcagtgcttcttttgaggagtcagttccagaacatcaacataacttaggtgcgacaaatgacacagtgcagcaagacacactggaagcaactaagcaaacaaaaggaggtcagcaataccaggatctaggaccagaaaatgcaactgagaacacacaacctgcaagcatggcaaacattcctgatgttgatgttataaccaaagcatcttctggaattcaaactcctgttgagatcaaccgggacatctctgatgccattccagatgctactgatggaagcacagaaacaactgaaccagctaaagcgcacagtatcattcatcctgaaaagaaagagagctttcaagaagatacatctaccgcagaacctacagaagaggtgatcaaagtagaagatagacagagccagcaagctgaagcaatggatgcagacgtggtgcaggaagatgtgcctaaatctgaacatgctgatgagccaacagctgatgctcttgaagtgctgaatcaagaatctattgaagaaaccaatagcccagtgaatgaagagactgaagaagcaaccaaccagagcaacatgccagcatctgaggagacaataccaaaatatgacgcggcaacaagggatcaacctgtaaatattcaagcgcagaaccaggaaccagtagatgaaggagaagctactgtagaagaaagagaagtggctgaagcagttcatactgaagcaccagtgcaacaaagcagtgttgcttttgaggaggcagttccagaagaccaacataatttaggtgttgcaaataatacagtgcaagaagacatgatggaagctactgggcaaacaaaagaaggtcagcgataccaagatctaggaccagaaaatgcaatagagaacacacaacctgcaagcacggcaaacattcctgaggttgaggttataaccgaagcaccttctggatttcaaactcctgtggagatcaatctggacatctctgatgccattgcagatactactgatggaaacacaggaacagatgaactagttaaagcagaaggtgttatccatcctgaaaacaaagagagttttctagaagatacatctaccacagaacctttagaagaggtgcctaaatctgaacatgctgatgagccagcaactgatgctcttgaagtgctgaatcaagattatgctgaagaaaccaatgacccagtgaatgaaaagactgaagaaacaggcaaccagagcaacatgccaccatctgaggagacaacaccagaatatgacacgacaacaagggagccacctgtaaatattcaagcacagaaccaggaatcattagaagaaagagaagctactgtagaagaaagtgaagttgccgaagcagttgatactgaagcaccagtgcaacaaagcagtgttgctcttgaggatgcagttccagaagatcaatataacttaattgctacaaataacacagtacaggaagacacacaagaagctattggacaaacaaaagaaggtcaacaataccatgatctaggaccagaaaatgcaactgagaacacagaacctgcaagcacggccaacactcctgatgttgatgtaataaccgaagcaccttctggaattcaaacttctattgagatcaatctggacatctccgatgccattccagatactaccgatggaaatgcaaaaacagatgaactagttaaagtagatggtgttatccttcctgaccacaaagagagcttttctgaagacacatgtgttgtagaacctacagaagagatgatagaagtagatcaacttggtcaacaagctgatgcgatacatgcagaggtattgcaggaagaggtgcctgagatgatagaagtagatcaacttggtcaacaagctgatgtgatacatgcagaggtattgcaggaagaggtgcataaatctgaacagtctgatgagccaggggtcgatgctcaagaagtgctgaaccaagaatctgctgaagaaactgatggcctggtgaatgtaaagactgatgaaactgagcacaagagcaacatggtggtccctgatgacacaattccagaacatgatgcacaaacgagagagccacctgtaaatattcaagaacaaagccgggaatcagtaggagatgctgaagcagtcaatactgaagcagaaatgcaacaaaacagtgttgcttttgaggagacaactccagaaaaccatgtagcaacctcagagccatgttctgaaatccaacatgcacatcatgtggaaccagaggaaatcaatggccctgaagatggcaaagatgatgagatcaccaacatgagcagcagagaatatctagttcgagataatgttctgcagagtggaccaataatagatatacaaccagttcaggagttggaacaaattaaaacggatgaagcttctaaccagactcatgctgttatcttcaatgacctagctcaggaagatgctacagcaacaagtgaaccacaagtgactgaaacagaactaaaggacattgaagccactgaagctgaagaaatcaccaaacttgaccatgttactcattccaaggaacttgcagtagaaaatgattcaacagcagatgaaccacataagggtgaaatccatcaaactcttgaacaagatttagttgaagttaaggacactggaacttaccatgaaaaaacaatatctacttcagaggacacagtacaagataatttgacagaagatgagccaagttttggtagtcaagaagtagatgatgcagagtcaacagaagaaactaagcaaaacatagctgagaatattgcagaagtctctgatgtggcgattgttgatgacgcaattgaacagaatgtgctacagactgaggatatcgttgaaatgcataaacaggagctggaacgagaagaaacagagagaatagaacctgttgaatcagaggaagcttctgatcagaggaatgatgcaccattcgattattcagctcgagaagataatacaaaggaaagtgagatacagcagacagaatcagcaacggaaacaaatgaaattgaacccactgaaattgaagcagttcctcgagaaagcaatacctgtgtttcagaggagccttctcaagaagatcatataaaagaaagtgaaacaagttttgacaatcaagaagtgaacatcacagaatcttcagaagtaaatgatagtcacaaagatataatatctggaggaatctctgacccaagcaacacagcttctgctggggattcatctgaaggaagcaatgtccctgaaggcgagccacctgaacaggctgtgcaggaactgggatcagaggagataaagaacactcaaattgatgaagtgaatgaaacatcccttgaaatgaatgctactgtctttcagataccaagtcaagaagaaaatccagacacaaccaaattgcatgaatcaacagaggtgagcaacattgaagccacagaaatgcacggaaacccccaccaaagtgatctggctgctcagtcagaggagcaaacaacagaaggaatatcaagtggtctgaaaccagaatcaattgaaggtaatgatacagaagccaaaaaatgtcaaagtacctctcaggaaaaaacaatctctgcctctgagtctgtcccagaagatgcaaccactgaaccagatgttgatcaccaacaacttcaggatcaagaatctgccaaactcaaggaaaccgaagctgataaatttcaagaaattgtctcatctaacactctttcttctgaggagttcacatcaacagaaccaagttctgacaccgaagcagacaattcacagttagcagaagaaactgaggacaccgaaattgtgaaaagtaatactgctcttgctgaggcagcagctccagaaacagatgcaactgctgatacatcatctttccatgagacagatctagaagagaacaaggacacaggaacaattgaaacagaggatggtatggtatcaagtgactatacatcagaaaagatggacacggaaaccatggagactgaagcagtccctcatgatagtagtgatgcaaatataaaagaacacactgaagacgatacttcaacaccaaatgccccacatgctggtactgaacctgttcatgagctagaatcagttgaagtcagcgctgacacaacggaacatccaggagagacccatgactctgcttctgatgagcttactccaacagaagaaaatacagcagtaacagaaccatcttttagtacacaggaagtgcagaatctgacatctcaagaaatcaaggacagcgaagatgacaaaactgatgaattctcagatatcaatagctttcctattcctggagaggcagaccaagtaccaagaagtgaaacaactcctgatgtccaagaagtggaagaactgggtttaacagaagaaacaagagacattgaagccatagagcctggagatcagcaagaagacatagtttctacccttgagaagccagaaatagacggtgaaccaagtgctgataatcagcaggttcatgaggacaaactaccagaagtggaagacaataaagcaattgaagctgaagcctccaagcaaagtaatattgccactcctgataatgcagctgaagaaaggaatgaactggaaagtgatccagatccatatgcccagccagcagaacaggtagaattatccaaagacaatgagaacagccagcttgtgaagacagaagaaacctcagaccaaagcaattttgtcgtccttagaaggactacagaagattctgttgcaagagaaattgacccacctgttgccattaaacaagagcaaccagtggaagaaatcaagggtgtcgatgccactgaagctgaagaagactttcgtacaacccaagctgttgcaatagagaaactagcttcagtcaataaaatagcaacagtagaaccgacttatgatattcagcgaatggatgacttggaagcaacagaggaaaagaagcacgctgaagccattaatgaaggagatcaatccaatattgctgtttcagaggaacaaactccaacatataatggagaaacaccagaagatcatcatgtagaatcaaatgaaggaacgatggggaatgaaactgacaatatcattttggcacacggaatcaaagatgaaatacagaagtcagcagaactaaaggacggtccatgtgatttgtctgaaactgttttaacaactcggagaagtgagaacatgattgatgaagataatgttcaaacttatggcaatgatacagtagaggcttcaaacagtatccatcaagtcaaagaagagccagatgctggaaccgaacataattcaagccaaatgataagtgaatgtagtggagagaacgaaactcatgtccaagatagagatgtagacatgtggattctcacagaaggtgtcattgcagaagcatcacaggctttattggaaaatgatcctcaggcagcacaagatactatagaaaaggatgatacaacgaaaagtagtgagccaatcagtgatcacgatagcaggcaacattgtgatgtagaagcacttcaacaacaaagttgtgagacagaggccttatccattttggaacaagatgaggctctgcaaaagattgactcagatcaaaagcagaaagaagttgaggagattgaaagtcagaatgatgaacttcaggtagatgaacagaaacatgaagacaagagggatgatttagccaaagaaccactagtggagtaccagaatttcgaaaacagagcttcaaacaacacaaaagacaatgatgcattcaaggttgaacaaacagaggcagccaatagtgagattctcaagaataaagccctacatatatccaaggaatccaccccaagcattatggctatgaaggttgaaaacattaaggaaacaagtgaaggaactgaagaagatgatgctgccaaaaatgataacaaagatgaacaggagaatgcagaaaatgttgatatagtatcaaaaacttctactaatgaacaaggccaaacaactgatgaaattagaaaagaagaggatcctgttcacatcattcaagcatcagagaaagagatcgcagatgaaatagaagaaagtaaagaaatacatgaagacaatgctatttgtcatgataaattacagacaaattctgaaaaggaagagtcacctcaaccgcattccaatgaaccatacaatgtggatgctaaaattgatgatacaacatctctatgcgaagaaataatccatgacaatacaagtataaatcctagagaaattgaagagataggagaaaacaaaggaccagacttcacttctgaaccttctgtagaatcatccatacagaacaatgttgaagactcaagcagtcatcacaaggttgaagatgaaaagctttcaatgtctgagaaaaatgatgtagatactgaagctatgcaagaaataaatgatgaatctggcgcggatataaaccaaacagaacaatgtcaagaagaaattactgcagatgatgttctgcaacttgaaacagaaggaaattcatttgacaagattgaagagactgcttcaaatgaggaaacagagactagtacagcagccactgaagcagtaacgttcaatgaagatattactgacaaggttagcggagctgatggagcaccgtctaacggaagtctcaagacctttactgacactggaagggatattgatgttccattggtaattacaacatcaaaggaagaaagtgtgaacgacactatggaaaacctcaatcttgaccttcctggacatcaggcacaggatggcaacaccgctgaaaaggtgctcagcttagaggaaagagaaagagagatgccttcatcagagaagctccttcaaactgaaccaggagagaatcaaattcccaatgaacaggatgaaaaggacatacgagatgagaatcaaactctaaaagaaaaggatgaagatgacatgcaagatacagaatttggagaggctaagaaagaagttcaacaagaattacctgtctcccattttctgatgaatctaatattgggaaaagagagcagtgatgcaaatgaagattcagaatctgaggctgcaaggaagcaaggtgaagcgacagaagatgacagctgcacgttcatttctgaacaagaagaaagtctggggtcacttcctacagaaaataaggtggatgacaatcccacctttgttgaacaagaaaaacatgaagttaaatgctctgaagaaacacaggaaatggtcgaagaacaaagtgatgatcagctgcacacagaaagatcaattgaaattgatgaggatatcaaaaagaacactcgtgctttagaaataccagcataccaagacaatccccaggatggaatttctggtgaattgcagacagaagaagcagctggtgtttctacaaaaatggtaactagagatattgatatttcgagtgttgtgctggacaacagaacagttggtactgtgtgtcaggaaaaaatggaggtatcaacaaaaaatgaaaatggaagcttgaggagcagcctgaatgactcaacaaacacaatggctccccaagacgatactctaggagaaggacaatcaaggctcgtgcttgaacctttacctgaagacaaaagtgttgatgtagtttctgagcaagcacctttgttgacagaatcaggaatgactgacgcgaatgacttatctagcgatactacaagtgctcaaaaccctgtgtctacaaaacccactgaatctgccagagttgaggccacatattctactgatattcaactggagaatgaagaagtagataagaaagaagaggaccagcatgcaaacacaaccaaagatgaagtttctaaagagattgtagaaagttcacatataaatctgcagaaaataacaaggcctgaagaaaaatctaatgagctagaaactcaaattaccgaaccagtttgtgacagtcaggcaattttggcccatgaaaaggaaatatctgaagaaaactttccaacagcagtcgaaattcaggctgatggtccaaacatgcagatcaaccaagataagcaagatgaagctgctgacatcgaaactgaaatgaagccagaaaaattaggggaatctaattttcaggaacaccaggacaatggtactgagcaaaagtctcctaaagagactgatgaaggagaccagcaacttgtggccaagaaagagattctgacccaagaaatggatgtgcatgagacagttgaaagacctcagcaagcagttgaaagtcctcagcaaacagtgagcataacatccaatgaagaccaggaactgtttgattcaaaggtccaggaacgtgatctcaatgtagtttcacccagagaagcttctgaggctgaagaaaactttgtggacgtaaccaagccagaattcagcacagatgaagaacaaagtccaaaggctgatgcagaagagaagatttatgacgagaagataaaggacatagagggaactaagaatttaactgatgaagcagcaataaaaactgaagcaccaggagcagcccagaagacacgtaaaaaatatagcctattgtctggcgtgggatcgaaggtaaaacaccaactcgcaaaagtgaagaaagccattgtaggcaaacctgggcacacaaaaccagtatctccgacggcataaaactccagtcaccttagaacatgtacattattgtattgtttgtagtcttgtgagccatttatttcggtggtagtgtttgcgatgggctaggagaaggtcctcttcacaaccatagcattggaattctatgatgttgcacatgaaacaccccccccccccctcgagagtatgttgaagatgtttgtaaatatgtctagtgtgtaaattcaagtttccctgaaactttgaggtagaatcaaggacatgtaattggtcaattgtttgtattcttcgttgaaatgcacaagcagtttgtggtcatgatgcagcttgcagcatattcttcacttcactcaagtgctcctggtctgttcagtccctatctgagtttaaaatgggacaatgcaattccaatcagatcatgatgatgaacaacttgatatgaaaaataaaatgattaaagaatttggcttaaatggatataatgtaatcactaaactaatgaagaagctagataaaagaaaagcaagccttgatgctcaataagac

SEQ ID NO: 53946 - DNA, 9903 bp, Zea Mays
agaccaccagcttttcgagataccaccggcctttttcagggagaagccactccatctttctttttttcctttttccaactttcttcttcttcctcctccttctcattctgatctggaacaatggcgacagaagacgaagagcgagaagcagcagatgggacggaagtcccagtggaagctgtggttttgggaacattccatttgcatgcacacccagaaggcaagctttcatctctgatggatatcaagagcatgggagaaaccatcgattcaactgaaggaacgttgaagattccagaggatcaagttttagtagaagcaccctctgatgtccaacttcctccagaacataatctaaatggtgaagcatcttctttgaatggccatacagacaaagaagagaaggtttcagtcgagcagccacatgacaatgatcaggaagaagcagaactagatcagaacaacagaatcaacaaagaagatgcggctgatggtttaagtcatggagagagcacaacagaagacagctgccttctgaagcacaagaaagatgaagaatccaagggtgatgaacaacaagatttaggtgttacagtggatgatgacttggtgcaggaagacacgctgaaaactgacaatgctattgagcaaacagatgatggtcagcaagaccaggatcaagaacctgaaaaggcaaacgagaacacagaacctgcaagcatcgcaaacaatgacgatgttgagattgtagctgagacacctactggactccaagctcctgtggagtcacgtatgaatgattctgatggcattccggagactattgatgaagagacagaaacagatgaaccagctcaggcagatggcgttgttcatcctgaagacgtggccaaagtagaagatcaacagagtcaacaagatgacacggtggatgcagatgtggccccagaagaggttaaatgtgaagaaactgatcagcaggaagagaagcccaaatctgaagctcatgagccaacgattgatactcgagaagcgttgaatcaagaacctgctgaagaaactgatgactcgatgaataaaaagattgaagaaactgcacaccagaggaacatggcagctccaaaggagacaacactagaacatgaagcaacaatgagtgctacaccagtaaatacacaagtgcaggaccaggaaccattagaagaaatagaagataccgaaaaaggaatccaaccaagcagtggttctggggatgcaattccagaagatcaatctaatttaagtgttactatagacaatgacactgtgaatgaggatacagtgataggtattgagcaacaggatgatggtcagcaagatgaggatctagaaccagaaaaggcaactgaggatacacaacctgcaagcatgacaaacattccccaggttgaggttgtaactgaagcatcttctggagtccaaactcctggggacctgaatctcaacaactctgatgctgttccagatactattgatgcaaacacagaaacagatgagccatctaaagcacactctgttgttcatcctgaaaagaaagagagatttctagaagacgcaaccactgaggaacctacagaagaggtggtcaaagtagaagctcaacagagccagcaagcagatgtgatggatgcaaacatggtgcaggaagaggtgcctaaatctgaacatgctgatgagccagcaactgatgcttttgaagtgcctaaatctgaacatgctgatgagccagcaactgatgctcttgaagtgctgaatcaagattatgctgaagaaaccaatgacccagtgaatgaaaagactgaagaaacaggcaaccagagcaacatgccaccatctgaggagacaacaccagaatatgacacgacaacaagggagccacctgtaaatattcaagcacagaaccaggaatcattagaagaaagagaagctactgtagaagaaagtgaagttgccgaagcagttgatactgaagcaccagtgcaacaaagcagtgttgctcttgaggatgcagttccagaagatcaatataacttaattgctacaaataacacagtacaggaagacacacaagaagctattggacaaacaaaagaaggtcaacaataccatgatctaggaccagaaaatgcaactgagaacacagaacctgcaagcacggccaacactcctgatgttgatgtaataaccgaagcaccttctggaattcaaacttctattgagatcaatctggacatctccgatgccattccagatactaccgatggaaatgcaaaaacagatgaactagttaaagtagatggtgttatccttcctgaccacaaagagagcttttctgaagacacatgtgttgtagaacctacagaagagatgatagaagtagatcaacttggtcaacaagctgatgcgatacatgcagaggtattgcaggaagaggtgcctgagatgatagaagtagatcaacttggtcaacaagctgatgtgatacatgcagaggtattgcaggaagaggtgcataaatctgaacagtctgatgagccaggggtcgatgctcaagaagtgctgaaccaagaatctgctgaagaaactgatggcctggtgaatgtaaagactgatgaaactgagcacaagagcaacatggtggtccctgatgacacaattccagaacatgatgcacaaacgagagagccacctgtaaatattcaagaacaaagccgggaatcagtaggagatgctgaagcagtcaatactgaagcagaaatgcaacaaaacagtgttgcttttgaggagacaactccagaaaaccatgtagcaacctcagagccatgttctgaaatccaacatgcacatcatgtggaaccagaggaaatcaatggccctgaagatggcaaagatgatgagatcaccaacatgagcagcagagaatatctagttcgagataatgttctgcagagtggaccaataatagatatacaaccagttcaggagttggaacaaattaaaacggatgaagcttctaaccagactcatgctgttatcttcaatgacctagctcaggaagatgctacagcaacaagtgaaccacaagtgactgaaacagaactaaaggacattgaagccactgaagctgaagaaatcaccaaacttgaccatgttactcattccaaggaacttgcagtagaaaatgattcaacagcagatgaaccacataagggtgaaatccatcaaactcttgaacaagatttagttgaagttaaggacactggaacttaccatgaaaaaacaatatctacttcagaggacacagtacaagataatttgacagaagatgagccaagttttggtagtcaagaagtagatgatgcagagtcaacagaagaaactaagcaaaacatagctgagaatattgcagaagtctctgatgtggcgattgttgatgacgcaattgaacagaatgtgctacagactgaggatatcgttgaaatgcataaacaggagctggaacgagaagaaacagagagaatagaacctgttgaatcagaggaagcttctgatcagaggaatgatgcaccattcgattattcagctcgagaagataatacaaaggaaagtgagatacagcagacagaatcagcaacggaaacaaatgaaattgaacccactgaaattgaagcagttcctcgagaaagcaatacctgtgtttcagaggagccttctcaagaagatcatataaaagaaagtgaaacaagttttgacaatcaagaagtgaacatcacagaatcttcagaagtaaatgatagtcacaaagatataatatctggaggaatctctgacccaagcaacacagcttctgctggggattcatctgaaggaagcaatgtccctgaaggcgagccacctgaacaggctgtgcaggaactgggatcagaggagataaagaacactcaaattgatgaagtgaatgaaacatcccttgaaatgaatgctactgtctttcagataccaagtcaagaagaaaatccagacacaaccaaattgcatgaatcaacagaggtgagcaacattgaagccacagaaatgcacggaaacccccaccaaagtgatctggctgctcagtcagaggagcaaacaacagaaggaatatcaagtggtctgaaaccagaatcaattgaaggtaatgatacagaagccaaaaaatgtcaaagtacctctcaggaaaaaacaatctctgcctctgagtctgtcccagaagatgcaaccactgaaccagatgttgatcaccaacaacttcaggatcaagaatctgccaaactcaaggaaaccgaagctgataaatttcaagaaattgtctcatctaacactctttcttctgaggagttcacatcaacagaaccaagttctgacaccgaagcagacaattcacagttagcagaagaaactgaggacaccgaaattgtgaaaagtaatactgctcttgctgaggcagcagctccagaaacagatgcaactgctgatacatcatctttccatgagacagatctagaagagaacaaggacacaggaacaattgaaacagaggatggtatggtatcaagtgactatacatcagaaaagatggacacggaaaccatggagactgaagcagtccctcatgatagtagtgatgcaaatataaaagaacacactgaagacgatacttcaacaccaaatgccccacatgctggtactgaacctgttcatgagctagaatcagttgaagtcagcgctgacacaacggaacatccaggagagacccatgactctgcttctgatgagcttactccaacagaagaaaatacagcagtaacagaaccatcttttagtacacaggaagtgcagaatctgacatctcaagaaatcaaggacagcgaagatgacaaaactgatgaattctcagatatcaatagctttcctattcctggagaggcagaccaagtaccaagaagtgaaacaactcctgatgtccaagaagtggaagaactgggtttaacagaagaaacaagagacattgaagccatagagcctggagatcagcaagaagacatagtttctacccttgagaagccagaaatagacggtgaaccaagtgctgataatcagcaggttcatgaggacaaactaccagaagtggaagacaataaagcaattgaagctgaagcctccaagcaaagtaatattgccactcctgataatgcagctgaagaaaggaatgaactggaaagtgatccagatccatatgcccagccagcagaacaggtagaattatccaaagacaatgagaacagccagcttgtgaagacagaagaaacctcagaccaaagcaattttgtcgtccttagaaggactacagaagattctgttgcaagagaaattgacccacctgttgccattaaacaagagcaaccagtggaagaaatcaagggtgtcgatgccactgaagctgaagaagactttcgtacaacccaagctgttgcaatagagaaactagcttcagtcaataaaatagcaacagtagaaccgacttatgatattcagcgaatggatgacttggaagcaacagaggaaaagaagcacgctgaagccattaatgaaggagatcaatccaatattgctgtttcagaggaacaaactccaacatataatggagaaacaccagaagatcatcatgtagaatcaaatgaaggaacgatggggaatgaaactgacaatatcattttggcacacggaatcaaagatgaaatacagaagtcagcagaactaaaggacggtccatgtgatttgtctgaaactgttttaacaactcggagaagtgagaacatgattgatgaagataatgttcaaacttatggcaatgatacagtagaggcttcaaacagtatccatcaagtcaaagaagagccagatgctggaaccgaacataattcaagccaaatgataagtgaatgtagtggagagaacgaaactcatgtccaagatagagatgtagacatgtggattctcacagaaggtgtcattgcagaagcatcacaggctttattggaaaatgatcctcaggcagcacaagatactatagaaaaggatgatacaacgaaaagtagtgagccaatcagtgatcacgatagcaggcaacattgtgatgtagaagcacttcaacaacaaagttgtgagacagaggccttatccattttggaacaagatgaggctctgcaaaagattgactcagatcaaaagcagaaagaagttgaggagattgaaagtcagaatgatgaacttcaggtagatgaacagaaacatgaagacaagagggatgatttagccaaagaaccactagtggagtaccagaatttcgaaaacagagcttcaaacaacacaaaagacaatgatgcattcaaggttgaacaaacagaggcagccaatagtgagattctcaagaataaagccctacatatatccaaggaatccaccccaagcattatggctatgaaggttgaaaacattaaggaaacaagtgaaggaactgaagaagatgatgctgccaaaaatgataacaaagatgaacaggagaatgcagaaaatgttgatatagtatcaaaaacttctactaatgaacaaggccaaacaactgatgaaattagaaaagaagaggatcctgttcacatcattcaagcatcagagaaagagatcgcagatgaaatagaagaaagtaaagaaatacatgaagacaatgctatttgtcatgataaattacagacaaattctgaaaaggaagagtcacctcaaccgcattccaatgaaccatacaatgtggatgctaaaattgatgatacaacatctctatgcgaagaaataatccatgacaatacaagtataaatcctagagaaattgaagagataggagaaaacaaaggaccagacttcacttctgaaccttctgtagaatcatccatacagaacaatgttgaagactcaagcagtcatcacaaggttgaagatgaaaagctttcaatgtctgagaaaaatgatgtagatactgaagctatgcaagaaataaatgatgaatctggcgcggatataaaccaaacagaacaatgtcaagaagaaattactgcagatgatgttctgcaacttgaaacagaaggaaattcatttgacaagattgaagagactgcttcaaatgaggaaacagagactagtacagcagccactgaagcagtaacgttcaatgaagatattactgacaaggttagcggagctgatggagcaccgtctaacggaagtctcaagacctttactgacactggaagggatattgatgttccattggtaattacaacatcaaaggaagaaagtgtgaacgacactatggaaaacctcaatcttgaccttcctggacatcaggcacaggatggcaacaccgctgaaaaggtgctcagcttagaggaaagagaaagagagatgccttcatcagagaagctccttcaaactgaaccaggagagaatcaaattcccaatgaacaggatgaaaaggacatacgagatgagaatcaaactctaaaagaaaaggatgaagatgacatgcaagatacagaatttggagaggctaagaaagaagttcaacaagaattacctgtctcccattttctgatgaatctaatattgggaaaagagagcagtgatgcaaatgaagattcagaatctgaggctgcaaggaagcaaggtgaagcgacagaagatgacagctgcacgttcatttctgaacaagaagaaagtctggggtcacttcctacagaaaataaggtggatgacaatcccacctttgttgaacaagaaaaacatgaagttaaatgctctgaagaaacacaggaaatggtcgaagaacaaagtgatgatcagctgcacacagaaagatcaattgaaattgatgaggatatcaaaaagaacactcgtgctttagaaataccagcataccaagacaatccccaggatggaatttctggtgaattgcagacagaagaagcagctggtgtttctacaaaaatggtaactagagatattgatatttcgagtgttgtgctggacaacagaacagttggtactgtgtgtcaggaaaaaatggaggtatcaacaaaaaatgaaaatggaagcttgaggagcagcctgaatgactcaacaaacacaatggctccccaagacgatactctaggagaaggacaatcaaggctcgtgcttgaacctttacctgaagacaaaagtgttgatgtagtttctgagcaagcacctttgttgacagaatcaggaatgactgacgcgaatgacttatctagcgatactacaagtgctcaaaaccctgtgtctacaaaacccactgaatctgccagagttgaggccacatattctactgatattcaactggagaatgaagaagtagataagaaagaagaggaccagcatgcaaacacaaccaaagatgaagtttctaaagagattgtagaaagttcacatataaatctgcagaaaataacaaggcctgaagaaaaatctaatgagctagaaactcaaattaccgaaccagtttgtgacagtcaggcaattttggcccatgaaaaggaaatatctgaagaaaactttccaacagcagtcgaaattcaggctgatggtccaaacatgcagatcaaccaagataagcaagatgaagctgctgacatcgaaactgaaatgaagccagaaaaattaggggaatctaattttcaggaacaccaggacaatggtactgagcaaaagtctcctaaagagactgatgaaggagaccagcaacttgtggccaagaaagagattctgacccaagaaatggatgtgcatgagacagttgaaagacctcagcaagcagttgaaagtcctcagcaaacagtgagcataacatccaatgaagaccaggaactgtttgattcaaaggtccaggaacgtgatctcaatgtagtttcacccagagaagcttctgaggctgaagaaaactttgtggacgtaaccaagccagaattcagcacagatgaagaacaaagtccaaaggctgatgcagaagagaagatttatgacgagaagataaaggacatagagggaactaagaatttaactgatgaagcagcaataaaaactgaagcaccaggagcagcccagaagacacgtaaaaaatatagcctattgtctggcgtgggatcgaaggtaaaacaccaactcgcaaaagtgaagaaagccattgtaggcaaacctgggcacacaaaaccagtatctccgacggcataaaactccagtcaccttagaacatgtacattattgtattgtttgtagtcttgtgagccatttatttcggtggtagtgtttgcgatgggctaggagaaggtcctcttcacaaccatagcattggaattctatgatgttgcacatgaaacaccccccccccccctcgagagtatgttgaagatgtttgtaaatatgtctagtgtgtaaattcaagtttccctgaaactttgaggtagaatcaaggacatgtaattggtcaattgtttgtattcttcgttgaaatgcacaagcagtttgtggtcatgatgcagcttgcagcatattcttcacttcactcaagtgctcctggtctgttcagtccctatctgagtttaaaatgggacaatgcaattccaatcagatcatgatgatgaacaacttgatatgaaaaataaaatgattaaagaatttggcttaaatggatataatgtaatcactaaactaatgaagaagctagataaaagaaaagcaagccttgatgctcaataagac

SEQ ID NO: 53947 - DNA, 13475 bp, Zea Mays
gttcattgatctgccatttcagggataacttctcccgcttaatcacgattacacttaggcaagtgctaattctctgtcaagagcactgtcattcctagccgctgctcagcaatagaaaaacatattcacagaggggcagaggaaaggtcggtataaagaccaccagcttttcgagataccaccggcctttttcagggagaagccactccatctttctttttttcctttttccaactttcttcttcttcctcctccttctcattctgatctggaacaatggcgacagaagacgaagagcgagaagcagcagatgggacggaagtcccagtggaagctgtggttttgggaacattccatttgcatgcacacccagaaggcaagctttcatctctgatggatatcaagagcatgggagaaaccatcgattcaactgaaggaacgttgaagattccagaggatcaagttttagtagaagcaccctctgatgtccaacttcctccagaacataatctaaatggtgaagcatcttctttgaatggccatacagacaaagaagagaaggtttcagtcgagcagccacatgacaatgatcaggaagaagcagaactagatcagaacaacagaatcaacaaagaagatgcggctgatggtttaagtcatggagagagcacaacagaagacagctgccttctgaagcacaagaaagatgaagaatccaagggtgatgaacaacaagatttaggtgttacagtggatgatgacttggtgcaggaagacacgctgaaaactgacaatgctattgagcaaacagatgatggtcagcaagaccaggatcaagaacctgaaaaggcaaacgagaacacagaacctgcaagcatcgcaaacaatgacgatgttgagattgtagctgagacacctactggactccaagctcctgtggagtcacgtatgaatgattctgatggcattccggagactattgatgaagagacagaaacagatgaaccagctcaggcagatggcgttgttcatcctgaagacgtggccaaagtagaagatcaacagagtcaacaagatgacacggtggatgcagatgtggccccagaagaggttaaatgtgaagaaactgatcagcaggaagagaagcccaaatctgaagctcatgagccaacgattgatactcgagaagcgttgaatcaagaacctgctgaagaaactgatgactcgatgaataaaaagattgaagaaactgcacaccagaggaacatggcagctccaaaggagacaacactagaacatgaagcaacaatgagtgctacaccagtaaatacacaagtgcaggaccaggaaccattagaagaaatagaagataccgaaaaaggaatccaaccaagcagtggttctggggatgcaattccagaagatcaatctaatttaagtgttactatagacaatgacactgtgaatgaggatacagtgataggtattgagcaacaggatgatggtcagcaagatgaggatctagaaccagaaaaggcaactgaggatacacaacctgcaagcatgacaaacattccccaggttgaggttgtaactgaagcatcttctggagtccaaactcctggggacctgaatctcaacaactctgatgctgttccagatactattgatgcaaacacagaaacagatgagccatctaaagcacactctgttgttcatcctgaaaagaaagagagatttctagaagacgcaaccactgaggaacctacagaagaggtggtcaaagtagaagctcaacagagccagcaagcagatgtgatggatgcaaacatggtgcaggaagaggtgcctaaatctgaacatgctgatgagccagcaactgatgcttttgaagtgctgaatcaagaatctgttgatgagccagcaattcaagcacctgtaactattcaagtgcagaaccaggaaccattagaagaaatagaacttgctgaagcagttgatactgaagcaacagtgcaacaaagcagtgctgcttttgaggagtcggttccagaacatcaatgtaatttaggtgctacacataacacagagcaggaagacacgctggaagctagtgggcaatcaaaaggaggtcaggaataccaagacctaggaccagaaaatgcaactgaaaacacacaacaagcaagcatgacaaatattcttgatgttgaggttataactgaaacaccctctggaattcaaactcccatggagatcaatctggttatctctgatgccattccagatgcaactgatggaaacacagaaacagatgaaccagctaaagcacacactttcgttcatcctgaaaagaatgaagtctttccagaaaatacatttaccaccaaacctacagcagaggtagtcaaagtagaagatcagcagaaccagcaagatgatgcaatggatgcagaagtggtgctggaagaggtgcctaaatctgaacgtgctgatgagccagcaactgatgctcttgaagtgctggaatctgttgaagaaactgatgacccaatgaatgaaaagactgaagaaacaacccaacagagcaacataccagcatctgaggagacaacggcagaatatgacgcgacaagggagccacctgcaaataatcaagtgcagaacaaggaaccagtagatgaaagagaatctactgtagaagaaagagaagttgctgaagcagttgatactgaagcaccagtgcaacaaagcagtgttgcttttgatgaggcagttccagaagagcaccataatttaggtgttgcaaataacacagtgcaagaagacacaatggaagccactggacaaacacaagaaggtcagcaataccaagatctaggaccagaaaatgcagctgagaacacacaacctgcaagcacggaaaacattcctgatgttgaggttataaccaaagcaccttctgaaattcaaagtcctgtggagatcaatctggacatctctgatgccattccagatactaacgatggaaacacagaaacagatgagccagctaaagcaaacactgtcgctcgtcctgatacggaagagagctttgcagaagatacatctactggacctacagaagaggtggtcacactagaagatcaacagagccaacaagttgatgcaaaggatgcagacgtggtgcaggaagaggtgcctacatcggagcacaccgatgagccagcaaccgatgctgttgaagcgctgaatcaagaatctgatgaagaaacagatggcccagtatatgaaaatactgaagaaacaacacaccagagcaacatgcccgcatctgaggagacactaccagaaaatgatgtgacaacaagggagccatctgtaactattcaagcacagaaccaggaatcattagaagaaagagaagttcatgaagcagttgatactgaagcaacagttcaaccaagcagtgcttcttttgaggagtcagttccagaacatcaacataacttaggtgcgacaaatgacacagtgcagcaagacacactggaagcaactaagcaaacaaaaggaggtcagcaataccaggatctaggaccagaaaatgcaactgagaacacacaacctgcaagcatggcaaacattcctgatgttgatgttataaccaaagcatcttctggaattcaaactcctgttgagatcaaccgggacatctctgatgccattccagatgctactgatggaagcacagaaacaactgaaccagctaaagcgcacagtatcattcatcctgaaaagaaagagagctttcaagaagatacatctaccgcagaacctacagaagaggtgatcaaagtagaagatagacagagccagcaagctgaagcaatggatgcagacgtggtgcaggaagatgtgcctaaatctgaacatgctgatgagccaacagctgatgctcttgaagtgctgaatcaagaatctattgaagaaaccaatagcccagtgaatgaagagactgaagaagcaaccaaccagagcaacatgccagcatctgaggagacaataccaaaatatgacgcggcaacaagggatcaacctgtaaatattcaagcgcagaaccaggaaccagtagatgaaggagaagctactgtagaagaaagagaagtggctgaagcagttcatactgaagcaccagtgcaacaaagcagtgttgcttttgaggaggcagttccagaagaccaacataatttaggtgttgcaaataatacagtgcaagaagacatgatggaagctactgggcaaacaaaagaaggtcagcgataccaagatctaggaccagaaaatgcaatagagaacacacaacctgcaagcacggcaaacattcctgagatactactgatggaaacacaggaacagatgaactagttaaagcagaaggtgttatccatcctgaaaacaaagagagttttctagaagatacatctaccacagaacctttagaagaggtggccaatgtagaagatcagcacagccagcaagctgatgcaatggatgcagacgtggtgcaagaagaggtgcctaaatctaaagccgatgagccagcaactgatacccttgaagtgctcaatcaagaatatgctgaagaaaccagtggcccagcgaatgaaaagattgaagaaacagccaaccagagcaacatgctaacatctgaggagacagtaccagagtatgacacagcaacaagggatccacctgtaaatattcaagcacagaaccaggaatcattagaagaaagagaagctactgtagcagaaaatgaagttgctgaagcagttgatactgaagcaccagtgcaacaaagcagtgttgctcttgaggacgcagttccagaagatcaacataacttaggtgctacaaataacacagcgcaggaagacacgcaggacgctattgggcaaacaaaagaaggtcagcaattccatgatctaggaccagaaaatgcaactgagaacacacaacctgcaagcatggccaacattgctgatgttgatgtaacaaccgaagcaccttctggaattcaaactcctgtggagatcaatctggacatctctgatgccattcctgatactactgatggaaacacagaaacagataaactagttaaaacagaaggtgttatccatcctgaaaagaaagagagttttcctgaagatacatctaccgcagaacctacagaagaggtggccaatgtagaagatcagcaaagccagagagctgatgcaatggatgcagacgtggtggatgaagaggtgcctaaatctgaacatgctgatgagccagcaactgatgctcttgaagtgctgaatcaagattatgctgaagaaaccaatgacccagtgaatgaaaagactgaagaaacaggcaaccagagcaacatgccaccatctgaggagacaacaccagaatatgacacgacaacaagggagccacctgtaaatattcaagcacagaaccaggaatcattagaagaaagagaagctactgtagaagaaagtgaagttgccgaagcagttgatactgaagcaccagtgcaacaaagcagtgttgctcttgaggatgcagttccagaagatcaatataacttaattgctacaaataacacagtacaggaagacacacaagaagctattggacaaacaaaagaaggtcaacaataccatgatctaggaccagaaaatgcaactgagaacacagaacctgcaagcacggccaacactcctgatgttgatgtaataaccgaagcaccttctggaattcaaacttctattgagatcaatctggacatctccgatgccattccagatactaccgatggaaatgcaaaaacagatgaactagttaaagtagatggtgttatccttcctgaccacaaagagagcttttctgaagacacatgtgttgtagaacctacagaagagatgatagaagtagatcaacttggtcaacaagctgatgcgatacatgcagaggtattgcaggaagaggtgcctgagatgatagaagtagatcaacttggtcaacaagctgatgtgatacatgcagaggtattgcaggaagaggtgcataaatctgaacagtctgatgagccaggggtcgatgctcaagaagtgctgaaccaagaatctgctgaagaaactgatggcctggtgaatgtaaagactgatgaaactgagcacaagagcaacatggtggtccctgatgacacaattccagaacatgatgcacaaacgagagagccacctgtaaatattcaagaacaaagccgggaatcagtaggagatgctgaagcagtcaatactgaagcagaaatgcaacaaaacagtgttgcttttgaggagacaactccagaaaaccatgtagcaacctcagagccatgttctgaaatccaacatgcacatcatgtggaaccagaggaaatcaatggccctgaagatggcaaagatgatgagatcaccaacatgagcagcagagaatatctagttcgagataatgttctgcagagtggaccaataatagatatacaaccagttcaggagttggaacaaattaaaacggatgaagcttctaaccagactcatgctgttatcttcaatgacctagctcaggaagatgctacagcaacaagtgaaccacaagtgactgaaacagaactaaaggacattgaagccactgaagctgaagaaatcaccaaacttgaccatgttactcattccaaggaacttgcagtagaaaatgattcaacagcagatgaaccacataagggtgaaatccatcaaactcttgaacaagatttagttgaagttaaggacactggaacttaccatgaaaaaacaatatctacttcagaggacacagtacaagataatttgacagaagatgagccaagttttggtagtcaagaagtagatgatgcagagtcaacagaagaaactaagcaaaacatagctgagaatattgcagaagtctctgatgtggcgattgttgatgacgcaattgaacagaatgtgctacagactgaggatatcgttgaaatgcataaacaggagctggaacgagaagaaacagagagaatagaacctgttgaatcagaggaagcttctgatcagaggaatgatgcaccattcgattattcagctcgagaagataatacaaaggaaagtgagatacagcagacagaatcagcaacggaaacaaatgaaattgaacccactgaaattgaagcagttcctcgagaaagcaatacctgtgtttcagaggagccttctcaagaagatcatataaaagaaagtgaaacaagttttgacaatcaagaagtgaacatcacagaatcttcagaagtaaatgatagtcacaaagatataatatctggaggaatctctgacccaagcaacacagcttctgctggggattcatctgaaggaagcaatgtccctgaaggcgagccacctgaacaggctgtgcaggaactgggatcagaggagataaagaacactcaaattgatgaagtgaatgaaacatcccttgaaatgaatgctactgtctttcagataccaagtcaagaagaaaatccagacacaaccaaattgcatgaatcaacagaggtgagcaacattgaagccacagaaatgcacggaaacccccaccaaagtgatctggctgctcagtcagaggagcaaacaacagaaggaatatcaagtggtctgaaaccagaatcaattgaaggtaatgatacagaagccaaaaaatgtcaaagtacctctcaggaaaaaacaatctctgcctctgagtctgtcccagaagatgcaaccactgaaccagatgttgatcaccaacaacttcaggatcaagaatctgccaaactcaaggaaaccgaagctgataaatttcaagaaattgtctcatctaacactctttcttctgaggagttcacatcaacagaaccaagttctgacaccgaagcagacaattcacagttagcagaagaaactgaggacaccgaaattgtgaaaagtaatactgctcttgctgaggcagcagctccagaaacagatgcaactgctgatacatcatctttccatgagacagatctagaagagaacaaggacacaggaacaattgaaacagaggatggtatggtatcaagtgactatacatcagaaaagatggacacggaaaccatggagactgaagcagtccctcatgatagtagtgatgcaaatataaaagaacacactgaagacgatacttcaacaccaaatgccccacatgctggtactgaacctgttcatgagctagaatcagttgaagtcagcgctgacacaacggaacatccaggagagacccatgactctgcttctgatgagcttactccaacagaagaaaatacagcagtaacagaaccatcttttagtacacaggaagtgcagaatctgacatctcaagaaatcaaggacagcgaagatgacaaaactgatgaattctcagatatcaatagctttcctattcctggagaggcagaccaagtaccaagaagtgaaacaactcctgatgtccaagaagtggaagaactgggtttaacagaagaaacaagagacattgaagccatagagcctggagatcagcaagaagacatagtttctacccttgagaagccagaaatagacggtgaaccaagtgctgataatcagcaggttcatgaggacaaactaccagaagtggaagacaataaagcaattgaagctgaagcctccaagcaaagtaatattgccactcctgataatgcagctgaagaaaggaatgaactggaaagtgatccagatccatatgcccagccagcagaacaggtagaattatccaaagacaatgagaacagccagcttgtgaagacagaagaaacctcagaccaaagcaattttgtcgtccttagaaggactacagaagattctgttgcaagagaaattgacccacctgttgccattaaacaagagcaaccagtggaagaaatcaagggtgtcgatgccactgaagctgaagaagactttcgtacaacccaagctgttgcaatagagaaactagcttcagtcaataaaatagcaacagtagaaccgacttatgatattcagcgaatggatgacttggaagcaacagaggaaaagaagcacgctgaagccattaatgaaggagatcaatccaatattgctgtttcagaggaacaaactccaacatataatggagaaacaccagaagatcatcatgtagaatcaaatgaaggaacgatggggaatgaaactgacaatatcattttggcacacggaatcaaagatgaaatacagaagtcagcagaactaaaggacggtccatgtgatttgtctgaaactgttttaacaactcggagaagtgagaacatgattgatgaagataatgttcaaacttatggcaatgatacagtagaggcttcaaacagtatccatcaagtcaaagaagagccagatgctggaaccgaacataattcaagccaaatgataagtgaatgtagtggagagaacgaaactcatgtccaagatagagatgtagacatgtggattctcacagaaggtgtcattgcagaagcatcacaggctttattggaaaatgatcctcaggcagcacaagatactatagaaaaggatgatacaacgaaaagtagtgagccaatcagtgatcacgatagcaggcaacattgtgatgtagaagcacttcaacaacaaagttgtgagacagaggccttatccattttggaacaagatgaggctctgcaaaagattgactcagatcaaaagcagaaagaagttgaggagattgaaagtcagaatgatgaacttcaggtagatgaacagaaacatgaagacaagagggatgatttagccaaagaaccactagtggagtaccagaatttcgaaaacagagcttcaaacaacacaaaagacaatgatgcattcaaggttgaacaaacagaggcagccaatagtgagattctcaagaataaagccctacatatatccaaggaatccaccccaagcattatggctatgaaggttgaaaacattaaggaaacaagtgaaggaactgaagaagatgatgctgccaaaaatgataacaaagatgaacaggagaatgcagaaaatgttgatatagtatcaaaaacttctactaatgaacaaggccaaacaactgatgaaattagaaaagaagaggatcctgttcacatcattcaagcatcagagaaagagatcgcagatgaaatagaagaaagtaaagaaatacatgaagacaatgctatttgtcatgataaattacagacaaattctgaaaaggaagagtcacctcaaccgcattccaatgaaccatacaatgtggatgctaaaattgatgatacaacatctctatgcgaagaaataatccatgacaatacaagtataaatcctagagaaattgaagagataggagaaaacaaaggaccagacttcacttctgaaccttctgtagaatcatccatacagaacaatgttgaagactcaagcagtcatcacaaggttgaagatgaaaagctttcaatgtctgagaaaaatgatgtagatactgaagctatgcaagaaataaatgatgaatctggcgcggatataaaccaaacagaacaatgtcaagaagaaattactgcagatgatgttctgcaacttgaaacagaaggaaattcatttgacaagattgaagagactgcttcaaatgaggaaacagagactagtacagcagccactgaagcagtaacgttcaatgaagatattactgacaaggttagcggagctgatggagcaccgtctaacggaagtctcaagacctttactgacactggaagggatattgatgttccattggtaattacaacatcaaaggaagaaagtgtgaacgacactatggaaaacctcaatcttgaccttcctggacatcaggcacaggatggcaacaccgctgaaaaggtgctcagcttagaggaaagagaaagagagatgccttcatcagagaagctccttcaaactgaaccaggagagaatcaaattcccaatgaacaggatgaaaaggacatacgagatgagaatcaaactctaaaagaaaaggatgaagatgacatgcaagatacagaatttggagaggctaagaaagaagttcaacaagaattacctgtctcccattttctgatgaatctaatattgggaaaagagagcagtgatgcaaatgaagattcagaatctgaggctgcaaggaagcaaggtgaagcgacagaagatgacagctgcacgttcatttctgaacaagaagaaagtctggggtcacttcctacagaaaataaggtggatgacaatcccacctttgttgaacaagaaaaacatgaagttaaatgctctgaagaaacacaggaaatggtcgaagaacaaagtgatgatcagctgcacacagaaagatcaattgaaattgatgaggatatcaaaaagaacactcgtgctttagaaataccagcataccaagacaatccccaggatggaatttctggtgaattgcagacagaagaagcagctggtgtttctacaaaaatggtaactagagatattgatatttcgagtgttgtgctggacaacagaacagttggtactgtgtgtcaggaaaaaatggaggtatcaacaaaaaatgaaaatggaagcttgaggagcagcctgaatgactcaacaaacacaatggctccccaagacgatactctaggagaaggacaatcaaggctcgtgcttgaacctttacctgaagacaaaagtgttgatgtagtttctgagcaagcacctttgttgacagaatcaggaatgactgacgcgaatgacttatctagcgatactacaagtgctcaaaaccctgtgtctacaaaacccactgaatctgccagagttgaggccacatattctactgatattcaactggagaatgaagaagtagataagaaagaagaggaccagcatgcaaacacaaccaaagatgaagtttctaaagagattgtagaaagttcacatataaatctgcagaaaataacaaggcctgaagaaaaatctaatgagctagaaactcaaattaccgaaccagtttgtgacagtcaggcaattttggcccatgaaaaggaaatatctgaagaaaactttccaacagcagtcgaaattcaggctgatggtccaaacatgcagatcaaccaagataagcaagatgaagctgctgacatcgaaactgaaatgaagccagaaaaattaggggaatctaattttcaggaacaccaggacaatggtactgagcaaaagtctcctaaagagactgatgaaggagaccagcaacttgtggccaagaaagagattctgacccaagaaatggatgtgcatgagacagttgaaagacctcagcaagcagttgaaagtcctcagcaaacagtgagcataacatccaatgaagaccaggaactgtttgattcaaaggtccaggaacgtgatctcaatgtagtttcacccagagaagcttctgaggctgaagaaaactttgtggacgtaaccaagccagaattcagcacagatgaagaacaaagtccaaaggctgatgcagaagagaagatttatgacgagaagataaaggacatagagggaactaagaatttaactgatgaagcagcaataaaaactgaagcaccaggagcagcccagaagacacgtaaaaaatatagcctattgtctggcgtgggatcgaaggtaaaacaccaactcgcaaaagtgaagaaagccattgtaggcaaacctgggcacacaaaaccagtatctccgacggcataaaactccagtcaccttagaacatgtacattattgtattgtttgtagtcttgtgagccatttatttcggtggtagtgtttgcgatgggctaggagaaggtcctcttcacaaccatagcattggaattctatgatgttgcacatgaaacaccccccccccccctcgagagtatgttgaagatgtttgtaaatatgtctagtgtgtaaattcaagtttccctgaaactttgaggtagaatcaaggacatgtaattggtcaattgtttgtattcttcgttgaaatgcacaagcagtttgtggtcatgatgcagcttgcagcatattcttcacttcactcaagtgctcctggtctgttcagtccctatctgagtttaaaatgggacaatgcaattccaatcagatcatgatgatgaacaacttgatatgaaaaataaaatgattaaagaatttggcttaaatggatataatgtaatcactaaactaatgaagaagctagataaaagaaaagcaagccttgatgctcaataagac

SEQ ID NO: 53948 - DNA, 1959 bp, Zea Mays
cgcacttttcccgcccatacgcaaggaatggccggcgccgtctccgtctccgctcaccggcggcaatggcggtacacgtgggaagccctaaaccatcttcccctcctccgcctctacctcctaccccgcgccgcgctgcccttccgcatcccctcggacctccgcgccgacctccgactccagggctctctcctccacctgtccttctcgctccccggggacggggctgccgtcgcgctcagggtccccgtcccgagggtgctcgtagacccttccgcccccgtagagtgccgcgccgccgccgcgggggaccacctcgagctccgcctcgcgctcgtcctgcccgtcgaccaccctgtcgtcgccgccgcgttccctccaccccccggcgcggagcctccggcttctctagcgctgcgcgatggaaaatcatggaaatgccatctgtagattgggtagatgtggctgacaattgggttggtggatgttgcacctcatttggtggtgcaggcgagaaacttgtatctcagtttattagggcatatggtcgtttagaaggaacaagtctactggatgcaacttccattactgtagaaacagacaatcttgaaacagatttagtgtctcaggtagcttgttcagcacttagtagacattttgttgctataaaagaagatatatttaatgttagtgtagaaaaagatcataccactgggaagataaagttgaagaattcagaagagcaagcaaatatcacagctactcatgcacaaccacctattattttggaagaggggcctagtgttagttgtagtgaaacaaacggagtcactcagactaatcagcctggcatttctcagacagaagctgatactgatgcatactttgagaagtctgaaaatgactgttgtgttgagaaagtggggaaatctaagaaagaggttgatttgttgctggtagatccatgccgttgctgttgtgtcaatggatacagtgagaaagctgaagataacccttcacagttgtccttggtcaatgagaaaaagcagaatatgttggagattaaaagagattacaaattaacaaaaactatttctcttggtagtagcttcattgttaaagcatctaaccttttgaatgattttgagtgggttgaacttctctgtggtcaatgttcatcacctcttggctcatacccttctcagtgttcgcttggtccagctgatggccgcctacgactcttcaagtgctacacatctacagaaattcctgtaacagggcctcatgatgtgtttagggggcatacattggaaagagtttttgtgaatctgttgcttgaagttgcagaagacgaaatatcttttcgcacattagtcagagatttgaaaaccaaaaggcccatgctgcaattagttcttcttagttcaaaagcatggttatcttctggttgctgttatgaaaatgatatcgatggttcacatggaacaacagatctgcagccaagtgttaaactcttgtattctgattatagcaatgcttcagaagcagatttaaggatagtagaagcgtgggcatccaaatatcgggctgaagagctgtacatgatgaagcgtcagatagacgaacttactgaatgcctaagctcaggaaggaacaactttccagtttcttgttcttcccttgaagggatgcggctctcatcgcttaggcgctgacttcagaatatgacatggaaattgtgcctggactgatcatatttttgtactgatcaaaggagtctacagcatagaatcctgatggcatacctgatcatcctcggtgtcttttgagctttcagcaagctacctaataatttcttctttaaaatttaagatggcatgccttgtcctctgctctgaaaagacttggtggcatccgaaatggagcaatggcttatccaaaactttcagcttctctggt

SEQ ID NO: 53949 - DNA, 1013 bp, Zea Mays
cgcacttttcccgcccatacgcaaggaatggccggcgccgtctccgtctccgctcaccggcggcaatggcggtacacgaaaatcatggaaatgccatctgtagattgggtagatgtggctgacaattgggttggtggatgttgcacctcatttggtggtgcaggcgagaaacttgtatctcagtttattagggcatatggtcgtttagaaggaacaagtctactggatgcaacttccattactgtagaaacagacaatcttgaaacagatttagtgtctcaggtagcttgttcagcacttagtagacattttgttgctataaaagaagatatatttaatgttagtgtagaaaaagatcataccactgggaagataaagttgaagaattcagaagagcaagcaaatatcacagctactcatgcacaaccacctattattttggaagaggggcctagtgttagttgtagtgaaacaaacggagtcactcagactaatcagcctggcatttctcagacagaagctgatactgatgcatactttgagaagtctgaaaatgactgttgtgttgagaaagtggggaaatctaagaaagaggttgatttgttgctggtagatccatgccgttgctgttgtgtcaatggatacagtgagaaagctgaagataacccttcacagttgtccttggtcaatgagaaaaagcagaatatgttggagattaaaagagattacaaattaacaaaaactatttctcttggtagtagcttcattgttaaagcatctaaccttttgaatgattttgagtgggttgaacttctctgtggtcaatgttcatcacctcttggctcatacccttctcagtgttcgcttggtccagctgatggccgcctacgactcttcaagtgctacacatctacagaaattcctgtaacagggcctcatgatgtgtttagatattctacacctattgccaagaaatcgattccatcactgatacatggacatacattatttat

SEQ ID NO: 53950 - DNA, 2472 bp, Zea Mays
atgaagcagcctcaggaagcaaaggacagatctgggcatggacatcgcggggctcccttccgacatcctcgtggaggtgactgcaagcatcgcgacgaggtcgccgactcccctcagcgacgtcgtcagcttcaggcggtcgtgcaaggtgttccgcgactgcactggtgggacaaggcgaggttcctgtcggtgctccggcggtgcgcggccagcggcaaccccgaggcgtcctacatctttgggctggagctgttctgcaaccggccggggagagaagccagcgggctccgccgcgccacggagcgcggccacgccgccgcggcctacatggtcgagatgctcacgctgcaccacgcgcactcgccgcctggcggcaccgagcgggcgctgcaacgcctggactactgctcgtccgccggcgctggacacggcgcagggccgcctccgtccgcagagaggccgtgtcgttcgtgcgcaggctgacgctgcgtcggtggaggatggccgagcctcccacgccctgctcgaatcgtccgtggtgcggcaaggtggaggcggtcgaggccaggggcgtccaagttgagaggccctgttcaaaaggtagcaaaaaatatcaacaacattaacatagatttttattaccaataaaattagggtaggctagagttaaaatccaacaagttgtcaccgaaaggggaacgagagagaaagggagaaacttttgagagcactaatttgaaaaaaagtctaatcacggttcggacacgtggataacttcttttcatgcacttctatctaaacacaactccattaggatattacattccttcataccccttttgattatcttctcccatgtcaagtttggtcgatcactacctctcttcacgttattgtcccgttttatgatgcttctatgcaccggtgcctctgtaggtctccgatggacatgtccaaaccatctcaaccggtgttgaataagcttttcttcaattgacgctacttctagccgatcgcgtatgccatcgtttctcattcggtccaaccttgtgtgcctacatatccaacgcaacatacgcatctctgcgacacttagttgttgaatatgtcgtctcttagcaacactcagccccatataacatagtaagcctaatcgttgtcctatagaacttgttttcaacttctgtggcactctcttgtcgcatacgactcccgatgtttgacgccattttatccacccgctttgattctatggctaacatctttatcaatatcaccatatccctgtagcatcgatcccaaataacggaacgtgcccttctttggtactacctggcctcccaaacttacatctccatcctcactaattgtaataccaaagtcacatctcatatacgcggttttggtcctgctaattctaaatccttttgactttagggtctgacgccataactctagctttctatttactccttcccgacttttatctactagaactacatcgtcagcgaaaagcatacaccaagggatatcttcttatatatccctcgtgaatgtgacaccccaggtgtctatttcatgctatgtcgggagatttgtcctaagctcggacgctctatgaaaatttctatctcttgatcacgtctatctccatttatcaagttacccatgaatgtttcaccaaatttcgagttattcgatctcgagaaatgacaaatttagagcctgttaaaacttttgtttcttgaaatgaatgtaaattcgaacgtcaatctcgtcttgacaatcctcgtataaagtttatttatccaaactctcgacagttgttatccgatctgtatctgaatccgatttcttgatattcggtctatatcaaaatacgtgatctgaatccgcattcttcggcgaaatctctgttgtgtcaacctctaattaattcttatgcaaatggacttgttatctctatgtcatcattcatctctagctatcaagtgtattctaaagatttctcgaagttgaagcaaatgctcgcatgagaagataaatactaggcttgcttgaaactgctcgtgtgaacaaatgcaaattttgaaattcgaacaaaccttgtaatcttgctcaaacaactctatatgaactctacaacacaagttattaatggtccatgccaagaaaatgtcgagaaaatactacgattggcttaaaatataatttgaagctttataacgatactactttgaccaaagtgaaactttgattttatatttgtaagtgcaatcaaccctaattgagggttttggtgattaaatgacaaaacaaacagagattctaacaagtttgctcctagcatgtacacagttattctacagacaggagaagcacagatcttataagcataaaaatgtaaagcacagcagattgaaagtctacatcatatggcgtgctccaagtgcttgaaaccaacggcag

SEQ ID NO: 53951 - DNA, 2150 bp, Zea Mays
ccatttcaaaaccgcgcaggatagtcgcgtctcttctcatccttcccgtctctcccccgctccgctccaccccgctcaaaaaccctaggcggcgcccgaatcccggatcccgcgtccggctcccccagcgcctccgcccgtgctcggcgtccatcgttgccggcctccccgatggacccagcggggccgcgcgtggccacggatcccgccggatcgggtgccgcaccgccgcgcgaggaattggacaggagaggaggggcgtgcagcggcgccgcagcggcggaggggagcgcgtcgcggctcgcgggcgctggactgggagatccgagggctggaattctggaatcttcaggtcaagcagaagcatatttgcacacatgtaccatggatgtttctcagttgactgctgaagtgcagaatcaatggagaagctgcatggcagtgagtccttgccatgctgtaaagagaacatcggaacagttcgccaacctaagcctgatccagaacatgttgacaataggatgagtgttgcacgtcttgggttggaccttaacacagtagatagttctgatgcagcagagcttaaccctttcttcccttacaagaagctgggacagtcgaaagtcagtgatccatcggaatgtggcagcactactgctgctacagcagaaagtgagtcacacaggaaatggagagaaatgaagcggaatggctttctttcttcgtctcatggaaatgcagtggtgcctaggccacgtggtcggcccccgaaaaggaaaaaagatgatgaattcaaaaggagcacttccacacagcatggccaggctaacaagtctgttaaggttgctgctcctagtggcctattatctgggctaaaccctggaatcattaaccatgtgagaaatagcaagcaagtttactccataataaaggctatggtacactctgagaggcttgagaatgagaagcagcctgcatttactagtcaaacaggtggaagagggagagaagccagtgagggaattcaggatgagaaatatggtgctggtttcaagaagtgccatatgttgatgaaagacaataatgcggtgtttcaccaagcactgcctaccacatcacagttccttgcacaggacggcgataggctcaaactgcaactctcatcagcagtcactatgtcttcagacagggcctgcagtacatcagctgatgatccagcaactaatcatgattacatgactgtactgtcagtaaaagtggttggaattactgcatcaggacatcaggggacgccttgctgctttaaagcgcagcaggaagagagtcagaaatgctcttcatacagaattgccttacctaatctcgacagaattttcatctaaccaagagaatgaatcatccattgcaaatacgtgtgatgctggatgtactgaaaaagcagtttcagaagcgcatgtggcacgatggaggtctctgtttgtccagatggaccgagcacttcaggaggaagggaaacagctggagaaccggttgaagcaagtgcaagaaatgcaatcgaattgtgataaaggcctcaaacacatgagctgtgaagctcctctgctaggacctattcctgagctatggaagctgaagaacccagatatttctgagagtgagtgggcggtgcaagctgccgccgcatcaatctactcgacctgcaacatggccatgagaacggagaacgtgccttgcttctgacctcacacttgtagttgtagtttagtttcttgcttttgctgatttttacctcaaaagttaggcctcttttattaccttcagtctttgtgaattgtgaccccttgtccatacactagcggcgagtcatgtaacgaggaagaaacttgatgtatgttgtcaccgtcctacgatttcacgggcccgtgaaagaacacattctttttatacacgaacatggtagtagtagtagcgatgagatctcggaacaggtgcgaagggcacgattggttgcctgcatagattagcaacgcatagattagcaaccaggcttatatagcatactaggtggatgcccgtgcgttgcaacgggaagataaaatatcacaataactcatgtacaaatatggtataatattatagaaaaaggttac

SEQ ID NO: 53952 - DNA, 2150 bp, Zea Mays
atcgtccatttcaaaaccgcgcaggatagtcgcgtctcttctcatccttcccgtctctcccccgctccgctccaccccgctcaaaaaccctaggcggcgcccgaatcccggatcccgcgtccggctcccccagcgcctccgcccgtgctcggcgtccatcgttgccggcctccccgatggacccagcggggccgcgcgtggccacggatcccgccggatcgggtgccgcaccgccgcgcgaggaattggacaggagaggaggggcgtgcagcggcgccgcagcggcggaggggagcgcgtcgcggctcgcgggcgctggactgggagatccgagggctggaattctggaatcttcaggtcaagcagaagcatatttgcacacatgtaccatggatgtttctcagttgactgctgaagaatcaatggagaagctgcatggcagtgagtccttgccatgctgtaaagagaacatcggaacagttcgccaacctaagcctgatccagaacatgttgacaataggatgagtgttgcacgtcttgggttggaccttaacacagtagatagttctgatgcagcagagcttaaccctttcttcccttacaagaagctgggacagtcgaaagtcagtgatccatcggaatgtggcagcactactgctgctacagcagaaagtgagtcacacaggaaatggagagaaatgaagcggaatggctttctttcttcgtctcatggaaatgcagtggtgcctaggccacgtggtcggcccccgaaaaggaaaaaagatgatgaattcaaaaggagcacttccacacagcatggccaggctaacaagtctgttaaggttgctgctcctagtggcctattatctgggctaaaccctggaatcattaaccatgtgagaaatagcaagcaagtttactccataataaaggctatggtacactctgagaggcttgagaatgagaagcagcctgcatttactagtcaaacaggtggaagagggagagaagccagtgagggaattcaggatgagaaatatggtgctggtttcaagaagtgccatatgttgatgaaagacaataatgcggtgtttcaccaagcactgcctaccacatcacagttccttgcacaggacggcgataggctcaaactgcaactctcatcagcagtcactatgtcttcagacagggcctgcagtacatcagctgatgatccagcaactaatcatgattacatgactgtactgtcagtaaaagtggttggaattactgcatcaggacatcaggggacgccttgctgctttaaagcgcagcaggaagagagtcagaaatgctcttcatacagaattgccttacctaatctcgacagaattttcatctaaccaagagaatgaatcatccattgcaaatacgtgtgatgctggatgtactgaaaaagcagtttcagaagcgcatgtggcacgatggaggtctctgtttgtccagatggaccgagcacttcaggaggaagggaaacagctggagaaccggttgaagcaagtgcaagaaatgcaatcgaattgtgataaaggcctcaaacacatgagctgtgaagctcctctgctaggacctattcctgagctatggaagctgaagaacccagatatttctgagagtgagtgggcggtgcaagctgccgccgcatcaatctactcgacctgcaacatggccatgagaacggagaacgtgccttgcttctgacctcacacttgtagttgtagtttagtttcttgcttttgctgatttttacctcaaaagttaggcctcttttattaccttcagtctttgtgaattgtgaccccttgtccatacactagcggcgagtcatgtaacgaggaagaaacttgatgtatgttgtcaccgtcctacgatttcacgggcccgtgaaagaacacattctttttatacacgaacatggtagtagtagtagcgatgagatctcggaacaggtgcgaagggcacgattggttgcctgcatagattagcaacgcatagattagcaaccaggcttatatagcatactaggtggatgcccgtgcgttgcaacgggaagataaaatatcacaataactcatgtacaaatatggtataatattatagaaaaaggttac

SEQ ID NO: 53953 - DNA, 2415 bp, Zea Mays
ccaggtgaagtggaatgacgtacgtatttcttgcaacatcaacctgagatttgtttccggtatgctgttccccattcatcaacaatgtttatctggaaaagaatacacaagaaagttagttcaagatcgagtgcctgaaacagttacaagagacccgcacattttgaggtggttatgcagtgtgacaaatgtgtgatttcccaacgacagagcatcataaccattcaagactactatggacgaatcaaatggtaatcaggcaggcgagagcattgattctcggataaatatcccaacccgtttttggttacttcaacaactacgtccatccttgcacagctgtctaggcagtagcaatccagcagcttctactggataacagtggaagtagtacctcatcacgaaccgttgattcagatgtatcgacactgtaatccaacaacattaaatgacatgtctacacacaataattgcacccgtcatgacatggtccagctgaaaatagctgcaggtgaaaatggcagcatacttgagactacaatttgcactcatcatcttggtttcaaggggggcaaaaagaatacaatttgcactcatcgtctgcatcctctccttcccaaggccccttgcctagcatcctatctttaaacattcctatctttaaacgtttgtgcctcccaaggaggtttagaaatgagactacatgttctgatgaacttaccaactcttcatatattttctgcaagagatgtacatgtccacaatgctcttgggaaaatcatcaacgacaacagtaataatcctaaacatttccttactattagcccttactattaatgacaacaataataatattccgtgaacccaaaacccttccacttaccttcgccatccatccacgtccccatggaggtgaccgtcgagctctcttcatctgccgatgcgaggaaggaggaccacatcagcgcgcaccctcacacgtttaaacttcttttggtggacatttgtgtgggttgcgaaagctcaacctcatggccctgacacttagagaatcggcaagccccgcccatacgaatggtcacacaaagtgtgggcactcacatggcaaaatggacctaagtatattgctctgccacttcagattttggatccaacaatgcataatcctcattctgtaaatctctttctggtatttcttagtatttgtaatttagttggggggtttcaggtttgcaaaaccaggcaagcggcagtgaggtgaccgtcgagctctcttcatccgtcaatgcgaggaaggaggaccacatcagcgcgaaacgtttaaacttcttttggtggacatctgcgtgggttgcaaaagctcaacctcctggccctggcactcagaattggcaagccctgcctatacgaatagtcacagagagtgagcactcacatgggcaaaatagacctatgcatgcactaccttccacttccctttgccatcccatccacgtccccatggagttgagcttgagcggcggcttggtgaccgccgatgagagatggtggttgagtttagggtttaggtccagagattttgcgtttagggtctagggtttcctaagaatgtccaggcagagagtgggcactcacatcctggtcgtcaccggccggccaggcagaaataaatgagatcaggagtcggacctgatctggggtatgatgtccttgtggctttcagttatggaatattcttataaaaaagtgtaaataatccatgttcgagaaaaatatatttgatgttgtaatatggaatatttttattagaaaatgtaaatactccatgttctagtcagaaatatttgacattttgaccttcgattatgcaatattttttataaaaagtgtaaacatttcatgttcgagacaggaatatttaaggttttaatatggaatgttcatataacaaagtgtaaatattccgtgttatattcagaaatatttgaccttctattacggaatattcttataacccctaaacttaaaaaacccagaaccctaaaaacactaaaccctacctaaacctcgctctaaacccataaaaccctgaacccaaaatcctaaacctccctcccctgcaaatgtgtagaatctgtttcaaacccgtgacccagtgacttgtgagacagctctcaccagtcaccactacaccaggcctgcccttcaaattgattactgttgttgagacctttggtacacttccacctacatgctaaaaagagatactcttctacagaagtaaataacaagtggccaggtaagtaaatattttaaagaaatgagagcaaaattgcatacctgatgtaatatgcagctatgtttaatatagtcctaatatcttcaactctataacatggctaggatcaaggtctg

SEQ ID NO: 53954 - DNA, 1227 bp, Zea Mays
gtttgggcagcggcaggttcatgcggtactgtgaccaattacggcaagatttaattccaatgaccagaaatatatatgttgcactcattgttgcatacgcaagacttggtaattttgatatggccaagcaggttctactcgataaagaaataccatgtaagttcctcagtgacatcaagagcgcacttgtaggagcgctggcattaaatgggcaagtgtcggatgcacttcgcttgcatgatgagataatgcaatccggcggctccctggaaccaaaagctgccattgccttgattgagcatattcgaacagaaggtgaactggatagaatgcatcaacttctcgatgggctgaatgactcaaacagctggtttgatggctgtggcagagtacttttatactgtgtccagcacaactatcctgatgctgcaattgatctacttaagcagatcagggagaaagatgaaatgagtacatatatggttgttgatcaggttttttgccaaatatgggacatggagaccacaaatttggattttggaatggtgtttcttgatgctgtcaaagagcttggacttaatgtttctcggacaagccttgactttcttctcagcgcatgtgtaaaagcaaaggatttgcgacgtgcccaacagatctggacagaatacgaatctgctggtcttccacacaacgtgctgagttccttgaggatgtatcaagcttttctttcatctgggggacgtaaggcggctaagaagttgttgaaaaagatacaaaaggaagatgctcacgtgcgctacataacatatgcttgtcgtgcgacatactgcagtaaagacttcaagccttctgctacagttaggttaagttccaaaggaagagctagatcaaaacctactaatgaggggtaagaggtctatttacttttaccacttccgttgcagtgaaatactgaaacgggatgaaatcaattcttttgttctgggaaattcgctcgtacttgttaactcctatcgctttggatcttagagactagggtgatcattgctaacatcggattatatcttaagcaattggtggagccatggagattttctgattttattttttgtgtgcatatcatggtcaatatgaagccttcacctataggcttaaaggacaagggaattctaaattgtagccgaacagataaagaccctgcccttcgtaatcagcttctcttaacaa

SEQ ID NO: 53955 - DNA, 2787 bp, Zea Mays
gccgcaagcacaacaccgaaccgctaaacccactcacgcactcgcgcccgcatcactcaccgaccagcgacggcggcgggtttctccgtccgccgccctgcccggtcacccatgtggaagcgcctcctggagaccaccaagcaggtcgtctcctccaagcaggccatcccctacgcagccgtcacccccaagcccgcgacccccgccgccgccccgtcggcatccaagcgcggcgcccctgttgctgcgccgaagctatccaccctgaagagtccctcctacaggcgacgcgccgccgccggcccagccaccaccgtcacgcaggcatccctcctgcggctcaagcaggccgcggcctcgaagaagaccaacttgccgtcctcccccccactgaatgacgcccacgccctagatgaggatgacccgccagaggctctcaccaaggcgctcatgttcgtcatagatgcacctgaagaggtggaatgtacgacttccccggaagcgctaccggagggctccgaagatgttggggaggttgccaggggcaataagatattggactttgagtggttccaggccgaaccatcgagggacccgctgatgctttggaggagggaggtggccagggagaagaagaaacactacatattcaagaatgtggagagccaccactacacaaatttgatgcgtatttgcgctaataagcttgggatggaatcgacaatagaatttcttggaaacttggggcgggaaacaggggtcaaggagttcaattcgatgattaaggtttgcctaggcaaggcaaaggcttgcagggatattgactctgctgtggagtatatttatcgggcgtatcaccttttcaataccatgaaagataaggggttcacgattgagaaagatatctatgacccattcctcttgtatcttatggacacggggatgtttgaggaatttgaggtgttcagtgcattctttaaggaggcgaatccgaagtccttctctagaatagcttattatgagatgttgctttgtattagagttcaagatgaagaaaaaatccaggaactttgtcactctgttgaagactacgatgagaaagttcactatgacctagcagagagttacatgctggcctttgctgaaagcggcagaaaggaagatctggttgccttgttggatttggttgatctatccaaagtttcaggttcaaagtacataactaatattttcaaatcattgggcaagctagaactagagaattatgtggagaaacttcttgagaggatgatgtcaaaaggatgtgctgatcacgacatttcatccttgattttggagtataccgcaaatataccgaatataatgacatgctagtggcatttcataaatggcatgagaagtttgaggtagcaccctctattgatgcatatgacaagatcgtctctatctgttgcgattcatcaaagaaaaactacaatggagcacaaatggtcatgtctcaaatgcagattgctggagtaaaaccagattctgagacattcagttatttgatagcgaattgtgagtctgaagagaacatttctaagtactgtgaccaattacggcaagatttaattccaatgaccagaaatatatatgttgcactcattgttgcatacgcaagacttggtaattttgatatggccaagcaggttctactcgataaagaaataccatgtaagttcctcagtgacatcaagagcgcacttgtaggagcgctggcattaaatgggcaagtgtcggatgcacttcgcttgcatgatgagataatgcaatccggcggctccctggaaccaaaagctgccattgccttgattgagcatattcgaacagaaggtgaactggatagaatgcatcaacttctcgatgggctgaatgactcaaacagctggtttgatggctgtggcagagtacttttatactgtgtccagcacaactatcctgatgctgcaattgatctacttaagcagatcagggagaaagatgaaatgagtacatatatggttgttgatcaggttttttgccaaatatgggacatggagaccacaaatttggattttggaatggtgtttcttgatgctgtcaaagagcttggacttaatgtttctcggacaagccttgactttcttctcagcgcatgtgtaaaagcaaaggatttgcgacgtgcccaacagatctggacagaatacgaatctgctggtcttccacacaacgtgctgagttccttgaggatgtatcaagcttttctttcatctgggggacgtaaggcggctaagaagttgttgaaaaagatacaaaaggaagatgctcacgtgcgctacataacatatgcttgtcgtgcgacatactgcagtaaagacttcaagccttctgctacagttaggttaagttccaaaggaagagctagatcaaaacctactaatgaggggtaagaggtctatttacttttaccacttccgttgcagtgaaatactgaaacgggatgaaatcaattcttttgttctgggaaattcgctcgtacttgttaactcctatcgctttggatcttagagactagggtgatcattgctaacatcggattatatcttaagcaattggtggagccatggagattttctgattttattttttgtgtgcatatcatggtcaatatgaagccttcacctataggcttaaaggacaagggaattctaaattgtagccgaacagataaagaccctgcccttcgtaatcagcttctcttaacaa

SEQ ID NO: 53956 - DNA, 2794 bp, Zea Mays
gccgcaagcacaacaccgaaccgctaaacccactcacgcactcgcgcccgcatcactcaccgaccagcgacggcggcgggtttctccgtccgccgccctgcccggtcacccatgtggaagcgcctcctggagaccaccaagcaggtcgtctcctccaagcaggccatcccctacgcagccgtcacccccaagcccgcgacccccgccgccgccccgtcggcatccaagcgcggcgcccctgttgctgcgccgaagctatccaccctgaagagtccctcctacaggcgacgcgccgccgccggcccagccaccaccgtcacgcaggcatccctcctgcggctcaagcaggccgcggcctcgaagaagaccaacttgccgtcctcccccccactgaatgacgcccacgccctagatgaggatgacccgccagaggctctcaccaaggcgctcatgttcgtcatagatgcacctgaagaggtggaatgtacgacttccccggaagcgctaccggagggctccgaagatgttggggaggttgccaggggcaataagatattggactttgagtggttccaggccgaaccatcgagggacccgctgatgctttggaggagggaggtggccagggagaagaagaaacactacatattcaagaatgtggagagccaccactacacaaatttgatgcgtatttgcgctaataagcttgggatggaatcgacaatagaatttcttggaaacttggggcgggaaacaggggtcaaggagttcaattcgatgattaaggtttgcctaggcaaggcaaaggcttgcagggatattgactctgctgtggagtatatttatcgggcgtatcaccttttcaataccatgaaagataaggggttcacgattgagaaagatatctatgacccattcctcttgtatcttatggacacggggatgtttgaggaatttgaggtgttcagtgcattctttaaggaggcgaatccgaagtccttctctagaatagcttattatgagatgttgctttgtattagagttcaagatgaagaaaaaatccaggaactttgtcactctgttgaagactacgatgagaaagttcactatgacctagcagagagttacatgctggcctttgctgaaagcggcagaaaggaagatctggttgccttgttggatttggttgatctatccaaagtttcaggttcaaagtacataactaatattttcaaatcattgggcaagctagaactagagaattatgtggagaaacttcttgagaggatgatgtcaaaaggatgtgctgatcacgacatttcatccttgattttggagtataccgcaaatataccgaatataatggttgaagacatgctagtggcatttcataaatggcatgagaagtttgaggtagcaccctctattgatgcatatgacaagatcgtctctatctgttgcgattcatcaaagaaaaactacaatggagcacaaatggtcatgtctcaaatgcagattgctggagtaaaaccagattctgagacattcagttatttgatagcgaattgtgagtctgaagagaacatttctaagtactgtgaccaattacggcaagatttaattccaatgaccagaaatatatatgttgcactcattgttgcatacgcaagacttggtaattttgatatggccaagcaggttctactcgataaagaaataccatgtaagttcctcagtgacatcaagagcgcacttgtaggagcgctggcattaaatgggcaagtgtcggatgcacttcgcttgcatgatgagataatgcaatccggcggctccctggaaccaaaagctgccattgccttgattgagcatattcgaacagaaggtgaactggatagaatgcatcaacttctcgatgggctgaatgactcaaacagctggtttgatggctgtggcagagtacttttatactgtgtccagcacaactatcctgatgctgcaattgatctacttaagcagatcagggagaaagatgaaatgagtacatatatggttgttgatcaggttttttgccaaatatgggacatggagaccacaaatttggattttggaatggtgtttcttgatgctgtcaaagagcttggacttaatgtttctcggacaagccttgactttcttctcagcgcatgtgtaaaagcaaaggatttgcgacgtgcccaacagatctggacagaatacgaatctgctggtcttccacacaacgtgctgagttccttgaggatgtatcaagcttttctttcatctgggggacgtaaggcggctaagaagttgttgaaaaagatacaaaaggaagatgctcacgtgcgctacataacatatgcttgtcgtgcgacatactgcagtaaagacttcaagccttctgctacagttaggttaagttccaaaggaagagctagatcaaaacctactaatgaggggtaagaggtctatttacttttaccacttccgttgcagtgaaatactgaaacgggatgaaatcaattcttttgttctgggaaattcgctcgtacttgttaactcctatcgctttggatcttagagactagggtgatcattgctaacatcggattatatcttaagcaattggtggagccatggagattttctgattttattttttgtgtgcatatcatggtcaatatgaagccttcacctataggcttaaaggacaagggaattctaaattgtagccgaacagataaagaccctgcccttcgtaatcagcttctcttaacaa

SEQ ID NO: 53957 - DNA, 1493 bp, Zea Mays
gccgcaagcacaacaccgaaccgctaaacccactcacgcactcgcgcccgcatcactcaccgaccagcgacggcggcgggtttctccgtccgccgccctgcccggtcacccatgtggaagcgcctcctggagaccaccaagcaggtcgtctcctccaagcaggccatcccctacgcagccgtcacccccaagcccgcgacccccgccgccgccccgtcggcatccaagcgcggcgcccctgttgctgcgccgaagctatccaccctgaagagtccctcctacaggcgacgcgccgccgccggcccagccaccaccgtcacgcaggcatccctcctgcggctcaagcaggccgcggcctcgaagaagaccaacttgccgtcctcccccccactgaatgacgcccacgccctagatgaggatgacccgccagaggctctcaccaaggcgctcatgttcgtcatagatgcacctgaagaggtggaatgtacgacttccccggaagcgctaccggagggctccgaagatgttggggaggttgccaggggcaataagatattggactttgagtggttccaggccgaaccatcgagggacccgctgatgctttggaggagggaggtggccagggagaagaagaaacactacatattcaagaatgtggagagccaccactacacaaatttgatgcgtatttgcgctaataagcttgggatggaatcgacaatagaatttcttggaaacttggggcgggaaacaggggtcaaggagttcaattcgatgattaaggtttgcctaggcaaggcaaaggcttgcagggatattgactctgctgtggagtatatttatcgggcgtatcaccttttcaataccatgaaagataaggggttcacgattgagaaagatatctatgacccattcctcttgtatcttatggacacggggatgtttgaggaatttgaggtgttcagtgcattctttaaggaggcgaatccgaagtccttctctagaatagcttattatgagatgttgctttgtattagagttcaagatgaagaaaaaatccaggaactttgtcactctgttgaagactacgatgagaaagttcactatgacctagcagagagttacatgctggcctttgctgaaagcggcagaaaggaagatctggttgccttgttggatttggttgatctatccaaagtttcaggttcaaagtacataactaatattttcaaatcattgggcaagctagaactagagaattatgtggagaaacttcttgagaggatgatgtcaaaaggatgtgctgatcacgacatttcatccttgattttggagtataccgcaaatataccgaatataatggttgaagacatgctagtggcatttcataaatggcatgagaagtttgaggtagcaccctctattgatgcatatgacaagatcgtctctatctgttgcgattcatcaaaggatcgcaaaacaggggatgt

SEQ ID NO: 53958 - DNA, 442 bp, Zea Mays
cccatatccaaatcgcgcagaagctgtcgtccctgcgcatggcggttccaggctttacaaattattaagtattacagaagcttcgttaccagaaaagcttcggttttgatcaaaggaggtgcgacgaagcaagcttcgttacgatgacgtaggaagatggcataggaagaaggtgttcattcaaactgctaggtgcaaatgacaaaattgtccctgtgacatttgtaaaccttgtatgtattcttcgaggacacaaatgtaatatcgtacaaagctatatgattgcctatcaataggtgaacaatacccacatactgttcacgcaggactgtaactgcattcacgtttttaacttcaatcaagccgaagacctgttcttcatgactgttggggtcttcttctctaccgaaggtcctcaaggcaaaaaaacctttggcaaaat

SEQ ID NO: 53959 - DNA, 171 bp, Zea Mays
tctccctccccatatccaaatcgcgcagaagctgtcgtccctgcgcatggcggttccagattgcgatctgtttccgagcttcgaggaatcgaggatcaagcgttggcgaccaagtgatatagctcttcgagttctacagagttgaagaccctgagcatctgtttggtgaag

SEQ ID NO: 53960 - DNA, 307 bp, Zea Mays
ccacctccctcgttctcttttatataaccaccctgctgtcacataacctctagtctccctccccatatccaaatcgcgcagaagctgtcgtccctgcgcatggcggttccagattgcgatccatttccaagcttcgaggaatcgaggatcaagcgttggcgaccaagtgatatagctcttcgagttctacagagttgaagaccctaagcatctgtttggtgaaggcaagtgtcctctgacctattatgtcctactcacttatatttcattgtcccgcattacattattgaaacctaaggaccgacta

SEQ ID NO: 53961 - DNA, 2057 bp, Zea Mays
tatcaaactgggcgcagcactttctaataatactcgtttcaactattgcaactgtctgcatatttcttgggtcaaagatagaagacacaccttgtcaattgaaacacgtggtcattgtgtcatatgaaacaatgtaccataaaaatccggatgctgctaagagaatccaccaggagcatgaagtgcttgcgaagcaaaaggcactgattttggtgggggagacactgctgctttcaacaataaggtttgatttcaatatacatcatccttatgaacctctaaagctcgcgctgaagaagctgggcattgccgagacggaactgagacaatctgctatgagtctcattaacgatacgcttccgtcaactctagtcatccagttcaaaccacagtatattgctgcggcatcactgtggtttgctgccaaatttcacaacgttaatctttcccagaatgggacaatatggtggcatgtgttcgatgttgctccagatccgttgagagttgttgtgcagcaaatgtctgagctctttgagaaaagagccccatgctccgtgggtcctgttaccaagccagtaccagcttcaagcgcgacggataaacaccagatcaagccggccccaactcatactccaatggataagcatcagatcaagcaggttccagctccaatgaatagacatcatatcaagccggttccaactcccatcccaactccgatggataagcagcagaacaagctagctccaactccgatggataagcagcagaacaagctagctccaactccgatggacaaacagcagaacaagccggctgcagctccagctccgacggacagatgtcagagagtaagcaccccggttcctgcaccgagggacacgcaatcttcaaggagaagctttagcagcagcagcaacacagaagctcctagacgtgtgcctgcaggccgttcatctaacgagaagcccagagacaggtcgccaaggcatgaagggcactggtgccgaggaaaggatggagagaaccagcattgtcaaaaacacagagaccataactctgagcagaggccagaagaacggtctaatcagagagctctgaagtctggtcttgcttaccttgttcgtagtggtgggccgaaggatacaggtgcagcaacagagatcaggaacctgaccagacggaagagaaggatccaggaggttggagggctcccaactcctgtttacacgtcggatacggatgcttggaggcaagttagcgctgtagttctttttggaacgaagggacagaaaaggccgagaggagatgaaccgtaggagttgccgccttttttatttggtattttgcagagaaggtcgagagaagatgaaccgcgtaggagttgccgttttcatttggtatttggcagagaccgacggctggtctttgctggactgatgatactttgagacaaaggtgtctaatgtggacggggtctgtgaattaagttcactcgtgcgcatcagatgcacccagcttgcactgaaaatgacacgctattgtctccatggaccaggctgttccggttctgtaggcacggatggacagtgatggagagaaagctggttttgggcaccacctggtgccagccatctttgttttggactgagctgtatggctcaaaacaaattttgtagtgtgtgtccatgtgtatattaggacggtgttctaattctgtctcagatcgtccagtgctatttagttatttacaccgtgcctgtctgtccttcgagttctcagtttttagtggcttattggtgaaaatttgttatccgtttgaaatttctcatgcgaacgaggaggagatttgacagtgccttggccgtcgacacaatccgccaacacatttgatcattaccagcttctgcaatatgctctagagagcctggtttgtacaaataaagggagaacagacagatttttgtacagcctgatggcatagcgttagccattgtatcatatacaaggactggcccgagcgaatacgctcctggagtccttttgcacaacgagag

SEQ ID NO: 53962 - DNA, 2365 bp, Zea Mays
cttttcccctaggccaaggtctggccttccggtctttcttcacgccgtttgtgcggtgcggtggcgatcgtccgcgatgggcgccgcgcggggagaggaggacggggaggggcgctgcggcgagcggtgcccgtcgtggtacgtgagccgggaggagatcgagagcggctcgccgtcgcggcgggacggcgtcagcgcggccaaggaggccgagctccgggccacctactgctccttcatccgcgacgtgtgcatcagactccgactgccgcagattacaatggccacggcgatcatgctctgccaccgtttctacctccgccagtctcatgccaagaacgagtggcagactattgcaactgtctgcatatttcttgggtcaaagatagaagacacaccttgtcaattgaaacacgtggtcattgtgtcatatgaaacaatgtaccataaaaatccggatgctgctaagagaatccaccaggagcatgaagtgcttgcgaagcaaaaggcactgattttggtgggggagacactgctgctttcaacaataaggtttgatttcaatatacatcatccttatgaacctctaaagctcgcgctgaagaagctgggcattgccgagacggaactgagacaatctgctatgagtctcattaacgatacgcttccgtcaactctagtcatccagttcaaaccacagtatattgctgcggcatcactgtggtttgctgccaaatttcacaacgttaatctttcccagaatgggacaatatggtggcatgtgttcgatgttgctccagatccgttgagagttgttgtgcagcaaatgtctgagctctttgagaaaagagccccatgctccgtgggtcctgttaccaagccagtaccagcttcaagcgcgacggataaacaccagatcaagccggccccaactcatactccaatggataagcatcagatcaagcaggttccagctccaatgaatagacatcatatcaagccggttccaactcccatcccaactccgatggataagcagcagaacaagctagctccaactccgatggataagcagcagaacaagctagctccaactccgatggacaaacagcagaacaagccggctgcagctccagctccgacggacagatgtcagagagtaagcaccccggttcctgcaccgagggacacgcaatcttcaaggagaagctttagcagcagcagcaacacagaagctcctagacgtgtgcctgcaggccgttcatctaacgagaagcccagagacaggtcgccaaggcatgaagggcactggtgccgaggaaaggatggagagaaccagcattgtcaaaaacacagagaccataactctgagcagaggccagaagaacggtctaatcagagagctctgaagtctggtcttgcttaccttgttcgtagtggtgggccgaaggatacaggtgcagcaacagagatcaggaacctgaccagacggaagagaaggatccaggaggttggagggctcccaactcctgtttacacgtcggatacggatgcttggaggcaagttagcgctgtagttctttttggaacgaagggacagaaaaggccgagaggagatgaaccgtaggagttgccgccttttttatttggtattttgcagagaaggtcgagagaagatgaaccgcgtaggagttgccgttttcatttggtatttggcagagaccgacggctggtctttgctggactgatgatactttgagacaaaggtgtctaatgtggacggggtctgtgaattaagttcactcgtgcgcatcagatgcacccagcttgcactgaaaatgacacgctattgtctccatggaccaggctgttccggttctgtaggcacggatggacagtgatggagagaaagctggttttgggcaccacctggtgccagccatctttgttttggactgagctgtatggctcaaaacaaattttgtagtgtgtgtccatgtgtatattaggacggtgttctaattctgtctcagatcgtccagtgctatttagttatttacaccgtgcctgtctgtccttcgagttctcagtttttagtggcttattggtgaaaatttgttatccgtttgaaatttctcatgcgaacgaggaggagatttgacagtgccttggccgtcgacacaatccgccaacacatttgatcattaccagcttctgcaatatgctctagagagcctggtttgtacaaataaagggagaacagacagatttttgtacagcctgatggcatagcgttagccattgtatcatatacaaggactggcccgagcgaatacgctcctggagtccttttgcacaacgagag

SEQ ID NO: 53963 - DNA, 1825 bp, Zea Mays
ccattccctggcccatcgagcccacttacacgttaacttaccctattctttctgctcaacttggcctcacgcacgatagccgccgccgtcgaccagagcactcccccgtcgtcgccacgatgtcgtctgagcctccacccgcctcctctgccgccgccggagaggaactcgctgctgacctttccgccgctaccctcagcaagaagcagcagaagaaggacgcgaggaaggcggagaaggcagagcagcgccagcgtcagcagcagcagcagcagcagccggcggacgccgaggacccgttcgcggccaactacggcgaggtccccgtcgaggagatccagtcaaaggccatctccggccgctcgtggtcccatgtcggcgacctcgacgactccgctgcgggccgctccgtgcttatccgcggagccgcgcaggccatccgtccggtcagcaagaagatggctttcgtcgtgctgcgccagagtatgagcaccgtgcagtgcgtgctcgtcgccagcgccgacgccggcgtcagcacgcagatggtgcgcttcgccaccgccctcagcaaggagtccatcgtcgacgttgagggcgtcgtctccctcccaaaggagcccctcaaggccaccacacagcaggttgagatccaagtgaggaagatctattgcatcaatagggctattccgacccttccaattaaccttgaagatgcggctcggagtgaggcagattttgagaaggctgaattggctggagaaaagcttgttcgcgttggccaagatacccgcttgaactacagagctattgatctacgaacaccctcgaaccaagccatattccggatccagtgtcaagttgaaaacaaatttagagattttttgttgtcgaagaactttgtcgggatccacaccccaaaattgatttctggatctagtgaagggggtgcggctgtattcaagcttctgtacaatggtcaacctgcttgtttggcacaatcccctcagttatacaagcaaatggctatctctggtggttttgagcgagtatttgaggtcggccctgtgtttagagcagaaaattcaaacacacacaggcatctatgtgagttcgttggtcttgatgctgaaatggagattaaggagcattattttgaggtctgtgacattatagatggcttattcgtatcaatatttaaacacttgtctgaaaactgcaagaaagaactcgaatcaataaacaggcagtatccatttgaacctctgaagtatctagacaaaaccttgaagctcacttatgaagaaggaattcaaatgttgaaggaagccggaacagaaatcgagcctatgggtgacctcaataccgaagctgagaaaaaacttggtcggcttgtcagggaaaagtatgacacagattttttcatcctgtatcggtatcctttggctgtacgtccgttctacaccatgccttgttatgacaacccagcgtacaccaattcttttgatgtcttcattcgaggcgaggagataatatctggagcacaaaggatacacactcctgagctgctggccaagcgcgcgacagagtgtggaatcgacgtgagcactatctcggcctacattgaatccttcagctatggcgtgccgccacacggcggtttcggggtgggtttggagagggtggtgatgctgttctgtgccctgaacaacatcaggaagacctccctgttcccgcgcgacccgcagaggctcgtgccggttgcggatgtctcagctacatgatgagaaggacgatccatctacttcaacacaaaagacactagata

SEQ ID NO: 53964 - DNA, 2101 bp, Zea Mays
atcgagcccacttacacgttaacttaccctattctttctgctcaacttggcctcacgcacgatagccgccgccgtcgaccagagcactcccccgtcgtcgccacgatgtcgtctgagcctccacccgcctcctctgccgccgccggagaggaactcgctgctgacctttccgccgctaccctcagcaagaagcagcagaagaaggacgcgaggaaggcggagaaggcagagcagcgccagcgtcagcagcagcagcagcagcagccggcggacgccgaggacccgttcgcggccaactacggcgaggtccccgtcgaggagatccagtcaaaggccatctccggccgctcgtggtcccatgtcggcgacctcgacgactccgctgcgggccgctccgtgcttatccgcggagccgcgcaggccatccgtccggtcagcaagaagatggctttcgtcgtgctgcgccagagtatgagcaccgtgcagtgcgtgctcgtcgccagcgccgacgccggcgtcagcacgcagatggtgcgcttcgccaccgccctcagcaaggagtccatcgtcgacgttgagggcgtcgtctccctcccaaaggagcccctcaaggccaccacacagcaggttgagatccaagtgaggaagatctattgcatcaatagggctattccgacccttccaattaaccttgaagatgcggctcggagtgaggcagattttgagaaggctgaattggctggagaaaagcttgttcgcgttggccaagatacccgcttgaactacagagctattgatctacgaacaccctcgaaccaagccatattccggatccagtgtcaagttgaaaacaaatttagagattttttgttgtcgaagaactttgtcgggatccacaccccaaaattgatttctggatctagtgaagggggtgcggctgtattcaagcttctgtacaatggtcaacctgcttgtttggcacaatcccctcagttatacaagcaaatggctatctctggtggttttgagcgagtatttgaggtcggccctgtgtttagagcagaaaattcaaacacacacaggcatctatgtgagttcgttggtcttgatgctgaaatggagattaaggagcattattttgaggtctgtgacattatagatggcttattcgtatcaatatttaaacacttgtctgaaaactgcaagaaagaactcgaatcaataaacaggcagtatccatttgaacctctgaagtatctagacaaaaccttgaagctcacttatgaagaaggaattcaaatgttgaaggaagccggaacagaaatcgagcctatgggtgacctcaataccgaagctgagaaaaaacttggtcggcttgtcagggaaaagtatgacacagattttttcatcctgtatcggtatcctttggctgtacgtccgttctacaccatgccttgttatgacaacccagcgtacaccaattcttttgatgtcttcattcgaggcgaggagataatatctggagcacaaaggatacacactcctgagctgctggccaagcgcgcgacagagtgtggaatcgacgtgagcactatctcggcctacattgaatccttcaggaagacctccctgttcccgcgcgacccgcagaggctcgtgccgtaagtttctgattccaagcctgagtcttcgagtggtctacggagcagatccgatgttgttaccatcagagttgacttgcaatcttagctcctgaacctggcggttaccgtggatcagagttcctgttgaatttcacaaaagcctacttgttcctaatagattgctgcaaccaacaatattacgaccctttcgggcttttcttcccgcctcacgtgttattctggtctatacttgtttttaagtgcaagtattgctcagttacatatagcgtccattacgtagcggcctagcatagtactaccttagttcacaaatatatgacacctttgattttttcgaaaactttgaccactaatcttatttaaaatatttataaaattttaagttaagcacaaactaccttaaatgataaaacaaattataacaaaataaatgataa

SEQ ID NO: 53965 - DNA, 4850 bp, Zea Mays
tggctcgctactcgctagggttcaatccttgcgccgccgccacctactcgagccctcgcgctagccccctacgccacctagccgttcgccgtgcgtcgagtcctcccagccgcctcccgctcgtcgcgacctgcaggcctcggtcatccggcggtgttcttccggcctttcgtactgtcgctcatgaatcccgttctgtcgtgaatttgcatgcagtagcttgaactagaatgcctgcgaattagtctgccttctgtttttattcatcggagccaggttacgatatggtggtagtagctgtgatgagcactgctttcttctgacacctcttgtatgagcagggactttgttccctccgttgagcagattcagcaactctctgagctcctccctcgcattttttctgagctaacctggccatttgctccgtcatttagcattttattacgagtttgtgagatcgtaggtctttactttttctcagatgacgccgactgtgctgtgacgagctactccttatttctgacaccttgtgagccttgagcagattagcaactctctggatcgtcaatttcgtttgctattcttgatatgccctttgttcaattagtgaatttgcattcgtcaatctgactagtgacttacatgaatccttttcgtttggcatcagaggatgaaagcttgaaacaatcttaggacaccttctgacacagcgcgttacatcacgttgtgaatgagaaggcaattcttttctgatgatgctgtgcttcaatatgttacaaatcacatgtttttggattatttgttgtctacttttgtttgtgggttgggagcatgtgcgctatttctttcacccatatttcattttttttatgatgatgtgttgatgtagttatccttcaatttgccgcctgttttagttgtgataacttgatagaaaattgcctagcttcctgatgattaacctgttaaccaatgaaatcagctacatttgcaatttgttttgaactagatttgtaatggcatttaatcctagaattgcattcacctagatttgctgtgtttagattcttctgtgcagttctagggaatgtttgttttagtttcctgaatctgccatgagagtagtttggctatgttgtcccagtgaagatcccaagacctaccgataggaagtgccgtttgacactgcaaacagcagctgcctctctcagctgcaggtgttccatcctttgaccataacctttgtggtttggtcaggctggagctcccatctgcagctgtttgtttcagctgtggtgtgtgattttaatcgggtctctgagggactgtactaaatctgctgttatgtatgatttcattatcttgatgtcaatgctgaagtagtttgggcctgatgccacgtctctggtagccacgagcattgaccggagatgctatgattaggccgatacaaaggtgtttcaatgtttcacatgtcgataggaacctggggacggcttctatctgtccacagagccgttttctgtgattacagtcattgctttactataattattgttagtgctttgccttcagctcattttgttccgtatatttgttatgcatatggcaatgatgttgaagttaaaggcttgtttctcaacattcgcagtagccgcctaagagctttcgccctgccaggcttgagagcttgtgctgtttaatccttccttggatgtctgagccatacctgttcttgtccagctcatgattttgtcagtacgttctgtattatcttgctgttttattagctgttgtgcattgcaagtgatgatgaagtcaaggcttgtttctctacattcgcagttgccgcctaagagctttcgccctgccaggcttgagagctagtgctgccaaatccttccttggatgtctgatgcaatgcaatacctatgtttgatacttgtatttagcttgtgctgtttaatccttccttggatgtctgagacatacctgttcttgtccagctcatgatttttttccagtacattctgtatatcctgctgttttattagctgttgtgcattgcaagtgatgacaaaatcaaggcttgtttctctacattcgcagttgccgcctaagagctttcgccctgccaggcttgagagctagtgctgccccatatccttccttggatgtctgacacaatgcaatacctatgtttgatacttgttatttctgataatgggtgccctatgatgacaaaatcaaggcttgtttctctacattcgcagttgccgcctaagagctttcgccctgccaggcttgagagctaatgctgcagaatccttccttggatgtctgagggccgccacaaaaagtactgaactgctgtcttttgctatgcttgtaagatcatcatccagaatttcccaactgtttctagcgcacctccagtttattgcctgtgtgaagcaaaaggagcatccaaatcgtcttggtcatgggtctgtagtttatagttacggctggttgattgcaatgttgtgcaaacgctaatgtatttttaacagtgattgatttgttttttaatggtcaatgaatcaagtctcaagaatccgtcctgatttgtataagtttcatcaatttgaagaaatgtgatgacctgactcaaattctgatttgtaagtttcatagatctaaagatgcttcatagatctgaagatctaagcatgagcgtggtacaactaaggctttgttcgtttgtttcgggtgattgcatccggaatcgtttcagctaatcaaagtttatataaatcagagaaacaattcggttagaaatcgttccgacccaccaatccggcacaaacgaacaaggtctaaagttgcaaaggctggctgcatattttttcttggtagaatatccttcggtctaaatatgtgaagaaactggaacttttctgtattgatcagtccatgtttgggcacagaagcactgtgcctttgtatgtgatggaagtagagagctcaaagtttaatgtattttttgttaaagtacgaacttcggttcattactatgctccatgtgactgaaccgctatgttttgcaccccaaccggagtgcctactgctgtatcatcttgtttattctgttgctgcagcgccctctcggcttccatctttctgaatgccgtggaacttatcttgtcccccgtcgactcctctggcaccagctctatcacctcgatctgcaagattttaataaaccacatgaggcgtgtcctcccggcaacgtctccttgctgctccaaggttcgcatacgatcagcaccactactaaagagtagacggagggagggggcaaagcaagagcatccccgacctgacaatgatggcctcaaggccttggtcaacgatggatgggccgaaagggtcgacgatgggctccacacgaacatcaaggtcgggctttatgaactgcagatggaaagagcagagtttttttttgtcaagttggagcgaggcagctgcatcatacgtactactttgtttcatctaatatataagttttaatcgtcatttaattaagggtgcctgttgctcatgtgcacgggatttactggaacaggaggattaccttaatataatccatggcattctgcatccgcttctcgatcggttgtatcaggtcggcgtactgcagggaacaaaagcaaagcagccaaaggggaaaagacggcatcaaacttctctactacataagcaaagtcagtctttagattcttcagctcacttctctacgccatgaccaccaatatgcagctcacatgcacattttgtagacggggatatgctgttccattcaaccagtggttagtggctgaccgcccaacctactagactctattccccctaccaaacctttcaaatctgaaaaaaaaacctttgaaatctggaaccctgtccatgttcaatgaacctgcatacgaccgtgaaccagtagtatggtttcccaccacctgaaacgctaaacccggccattgttcgatgatcatgacatggggccattatttggtgatcatgacatggttttagtgtttgatgtcgacctattcctgtggactgtggtgcctctcagccgtctctgattgcgctagattaccaccactcgtcagcccatacccccattggttcggtcccattgcggttgcgctataattaggggggctgtttggatgctaagaattagccacctaatctgctaaaagtagccaataaccaaactattagctgcgttcaactaattttagcagctaactgttaactgtagtgcatttgaacaccggtgtttagatgcagagataatagttctttgataaaaaaattattagtcgaattagctagtttgctaaagaaaagctaatagttaaactactagctagactgtttagatgtctttgattaattttaacagctactctagtgcatccaaacatggtagcatagtttgagaccgcaagccatcctacctacctccgttcaaagttccaaatcgaggctacagacttgagacggcttggcttgcaatttgaaagggagcggccgagcgagcatgcgttgatggggatcacatgtggaacatgcagctggggcgtgtgtgtgggttgagacgtctgacgtcccgggattttaaaaagcctgacgttgctgtggcatccgctgcgcggcatgcagggacgcgatggtcggggtttgttttagcgtggaataagcaatggcgtgatcgggctctatgcaagcgtgcttgcgtcgatcgggtttggattagaagcgagagtgtattgtcggatgcatccggccagttggcg

SEQ ID NO: 53966 - DNA, 4100 bp, Zea Mays
cctggctcgctactcgctagggttcaatccttgcgccgccgccacctactcgagccctcgcgctagccccctacgccacctagccgttcgccgtgcgtcgagtcctcccagccgcctcccgctcgtcgcgacctgcaggcctcggtcatccggcggtgttcttccggcctttcgtactgtcgctcatgaatcccgttctgtcgtgaatttgcatgcagtagcttgaactagaatgcctgcgaattagtctgccttctgtttttattcatcggagccaggttacgatatggtggtagtagctgtgatgagcactgctttcttctgacacctcttgtatgagcagggactttgttccctccgttgagcagattcagcaactctctgagctcctccctcgcattttttctgagctaacctggccatttgctccgtcatttagcattttattacgagtttgtgagatcgtaggtctttactttttctcagatgacgccgactgtgctgtgacgagctactccttatttctgacaccttgtgagccttgagcagattagcaactctctggatcgtcaatttcgtttgctattcttgatatgccctttgttcaattagtgaatttgcattcgtcaatctgactagtgacttacatgaatccttttcgtttggcatcagaggatgaaagcttgaaacaatcttaggacaccttctgacacagcgcgttacatcacgttgtgaatgagaaggcaattcttttctgatgatgctgtgcttcaatatgttacaaatcacatgtttttggattatttgttgtctacttttgtttgtgggttgggagcatgtgcgctatttctttcacccatatttcattttttttatgatgatgtgttgatgtagttatccttcaatttgccgcctgttttagttgtgataacttgatagaaaattgcctagcttcctgatgattaacctgttaaccaatgaaatcagctacatttgcaatttgttttgaactagatttgtaatggcatttaatcctagaattgcattcacctagatttgctgtgtttagattcttctgtgcagttctagggaatgtttgttttagtttcctgaatctgccatgagagtagtttggctatgttgtcccagtgaagatcccaagacctaccgataggaagtgccgtttgacactgcaaacagcagctgcctctctcagctgcaggtgttccatcctttgaccataacctttgtggtttggtcaggctggagctcccatctgcagctgtttgtttcagctgtggtgtgtgattttaatcgggtctctgagggactgtactaaatctgctgttatgtatgatttcattatcttgatgtcaatgctgaagtagtttgggcctgatgccacgtctctggtagccacgagcattgaccggagatgctatgattaggccgatacaaaggtgtttcaatgtttcacatgtcgataggaacctggggacggcttctatctgtccacagagccgttttctgtgattacagtcattgctttactataattattgttagtgctttgccttcagctcattttgttccgtatatttgttatgcatatggcaatgatgttgaagttaaaggcttgtttctcaacattcgcagtagccgcctaagagctttcgccctgccaggcttgagagcttgtgctgtttaatccttccttggatgtctgagccatacctgttcttgtccagctcatgattttgtcagtacgttctgtattatcttgctgttttattagctgttgtgcattgcaagtgatgatgaagtcaaggcttgtttctctacattcgcagttgccgcctaagagctttcgccctgccaggcttgagagctagtgctgccaaatccttccttggatgtctgatgcaatgcaatacctatgtttgatacttgtatttagcttgtgctgtttaatccttccttggatgtctgagacatacctgttcttgtccagctcatgatttttttccagtacattctgtatatcctgctgttttattagctgttgtgcattgcaagtgatgacaaaatcaaggcttgtttctctacattcgcagttgccgcctaagagctttcgccctgccaggcttgagagctagtgctgccccatatccttccttggatgtctgacacaatgcaatacctatgtttgatacttgttatttctgataatgggtgccctatgatgacaaaatcaaggcttgtttctctacattcgcagttgccgcctaagagctttcgccctgccaggcttgagagctaatgctgcagaatccttccttggatgtctgagggccgccacaaaaagtactgaactgctgtcttttgctatgcttcgccctctcggcttccatctttctgaatgccgtggaacttatcttgtcccccgtcgactcctctggcaccagctctatcacctcgatctgcaagattttaataaaccacatgaggcgtgtcctcccggcaacgtctccttgctgctccaaggttcgcatacgatcagcaccactactaaagagtagacggagggagggggcaaagcaagagcatccccgacctgacaatgatggcctcaaggccttggtcaacgatggatgggccgaaagggtcgacgatgggctccacacgaacatcaaggtcgggctttatgaactgcagatggaaagagcagagtttttttttgtcaagttggagcgaggcagctgcatcatacgtactactttgtttcatctaatatataagttttaatcgtcatttaattaagggtgcctgttgctcatgtgcacgggatttactggaacaggaggattaccttaatataatccatggcattctgcatccgcttctcgatcggttgtatcaggtcggcgtactgcagggaacaaaagcaaagcagccaaaggggaaaagacggcatcaaacttctctactacataagcaaagtcagtctttagattcttcagctcacttctctacgccatgaccaccaatatgcagctcacatgcacattttgtagacggggatatgctgttccattcaaccagtggttagtggctgaccgcccaacctactagactctattccccctaccaaacctttcaaatctgaaaaaaaaacctttgaaatctggaaccctgtccatgttcaatgaacctgcatacgaccgtgaaccagtagtatggtttcccaccacctgaaacgctaaacccggccattgttcgatgatcatgacatggggccattatttggtgatcatgacatggttttagtgtttgatgtcgacctattcctgtggactgtggtgcctctcagccgtctctgattgcgctagattaccaccactcgtcagcccatacccccattggttcggtcccattgcggttgcgctataattaggggggctgtttggatgctaagaattagccacctaatctgctaaaagtagccaataaccaaactattagctgcgttcaactaattttagcagctaactgttaactgtagtgcatttgaacaccggtgtttagatgcagagataatagttctttgataaaaaaattattagtcgaattagctagtttgctaaagaaaagctaatagttaaactactagctagactgtttagatgtctttgattaattttaacagctactctagtgcatccaaacatggtagcatagtttgagaccgcaagccatcctacctacctccgttcaaagttccaaatcgaggctacagacttgagacggcttggcttgcaatttgaaagggagcggccgagcgagcatgcgttgatggggatcacatgtggaacatgcagctggggcgtgtgtgtgggttgagacgtctgacgtcccgggattttaaaaagcctgacgttgctgtggcatccgctgcgcggcatgcagggacgcgatggtcggggtttgttttagcgtggaataagcaatggcgtgatcgggctctatgcaagcgtgcttgcgtcgatcgggtttggattagaagcgagagtgtattgtcggatgcatccggccagttggcg

SEQ ID NO: 53967 - DNA, 1497 bp, Zea Mays
tatgatgttacaccgaggaagaggaattggtagaagtcgtcttactgaagcacagtataggctttttaatctggtggtgaaggagatgacttacttgtgattgctgatacactccttggttaatttatgctccctccatttgctgcctggattgaagtcggcatggttagttcatcgcctcttcatatgatacgcaccaaatgcctgcattctgatcgtcctatcctgtgctaaactttgcgtcatccaaatttgtgatgaatatttgtggatgttaattgctacttatctgaagttgagtagagaatattcaacatcagcctggaaataaaacctagcttactcttgatactttatacatgaggatcagcaagatcattggcatgttcgacatatctcattttcacgttcattgcatccatgctcaaatgtaaattgagtgagtgagcaattgatgagcatgagcttgcttagttaatatgtcttcacaacgaatatgtgctcaagtgcatagagttacaagaccataatattggtgtgcagcacctttactgtgatgtcactgtactagtgtcaattatactccttattttgtcagttacacaaacttgatactgcctccttgtcacttacatttgaggtgacatatctccattcctccctgtttctaagcacgtgatagctagtgccagaattgactttgtgaaaggttaaatagatagtttagatggctaacttcaacaagtatcccacaaacacaatagtttcagggttgaaacttgcagtgttattaagtcattcaattaatcacggttagtagtcctaatcgctactctggactcgactaggagctacaacctgattagactgattacttttctagacatgtgatgactaatcatgattagtcaggcggctagggggtgagcagcaagaaacatattgcaattgctgagcagctgagacattgggtgcatctactatggctggagccacttcggtttaagtttttgggattaatttttttggaccaatttgcaacccttcccatcctaactgctgctggtctgcgaggatgagctcacgatcatggtggtagcataccttctgatatcgtcatcgtcatcagcaactgctcgagcaagtgatttgattgagaactgggggagcgattccttcccgagcatggcgaacggctccattgccatatctttcgtggcatttgttgttttcgccatttgctccctcatctccgcatacaatctgttccgccgagacatgtagctgatcctgacaacttcatttctgaacaaagtttttggtgcaggtttcatgtgtgtataaatgtgatgggaactctgaacttctagcgatgatgtatctacatgtcaaatggcaactcacttgtgtggtaaatgaaattcagaagttctcgcaattttttctgcatgacatcacaatggtcatcagttggtgtgcaatcagccaatcaccaca

SEQ ID NO: 53968 - DNA, 3021 bp, Zea Mays
gagaggagtggtgagatttgggaagctgcggctcgacattgcgtcctgtgctttgcttgccgcgtcgtggatcgtcgtcgcatgcggagccagccaagctggacacggtgacggagatagaggccgacatggacggcgtgctccagcgattcgacgtcgacctcctcctcgacggccacggccacggcgacgacagcttatgtgaggagcggcgctctagctcctcgatccggctttcggatcgctggttgctcatggctgtttcggtgggtggatccgtgtgtgtgcgtgcaggtgggagcgagcggaggagcgcgagcggcggcggcgcgcaggacaaggcgggcatcgacggcgcggtgaaggagcggatcgcgcgggcgctgaggatctacaaggacgcggcggggctcgacggcggggcgctggtgcaggtgtgggcgccggcgcgggacgggggccggcgcgtgctggccacccggggccagcccttcgtgctgccgccgccgcggtgccaccgcctgttccagtaccggacggtgtcgctcgcgcacgccttccccgtcggcggcgctgccgtgcccggggagcggggcctgccggggcgggtgttcgacgccggggagcccgagtggacgcccaacgtgcagtactacggcaccggcgagtacgcgcgcatcagctacgcgctcatctacgacatccaggccgcgctcgcgctgcccatccttgaccccgccacgggggcttgcctcgccgtgctcgagctcgtcaccacctcgcccaggctccacttcgccgccgacgtcgacaggctctccgaggcgcttcaggtacctcctctgctccaactctttcgtctgcctagctaagctacctgccccatccatcgcccagtcttgctgcagatgcaacaacagcatacactattcgtctagtccatgaaatgtgaccaaataatgcgatcaaaacggcgcaatttcgtccatttggtatttggatcttctgatcatatcatctgctttccaaactcgtgttcacgtccatgccaatgcaatgcaggctgtggcgttgaggggctccgagatctgccgccgcccagcacccgaggcatgcaacgacgatggggcggcggctcaggtggccatgtcggaggttgcagacatcttgaaccaagtaggcgaggctcacaagctgccactagcgcaggcctggaccaggtgcaggcgctgcagcaccgacacggagcacgcctccctgacggctgccggcgcaccgttctacctcaccggcgcggacccaaacccaaacctgctcggcttccacgaggcctgcgtggagcaccacctgcggctacggtccggccggggcgggctcgtggaggaagcggccgcggcgcggcggcccctcttctgcgccgacgtcaccaagtactccatggacgcgtacccgctggcgcaccacgcgcggttctgcgaactgtccggctgcctcgccgtgtgcgcgcggctgcgccgcggcggcgacgagtccatggacacggacggcggcggcggcgccggctgggacgagtgcgtgctggagttcttcctcccgccggactgcagggacggcgcggcgcagaaggcggcagcgggcgccgtcgcggctaccatcatggagcggtctggcggtggcggtctgaaggcggtcgtgataagtgggttgcaggatttggtgtttgacatcgccgcagatggcgagtgcgtgcttcggcctgatcctgtggccatggctgatgatgttcctcagcttgagctgaacggtcatggaggagacgagtgggactcggatgaggagggtctgcatctggtggtagctatgggtaccaccactacagacattgaagcatccaagatgcaccatgacgaacaccatggtggcgaggatccgagatcacaagttggcaagaaggcggcgaaaaggaaaggcgagaaaactgtcagtttggaggaactgcagcgctacttctctggaagcctgaaagatgcggccaagagtctcggtgtttgtccgacaacgatgaagcgcatctgcaggcagcacggcatctccaggtggccgttccgcaagctcgccaaggcgaaccgctccctggacaagatcaagcgcgtcttcgagtcggtgcaaggctcatcacaggccatggccgccgctcctgctcctccacctgccgccgccgctgcttcctattctcagcaagctccagccgtggccgctgctccccgcgcacctgctttatcaccatgcctatcgagtgctccgagagtggcctcctcccaagcctcatgccaagcgccgccgccgcctctgaaggaggccgcatggcacaagcctttgcgcggcggggacgccagcgtggtcactgtcaaggcgagctacagaggggacatcgtcaggttcagggtgccgagctccgcaggcgtcgcgacggtgaagggggaggtggccatgaggctggggctggcgcccggcgagttcgacgtcaagtacctggacgatgacaacgagtgggtgctcttgtcttgcgacgccgacttccaggagtgcctcgacgtcatcccggcgttgtcaggcgcgtcagcgtcgtctggctccgggacggctcagccggtggtcaggctaatggtgcacgaggtagctgaggtccatgggagctcctgtggcagctcagattagtcacaggaaatagagctgcagagctcaaccgatgtttggtacaaccatctgtagaagctttcactactggcatgtgtctgtctctagtttctctacatgtatccatgtccaaaaactgaagtcataaatacttacaaatagaaataggagcatctcacactttttgttgtctcagacagtacagatctggtctagtctagggcacagaaaagaacaaatcattgtgatctagcactggtattcgctccatttttaagtatatgacgttcaggataggttaatttattcgtcatatatttaaat

SEQ ID NO: 53969 - DNA, 982 bp, Zea Mays
cgacggggtccctcccgggagcgagatccaggcgccgccggcgatcttccgccgcccctgcgcacgcgcggacccaagcatggccatggcggtgcgcgcgtcgtacgaggccggggtgggcgtgatggcgaccaaggtggggatgatgacctacttcgatccggagacggggaagccggtgccggtgaccgtggtcgggttccgggagggcggcaacgtggtgacgcaggtgaagacggccgccacggacgggtacgacgccgtccaggtcgggtaccacggcgtgcgcgaggacaagctcacccgcccggagctgggccacctgggcaaggccggcgccccgccgctgcgccacctgcaggagttccggctcaccgccgtcgacgccttcgagcccggccagcccctcgacttcgccgacctcttcaaggagggcgacctcatcgacgtctccggcaactccatcggcaaggggttccaaggtggcatcaagaggcacaacttcaagcgcgggctgatgacgcacggttccaagagccaccggcagctgggttccatcggagccgggacgacgccgggccgcgtgtacaaggggaagaagatgcccgggaggatgggaggaaccaagaccaagatcaggaagctcaagatcgtcaagatcgacaacaacctccgggtgctcatgatcaagggggccgtgccagggaagcccgggaacctcctccgcataacgccggccaagatcgtcggcaagaacatccccaagaactagacttcttttttcaggggggtgaatgttgagtgtttgtgtttgttaccctgctacaaactggatgtaatcctttgccaatttccagtttttgaacacatgcaacttcagattagtaaaactataacctgtacaatttggatgcttgggtgagagagtaataggcaggtaatgcaagatgcacttctggttcctgaattccgctaaacaata

SEQ ID NO: 53970 - DNA, 4843 bp, Zea Mays
ttgagaccggaccgaaagtcggagaacaccgaggacggcagcctcttggtgaatatgtcagcgaactatgaagtcgtcagaacgtggaggacccgaacatcaccgacggcgatgcgctcacgaacgaagtggaggtcgatctcaacatgcttcatgcgcagatgttgaacattgttggtggagaggtacaccgcattgacattgttgcagtagacaagagtgctttggtgaagaggctaatgaagctccaggagaagttggcgcaaccaggaggcctcgaccatagcacgatactcagcctcgacactcaagcgagagacgacgggctgcctcttggaagaccagaagaccaggttgtctcccaagaagatagcatggccggatgtagagtggcacgtgtccggttaacctgcccagtcaacatcagtgtagacagtaagcttgatcgacgtgaatcgccgaaaagactgaagttgagtgtgtcgcgaaggtagcgaagaatccgcttgacagcggtgaggtgcggctcatggggatcatgcatataaagacacacctgctgaataacaaaggaaatatcaggcgagtgaaagtgaggtacagtagggcaccacccaagctcctaaaagcagtgcgttcgacgacaggagcaccatcaacagaggagatcttggcctgagtatcaaccgaggtggaacatggcttacaatcagtcatcccagcgcgatctaggatatctagagtgtagtggcgctgctgtaggaagagaccttcaaaccgttgttcgacgacaatacccaagaagtggtgaagctgaccgagatcatcacaaactcccgttgtagggcagtgatggtccgatgtagcaaagtgagctagaggtcgtaaggacaatatcattatatcatccacatacagtagcaggtatataacattcgcgccctggtggtagatgaacagagaggcatcagatcggtcctcaccaaaccacaaagagagaaggaaggtggcgaagcggctgtacgggacccaaggcgcttgcttaagcccatacaaggacttgttgaggcggcaaaccggatctgggcttgttggatccccaaaaccagtaggctgactacagtacactgtctctgttagggtgccatggaggaaggcgttcttgacatacaattgttgaactggccaagagcacgagacgacgagagctaggacaatgtgaatagtcgcaggcttcaccaccgggctgaaactctcatcatagataacactcaatcgctgagtgaaaccctgaagaacccatatggccttgtaccaatctaggaagccatcatccttcttatgagtgaagacccacttgctggtgacgacactacagtgggtgggatgcagcaccaagtcccatgtgtggttggcgaggagcgcctcgtactcttccatagcacgcaaccagtgaagattgacaagcgcgccatgaacggaggacggtacaggggatacaactgcaaaagcgaacaaatcagggatgatcgtcaagagggccaggcggtccacgggatggagcatcccggtggcccggtgtgtcaccattgggtgaacgtggcaaggatcccgatagagaactggatggtctgacatcaatggctcggcgagagagctggtcaatgcagcgacatgggcatgacgctggtagacgtgcacaagcttcgcgaagcggtgcaacggcagcggagtcgacgatccaggcgaaggaggtggtagctccacccgcgggcgtcgcaggtagacacgcgcaaggcgagaaggatccatgccaggacaagtggggaactcagcggcacgcgttgcacgatacgggagttaggggccgcacgtgaggcagcaggagagaccatagtggcgtgcgtggcacaacagacgactccaaggtgggcgcaaatgcccaaggaggcacgagcggcggcaccggggcgacgggtgtcaccatgggcgaggaacctacaaggggaagaaacaaagatggatggacaaaaggaggcatagagtcaacgtcaaacaaatgcgccaggtcagagtccaaggtggaagtagtgggagcgaaagggaaggactcattgaaagtgacatggcgagatatactgacatgacgggaggaaagatcataacatcaataccccttatgatcaggagagtatgcaaggatggcacaacgagacgatctaggtgcaagtttgtgtgtagcagtggctgagaggctaggaaagcaagcacacccgaaaacacgggcaggggcggcggcgctcggccgaacaggagcagcagcgcgcactggctgggcagtgactgcagccaagggagaggagagaggggggaaggaggagaggtggtcctcaccggccatggcggggcggcggcggccgcgccgagcagcggacggaggtggcggtgaacgggagaggagagggggaggggagagaagaaaggaaacccttgataccatattggaggtaaaatgactcaatagataacaaccactaaggctaaagtacatatagagcatccaagtacataaactaacatataataatagagaccccttgcagatttccatttcctatgtgcaatagcattattgttgtgcaattacaccaacaatttctcttaaaaaagcaacaattctaacacttacagaacttactgttagactgtgtgtgtgtgggtcggcaccactgttgggctgccggcccatcagggttaggtttgtgagtctctatacatatgtactccactctatgcaatatatatattctacatggtatcagaggattatggttagggttttcctcccacctcccacaacagtcgccggctgctccatcccgtttgcagccgcctcctgcgccgctgcccccgggaggctcagccttccctcccgggggcggcctcccacccgccgaccgccaagactcccaccaccaccaccacccggcaggagcagcagagcgcacaataccaacgcgcggtagagacccgcgagcgcgcgtcgccatcatggcgccagcaccctcctccaggaccagggccatcccccccgccatcttgtacctcctcatgcccctgtagatcgccgtggccgccgcaaccatggaccctgccgagcaggagacgctgctccgtgtcatggagtccgtctcctccgaccgcgactaacgcgaggccgccggcaccgacccctacagctcgccgtggtcggggctgaagtgcaggctcgggaccgcgcccggccccggcggcacggatgcacatgtcacacctcaacttcggggtgccgcccaactcgatgtgcaaggacacggccacgttcccggccgccgcgttcacgctgccggagctctgggcgctgttcctcgtcggctgcttcaagaaccccgacgtcgtggccgccttcaccctgacgccggcgtccaagctctcgtccttgcgcctgcagcagcttagcgtccgcgccaacctatcgctgtccggcgcgctgccgccgcagctggccagcatgcggtcgctccaggtgctcaccgtgttgcagaatgcgctcatccgtggcgcggtcctgaacgacattggcgcgctcgccagcctcgtgcacctcgacctcagctacaactccctcgctgaccatggcagtcattgccccaagcggccttgctcccttccccaacgctggccgccctgatccgctgacagaggcgggctgaccctcggaccgcgtcgatggccgcgccgaccgggcgcctctgactacgttgtcacctagcagtgcatcctcttcatgcttctcccgtcgtcggcgccatcaacaccccttgcaggcccggcgcaggcccctgcccggctggacccgccccgccacccaccccttcatcgccttcgccggatccgtcgctgccgcggccttcccggtcggatccccgttgttgcgaccttcccgactcgatctgtcgtccctttggccggatcgcgtcttcccggctggattcgtcgttgtcgtggccttcccagccggattcagcgtcccccttctattctgccgcgggcacggacatcatgaccggcggagacgcgtgcgctgccgtcggcctccctggcggggctccttgacgtatggacgatcgaagaagcaggaaggttggcctgtcggtgctcttttgttgtgttgccctgccgatcgttgacgctcgaatgtcgacccctcccgaagaacgggcttttgctgcgtgtctcctgacctcggccacctcgacttcggctaactcagcatccaggggctatcgccttctcggaatccacaccggtctcttctacagccgcaacattcgcaccctcacgacgctgtgactgcgggggatttcaacccgtcggctcctaccttcggcctctactccagtctcatcgtgtgtggtgcccccgttgcgactgcggggggatgttagactgtgcgtgtgggggggggcaccactgttgggctgccggcccattagggttagggttgtgagtctctatatatatgtaccccattctatgcaacatatcgagtcagttcactattctacacttactaatgcagctcatttcctaatcaatgggttaacacaatgcatattgtacgaggattgcattggatatacatatatgtacccccacaacatgctatccaacagagaagctagtttgtatcatttacttcaatgaggagttgaggaccccgatttgtattgtttgttgacttattacagataaatatttgtaaaagaaaagtatttacaaaacccaaaagaattagcaattg

SEQ ID NO: 53971 - DNA, 5564 bp, Zea Mays
ctgcgtcccgccaggccccctgctccccatgcccggtgcgcgcgacggccaccatggcagacagctcttgggcgactgtggccgccagtgtccaccccgccaccagcgtcgccacctcacctgtctccaccaccgaagcgcacgccaccagtgtcgcgaccactccttgcgcgtacgacgccttctcagttggcacgacctcttctcgcgtgtgcggcgcctggggctcgcccggcttcggccacctggtgctggccgccgccgctacccaatccatctccaacctcgccacaaccgtcgttcccccctccacgttcgatctggacgtcgctgggacccatgccgacatgctaagcgcgtcccctgcatctgcccgctctttgccaccgtcggtgggtactctagggcccatgcgccctccaggcttcctatgctcctcacggtgtgccgccgacgccccctacacagctcctcggcgtcccctccactgttgttgtcttcccgcaacacgactccaccttctctagcctcgacagcatgtcctccctcggcgtggtcgtcgatgcggggctggtgcacggcgagccccctactgcccccctttcccctgcctcgacagccctctacaccgcctttgcaggcatgggcgtggacacccatgtccctgcagcccccatgccctccctgccatgccggcggtcctcgctgccccgtctccggcacggtcgttgctctccgggcaccccttcatgtagctgggctcatccatgggggctccttccccatgtccccctcagtcggttattccgacgacacatcctacaatgtcccaccgccctcaacgcctgcggcttcgcccctccaatcgattccggggacccctacctctgccgcagtccctatgagagcctttgtcatgcctgtcaactcgtcttccctttcctacctcctcgtctagggctgctcaagcctttgatcttgttcattgtgatctctggacatctgttttcagtctctgtggttacaaatactatctggtaatcctggatgatttctctcattttctttggactttttctctgtggcagtgcggctcaagtccgacacctttcacactctcacccatttctacacctaggtctccaaccagttccgtcacccggttcgtgccctctagtgtgataatggccgccagttcgataactccgcctctcgttccttctttctctctcacggtgaaagttacgcctctcgtgtccctacacttcccctcagaacggccgggccaaatgaattattcgcaccaccactaacatgatccgcctcctctttcagccgtatcttcttgccagctattggacaaaggccctgaatactgctacctatctccttaaccgccttccctccaagacggtgagtcaccccactcctagttcgccctgtatggtacaacccacttttatgtccaccttcgtgtctttggctgtgcctgctatcccaacacttccgccactgctcaacacaagctctctcctcgctccactcactgtcttttccttggttactctcctgaccacaaggggtaccgatgccatgacctcctcactcaccgcaccatcatctctcgtcatgttgtttttgatgaggaggtttttccccttgttgacccctcctccccaccccccgacgtcgatttccttctcgatgctgattgtgtcgatgctcgtcttccgttgccctatttcacgcaaccccgtgcggcctcgcccgcgccccgcacgaccctatcgattctgcctgtgtcggatgtggctccaccgactccgcctatgccatgcgcagccccgtcgccgcctccgccacatcgcgtggacccaacgtcccctgcgctgccaagcatggccccattgtcgttcgttgaggtagcctcttagccgcgcttcgcggtcctcgttcacatctaccagcgatgtggccgggtcgatgccccggctccctctcgcgaggagccgcctgtataccattcgattgctctccatcgggaccccaagcatgtccacccgatggttactcggcgtgctgttggtgtccttcaacctatcaaacgcctagttctcacggtgccctcctctctggtgctcccccctgtgccatcctctgtccgtagtgtgctcgtcgaccccacctggcggcgcgctatggaggagtatgaggccttacaggcaaaccacatctgggacctgtgccactccccttcggcgcaaatgtggtcaccgggaaatggatcttcaagcacaagctaaagacggatggctccttggatcggtacaagtctcgctaggtcctgtggggctccatccagcgtctcagggttgactatgacgagactttcagccccgtggtgaagcctgctaccatccggactgttctgactctggctctgtcatggtcctggccagtgcaacagcttgacgtcaagaatgccttcctccatggcactctgacggagacggtgtactacactcaatcggtcctggtcagtgcaacagcttgatgtcaagaatgccttactccatggctcactccgacatggtctgcaagcttaaccggtccttatacgacctcaagcatgcgccctgggcttcgtatagccgcttcgccagtcgccaccttcgtgctctcccatggttttgtcgaggccaaggcggatacctccctgttcgtcttccgtcgaggcctggacacgacgtacctcctctatgtcgacgacattgttctcacgacctcctccctcgagctcttgcggcgcatcatctcttccctcaagcaggaatttgcgcttaaggacttgggtgagctgcaccacttcttgggggtcaccgactcaccgtggaacaccagtcctagcgcctgtttctccaccagcggtattaaaccgtcgacatcctcgagcgcgcatgcatgattgactgcaagccctgtgtgactctggtggacaccaagggcaaggcttcctccgacgatggtggccctcggttgtcgatcccataggatacctgagtcttgccgaggcgctgcggtactcgtcttcacccggcccgacattgcctacgccgtctagcaggtatgcctccacatgcataccccgcgggagccgcatctcaccgccatgaagcggatcctgcggtacctccggggcaccctcgacttcggcctcctccgccactccttgaccactgacctcgtctacatcgacgctgactggatcggcttccccgacacgcgtaggtccactacaggctatgtcgtgttcctgggcgacaaccttgtctcttggtactcgaagcggcaaccagtcgtctctcgctctagtgctgaggctgaccgcgccgtggctagcggtgtggctccgtcagctgctccaggagctccatagttcgctgacatggagcacgctgggctactgtgatgtcagcgtcgtatatctctccatcaacctcgtctaacaccagcgcacgaagcatgtcgagctcgatctccacttcatgcgtgagcgtgtcgccattggagatgtgcgagttcatgtaccaaccacctctcagttcgccgacgtcttcaccaagggccatcccacgccggtgtttgaggagtttcggtccagtctcaacatctatcatggctagagttttgactgcggggggtgttagatgtatttgtgtgtggctgtcattgtattgggccaaggcccacctactctattattaatacatcacccaaccttattgagagagttagggtttcagtcttttccagaatgcaatattatctaagacacatatggatttgcttctctcctcaagttgatagacacatgttttttagaatgctaccttttttaatgaaaagtaggaagtattcctctgatcctataaccctatatattaatatacatgcatataaaagagtgattgtcacagtaagctacatttacattaaaatttgaatctttgtaaggtctactgttggcattggatgtcaagtagtatgatgaaagtttattttgttattatatctaagattgtgcttaaaactggtaggggcatttcacttctaggaaaagaaaaaaaaatcctactttgacctcttttttttatatcctggctggtttaggttatctgagatactgagaccagctagctatcagttagttatacttatgcacattctttgctccataagtattctttatcttcctatgttggcattttcaatttgagttgttgtcacctgaatttcaatacttcatattctataaataccccccccccccccctcaaactaacatatttcaagtatgtttgaacaatgaacagttggtagttctctaaaaaagtttaaggatcttgcaggtttcctgcttctgacaaggcctccaagatgaggaatcttgatgcctcgttgcttccgcaaaccaacaagaatgttcagcagcaaagtgaagtcgatgtgaagcttgcatcaatgctctatgaagctttacttagccttagagaacagataatggaggagtgtaacgaaggattcaatgcgtatcacatattcaaacacgttgaaggaaatgagtatccgagtaccgagaacaaaagaagagcttttggatataaacggcctcggcaagacaaaggtcaagaagtacggggaccgcttgcttgcaaccatcgaggacttcctcagcaaacacccaaatccaaggagaaacagcggcggaggtggcggcggcaacgagcactccgatgcggcaaagaagcgaaggggctccaccgccatctctgcagcgagttacggcgactatgacttcgacgaacgcacgggccagcagtccaagaagcgcgcggccaagacgcgaactgtctctgcccacggcccccgctgcacggacgccgatctcgatgggcctgaggtggtggaggtggacggcgagctgcgcagcgtccggaagcccgtggcgtatggcaatggcagggttcttcccaagtgggcacccctctaacttattccaggaatttgggtacgtcaagtagagtagagtaccgctagggaataggaatgtaggcttgcacatatgtaatctcccaggttggctcgtgcacatgcagcgatgcagtgatgtcaagggttttctgtgatgcagttgtacattggaactgtggcgtcgaatgtacgtccagctggtacacgcgtcaaggacatacgagaccaggagcaagagttccgttgcttgcttccgtgggcagcatcgcgatcgcagtgtcggccacctgttgcccgaaacatcttggatgcaggtacatcttcgcacgcgtgtaccatcaagcgaccaaacttgaattaacatcatcgccatcatcatccgatggctactgtagtaatgtatgcatgtatgctgacgttggactgaccttaaacatttctcttgcatccagttgtcctaggctgtatataggtctagcaagtcttaagggtccgtttgtttcctcgcgggtattctggattatatagtctat

SEQ ID NO: 53972 - DNA, 5468 bp, Zea Mays
cctacccccacctcccctcgccctgcgtcccgccaggccccctgctccccatgcccggtgcgcgcgacggccaccatggcagacagctcttgggcgactgtggccgccagtgtccaccccgccaccagcgtcgccacctcacctgtctccaccaccgaagcgcacgccaccagtgtcgcgaccactccttgcgcgtacgacgccttctcagttggcacgacctcttctcgcgtgtgcggcgcctggggctcgcccggcttcggccacctggtgctggccgccgccgctacccaatccatctccaacctcgccacaaccgtcgttcccccctccacgttcgatctggacgtcgctgggacccatgccgacatgctaagcgcgtcccctgcatctgcccgctctttgccaccgtcggtgggtactctagggcccatgcgccctccaggcttcctatgctcctcacggtgtgccgccgacgccccctacacagctcctcggcgtcccctccactgttgttgtcttcccgcaacacgactccaccttctctagcctcgacagcatgtcctccctcggcgtggtcgtcgatgcggggctggtgcacggcgagccccctactgcccccctttcccctgcctcgacagccctctacaccgcctttgcaggcatgggcgtggacacccatgtccctgcagcccccatgccctccctgccatgccggcggtcctcgctgccccgtctccggcacggtcgttgctctccgggcaccccttcatgtagctgggctcatccatgggggctccttccccatgtccccctcagtcggttattccgacgacacatcctacaatgtcccaccgccctcaacgcctgcggcttcgcccctccaatcgattccggggacccctacctctgccgcagtccctatgagagcctttgtcatgcctgtcaactcgtcttccctttcctacctcctcgtctagggctgctcaagcctttgatcttgttcattgtgatctctggacatctgttttcagtctctgtggttacaaatactatctggtaatcctggatgatttctctcattttctttggactttttctctgtggcagtgcggctcaagtccgacacctttcacactctcacccatttctacacctaggtctccaaccagttccgtcacccggttcgtgccctctagtgtgataatggccgccagttcgataactccgcctctcgttccttctttctctctcacggtgaaagttacgcctctcgtgtccctacacttcccctcagaacggccgggccaaatgaattattcgcaccaccactaacatgatccgcctcctctttcagccgtatcttcttgccagctattggacaaaggccctgaatactgctacctatctccttaaccgccttccctccaagacggtgagtcaccccactcctagttcgccctgtatggtacaacccacttttatgtccaccttcgtgtctttggctgtgcctgctatcccaacacttccgccactgctcaacacaagctctctcctcgctccactcactgtcttttccttggttactctcctgaccacaaggggtaccgatgccatgacctcctcactcaccgcaccatcatctctcgtcatgttgtttttgatgaggaggtttttccccttgttgacccctcctccccaccccccgacgtcgatttccttctcgatgctgattgtgtcgatgctcgtcttccgttgccctatttcacgcaaccccgtgcggcctcgcccgcgccccgcacgaccctatcgattctgcctgtgtcggatgtggctccaccgactccgcctatgccatgcgcagccccgtcgccgcctccgccacatcgcgtggacccaacgtcccctgcgctgccaagcatggccccattgtcgttcgttgaggtagcctcttagccgcgcttcgcggtcctcgttcacatctaccagcgatgtggccgggtcgatgccccggctccctctcgcgaggagccgcctgtataccattcgattgctctccatcgggaccccaagcatgtccacccgatggttactcggcgtgctgttggtgtccttcaacctatcaaacgcctagttctcacggtgccctcctctctggtgctcccccctgtgccatcctctgtccgtagtgtgctcgtcgaccccacctggcggcgcgctatggaggagtatgaggccttacaggcaaaccacatctgggacctgtgccactccccttcggcgcaaatgtggtcaccgggaaatggatcttcaagcacaagctaaagacggatggctccttggatcggtacaagtctcgctaggtcctgtggggctccatccagcgtctcagggttgactatgacgagactttcagccccgtggtgaagcctgctaccatccggactgttctgactctggctctgtcatggtcctggccagtgcaacagcttgacgtcaagaatgccttcctccatggcactctgacggagacggtgtactacactcaatcggtcctggtcagtgcaacagcttgatgtcaagaatgccttactccatggctcactccgacatggtctgcaagcttaaccggtccttatacgacctcaagcatgcgccctgggcttcgtatagccgcttcgccagtcgccaccttcgtgctctcccatggttttgtcgaggccaaggcggatacctccctgttcgtcttccgtcgaggcctggacacgacgtacctcctctatgtcgacgacattgttctcacgacctcctccctcgagctcttgcggcgcatcatctcttccctcaagcaggaatttgcgcttaaggacttgggtgagctgcaccacttcttgggggtcaccgactcaccgtggaacaccagtcctagcgcctgtttctccaccagcggtattaaaccgtcgacatcctcgagcgcgcatgcatgattgactgcaagccctgtgtgactctggtggacaccaagggcaaggcttcctccgacgatggtggccctcggttgtcgatcccataggatacctgagtcttgccgaggcgctgcggtactcgtcttcacccggcccgacattgcctacgccgtctagcaggtatgcctccacatgcataccccgcgggagccgcatctcaccgccatgaagcggatcctgcggtacctccggggcaccctcgacttcggcctcctccgccactccttgaccactgacctcgtctacatcgacgctgactggatcggcttccccgacacgcgtaggtccactacaggctatgtcgtgttcctgggcgacaaccttgtctcttggtactcgaagcggcaaccagtcgtctctcgctctagtgctgaggctgaccgcgccgtggctagcggtgtggctccgtcagctgctccaggagctccatagttcgctgacatggagcacgctgggctactgtgatgtcagcgtcgtatatctctccatcaacctcgtctaacaccagcgcacgaagcatgtcgagctcgatctccacttcatgcgtgagcgtgtcgccattggagatgtgcgagttcatgtaccaaccacctctcagttcgccgacgtcttcaccaagggccatcccacgccggtgtttgaggagtttcggtccagtctcaacatctatcatggctagagttttgactgcggggggtgttagatgtatttgtgtgtggctgtcattgtattgggccaaggcccacctactctattattaatacatcacccaaccttattgagagagttagggtttcagtcttttccagaatgcaatattatctaagacacatatggatttgcttctctcctcaagttgatagacacatgttttttagaatgctaccttttttaatgaaaagtaggaagtattcctctgatcctataaccctatatattaatatacatgcatataaaagagtgattgtcacagtaagctacatttacattaaaatttgaatctttgtaaggtctactgttggcattggatgtcaagtagtatgatgaaagtttattttgttattatatctaagattgtgcttaaaactggtaggggcatttcacttctaggaaaagaaaaaaaaatcctactttgacctcttttttttatatcctggctggtttaggttatctgagatactgagaccagctagctatcagttagttatacttatgcacattctttgctccataagtattctttatcttcctatgttggcattttcaatttgagttgttgtcacctgaatttcaatacttcatattctataaataccccccccccccccctcaaactaacatatttcaagtatgtttgaacaatgaacagttggtagttctctaaaaaagtttaaggatcttgcaggtttcctgcttctgacaaggcctccaagatgaggaatcttgatgcctcgttgcttccgcaaaccaacaagaatgttcagcagcaaagtgaagtcgatgtgaagcttgcatcaatgctctatgaagctttacttagccttagagaacagataatggaggagtgtaacgaaggattcaatgcgtatcacatattcaaaacagacacgttgaaggaaatgagtatccgagtaccgagaacaaaagaagagcttttggatataaacggcctcggcaagacaaaggtcaagaagtacggggaccgcttgcttgcaaccatcgaggacttcctcagcaaacacccaaatccaaggagaaacagcggcggaggtggcggcggcaacgagcactccgatgcggcaaagaagcgaaggggctccaccgccatctctgcagcgagttacggcgactatgacttcgacgaacgcacgggccagcagtccaagaagcgcgcggccaagacgcgaactgtctctgcccacggcccccgctgcacggacgccgatctcgatgggcctgaggtggtggaggtggacggcgagctgcgcagcgtccggaagcccgtggcgtatggcaatggcagggttcttcccaagtgggcacccctctaacttattccaggaatttggttgtacattggaactgtggcgtcgaatgtacgtccagctggtacacgcgtcaaggacatacgagaccaggagcaagagttccgttgcttgcttccgtgggcagcatcgcgatcgcagtgtcggccacctgttgcccgaaacatcttggatgcaggtacatcttcgcacgcgtgtaccatcaagcgaccaaacttgaattaacatcatcgccatcatcatccgatggctactgtagtaatgtatgcatgtatgctgacgttggactgaccttaaacatttctcttgcatccagttgtcctaggctgtatataggtctagcaagtcttaagggtccgtttgtttcctcgcgggtattctggattatatagtctat

SEQ ID NO: 53973 - DNA, 4158 bp, Zea Mays
cgccacgttagcaaccagcgcgtctgccacaggtcgtggctcgcttctcccctgcttttccgcatcgccgcagcgccgacgacgactgggtgcgcagcgcggcgccgccgttctacgccgggcgcccaagtcctcgacgggaccttctctggcgacgagcgccccaccaggccctaagctcatatgagcacggagcatcaatgcaagctaataaaccaccaaaggtcaattggccgcaccacgaaaacgctgtccaaggctactctagcagagacgactttctgagttcaagctttctcttctccttgccgacacagaggccgaaccctgaagctcgtgagaggatgctttcgctaaggtcttctgcctgtaaaattcaaggcccagagcgtcttcaggctccgttgatcgagaaggcctggcgttccctatgcaacactcaggctgcctgcaagagctatttaagacctggtttatctgcaaaagcgagagactgtgatagaggtcatgctcgtacctatggagaaggctcatacaacaccaacaaaatgtctactgtgccaggaaacaggattctttccatggaaagcacaggccaacccagtgaaagagtttctctgcagaacaacagcagccatcaaacagttggcatctgctcctctatgagaagtcaccagaacaaccatgttgtgcaggaagatatgagagcaacaaatcaatacaattttgcaagaacaaacgctgcattacaccaatctatggctgctgataacatgtgctcttatgataaatttgatgccatggatgatgatattctagcgactattgacgtggaccaaatagttatggaacattatcaagcaacaaatgcacccagaggatcagcatcccataacatgtcaactccaccaggaaacaagtgtagcgtcaatggcatggatgaggctaatttaccacgagaactatctgaattatgtaaccatcaatgcaagctagctttttgcagagaggcaatgactcatctgcaggagatgaaggatgagctgcttgcagtagccaatgagcttcttgatgatgatggtgaactcaatcctcaacattcacaagaacttcataaaagacgattgcatcttaaaaaactggttcagctacttgaggaccatatgacaaggtcagcccaagatgaggagagacaaatatcacactctatggcatccacaacatctacacagcagcatctgccacctatgaccccaggaagcacttttacaatggatagcaatagattccaatctcaggtttacgttggaaatggacctagggatagtgatttatgctattctcctgccccatattcctgttcagataatttaagcacaccattaaattctgtatggaagagctataccccaaaggttatcgatattaactacactgaaggatctggtgatagaaagtggagtagtacaaatttcccatggactaaggaacttgaggccaagaacagaaataagtttggaaaccattctttccgccccaaccaacgagaaataatcaatgccacaatgagtgggcatgatgtttttgttttgatgccaactggtggtgggaaaagtttgacatatcagcttccagcacttataagttctggcttaacattagtagtttgccctcttgtctcactgatccaagaccagatcatgcacttgtcacaggctaatattcctgcaacttatttgagtggcaacttggactggtctgaacagcaagagataatgaaagatttaatgtcatgccgctacaagttgctatacgtcactccagagaaaatagctaagagtggtgctttatcgagactattggacaatttaaattcacaagggcacctttctagaattgttattgatgaagctcattgtgtaagccagtggggtcatgacttccgtcctgattacaagagcttaggtgttctaaaacaaaacttccccaagacaccagtcctggccttgactgcaacagcaactgctagggttaaggaagatgtcgtgcaagctttagcccttgaaaactgcattgttttcaaacaaagttttaatcgtgcaaatctgaggtactacttaagacccaagacaaagaaatgcgttgaggacattgatttatttatccgcacaaatcattctaaagaatgtggcattatatattgcctttcaagaatggattgtgaaaaagtggcagaaaaactaagggactgtgggcacaaagtatcacactaccatggtagcatggatcctatggatagaacacatatacagaagctttggagcaaggataagatcaacataatctgtgctacagttgcatttgggatgggtatcaataaacctgatgttcgctttgttattcatcattcactgcccaagtcaattgaaggatatcatcaggagtgtggacgtgcgggtagagatgggcaaccttcatcttgtgtgctatattaccagtattctgactatattcgggtccgacatatgattacacaaggagttacggagcaaacaggagcaccacgtgatttatcttcacatgagcaagcactgaagacacataaggacaatctcctgaggatggtcagttactgtgaaaatgacgtggactgcagacgcctacttcaactgatccactttggagagaagtttgacccttcgctttgtgcaagaacatgtgataattgcttgaaagagtcaggatgggtcgaaaaagatgttaccaacattgccaggcaattggttgagctagtcacaaggacagggcactcacattcatctacttacattcttgaagtttacagagggtctatgagccaaaatgtcaagaagcagcgtcatgatgctttagctcttcatggagctgggaggcatctagctaaaggtgaggcagcaaggataatgcgacatttagtaactgaggaaatacttaatgaggatgtgaaaaagagcgatatgtttcctgcttctgacaaggcctccaagatgaggaatcttgatgcctcgttgcttccgcaaaccaacaagaatgttcagcagcaaagtgaagtcgatgtgaagcttgcatcaatgctctatgaagctttacttagccttagagaacagataatggaggagtgtaacgaaggattcaatgcgtatcacatattcaaaacagacacgttgaaggaaatgagtatccgagtaccgagaacaaaagaagagcttttggatataaacggcctcggcaagacaaaggtcaagaagtacggggaccgcttgcttgcaaccatcgaggacttcctcagcaaacacccaaatccaaggagaaacagcggcggaggtggcggcggcaacgagcactccgatgcggcaaagaagcgaaggggctccaccgccatctctgcagcgagttacggcgactatgacttcgacgaacgcacgggccagcagtccaagaagcgcgcggccaagacgcgaactgtctctgcccacggcccccgctgcacggacgccgatctcgatgggcctgaggtggtggaggtggacggcgagctgcgcagcgtccggaagcccgtggcgtatggcaatggcagggttcttcccaagtgggcacccctctaacttattccaggaatttgggtacgtcaagtagagtagagtaccgctagggaataggaatgtaggcttgcacatatgtaatctcccaggttggctcgtgcacatgcagcgatgcagtgatgtcaagggttttctgtgatgcagttgtacattggaactgtggcgtcgaatgtacgtccagctggtacacgcgtcaaggacatacgagaccaggagcaagagttccgttgcttgcttccgtgggcagcatcgcgatcgcagtgtcggccacctgttgcccgaaacatcttggatgcaggtacatcttcgcacgcgtgtaccatcaagcgaccaaacttgaattaacatcatcgccatcatcatccgatggctactgtagtaatgtatgcatgtatgctgacgttggactgaccttaaacatttctcttgcatccagttgtcctaggctgtatataggtctagcaagtcttaagggtccgtttgtttcctcgcgggtattctggattatatagtctat

SEQ ID NO: 53974 - DNA, 4128 bp, Zea Mays
cgccacgttagcaaccagcgcgtctgccacaggtcgtggctcgcttctcccctgcttttccgcatcgccgcagcgccgacgacgactgggtgcgcagcgcggcgccgccgttctacgccgggcgcccaagtcctcgacgggaccttctctggcgacgagcgccccaccaggccctaagctcatatgagcacggagcatcaatgcaagctaataaaccaccaaaggtcaattggccgcaccacgaaaacgctgtccaaggctactctagcagagacgactttctgagttcaagctttctcttctccttgccgacacagaggccgaaccctgaagctcgtgagaggatgctttcgctaaggtcttctgcctgtaaaattcaaggcccagagcgtcttcaggctccgttgatcgagaaggcctggcgttccctatgcaacactcaggctgcctgcaagagctatttaagacctggtttatctgcaaaagcgagagactgtgatagaggtcatgctcgtacctatggagaaggctcatacaacaccaacaaaatgtctactgtgccaggaaacaggattctttccatggaaagcacaggccaacccagtgaaagagtttctctgcagaacaacagcagccatcaaacagttggcatctgctcctctatgagaagtcaccagaacaaccatgttgtgcaggaagatatgagagcaacaaatcaatacaattttgcaagaacaaacgctgcattacaccaatctatggctgctgataacatgtgctcttatgataaatttgatgccatggatgatgatattctagcgactattgacgtggaccaaatagttatggaacattatcaagcaacaaatgcacccagaggatcagcatcccataacatgtcaactccaccaggaaacaagtgtagcgtcaatggcatggatgaggctaatttaccacgagaactatctgaattatgtaaccatcaatgcaagctagctttttgcagagaggcaatgactcatctgcaggagatgaaggatgagctgcttgcagtagccaatgagcttcttgatgatgatggtgaactcaatcctcaacattcacaagaacttcataaaagacgattgcatcttaaaaaactggttcagctacttgaggaccatatgacaaggtcagcccaagatgaggagagacaaatatcacactctatggcatccacaacatctacacagcagcatctgccacctatgaccccaggaagcacttttacaatggatagcaatagattccaatctcaggtttacgttggaaatggacctagggatagtgatttatgctattctcctgccccatattcctgttcagataatttaagcacaccattaaattctgtatggaagagctataccccaaaggttatcgatattaactacactgaaggatctggtgatagaaagtggagtagtacaaatttcccatggactaaggaacttgaggccaagaacagaaataagtttggaaaccattctttccgccccaaccaacgagaaataatcaatgccacaatgagtgggcatgatgtttttgttttgatgccaactggtggtgggaaaagtttgacatatcagcttccagcacttataagttctggcttaacattagtagtttgccctcttgtctcactgatccaagaccagatcatgcacttgtcacaggctaatattcctgcaacttatttgagtggcaacttggactggtctgaacagcaagagataatgaaagatttaatgtcatgccgctacaagttgctatacgtcactccagagaaaatagctaagagtggtgctttatcgagactattggacaatttaaattcacaagggcacctttctagaattgttattgatgaagctcattgtgtaagccagtggggtcatgacttccgtcctgattacaagagcttaggtgttctaaaacaaaacttccccaagacaccagtcctggccttgactgcaacagcaactgctagggttaaggaagatgtcgtgcaagctttagcccttgaaaactgcattgttttcaaacaaagttttaatcgtgcaaatctgaggtactacttaagacccaagacaaagaaatgcgttgaggacattgatttatttatccgcacaaatcattctaaagaatgtggcattatatattgcctttcaagaatggattgtgaaaaagtggcagaaaaactaagggactgtgggcacaaagtatcacactaccatggtagcatggatcctatggatagaacacatatacagaagctttggagcaaggataagatcaacataatctgtgctacagttgcatttgggatgggtatcaataaacctgatgttcgctttgttattcatcattcactgcccaagtcaattgaaggatatcatcaggagtgtggacgtgcgggtagagatgggcaaccttcatcttgtgtgctatattaccagtattctgactatgtcagttactgtgaaaatgacgtggactgcagacgcctacttcaactgatccactttggagagaagtttgacccttcgctttgtgcaagaacatgtgataattgcttgaaagagtcaggatgggtcgaaaaagatgttaccaacattgccaggcaattggttgagctagtcacaaggacagggcactcacattcatctacttacattcttgaagtttacagagggtctatgagccaaaatgtcaagaagcagcgtcatgatgctttagctcttcatggagctgggaggcatctagctaaaggtgaggcagcaaggataatgcgacatttagtaactgaggaaatacttaatgaggatgtgaaaaagagcgatatgtatggatcaatatcatctgtcctcaaggtaaatcatttgaaagctagtggtcttctctctggcaagcacaacatcgtcctgaagtttcctgcttctgacaaggcctccaagatgaggaatcttgatgcctcgttgcttccgcaaaccaacaagaatgttcagcagcaaagtgaagtcgatgtgaagcttgcatcaatgctctatgaagctttacttagccttagagaacagataatggaggagtgtaacgaaggattcaatgcgtatcacatattcaaaacagacacgttgaaggaaatgagtatccgagtaccgagaacaaaagaagagcttttggatataaacggcctcggcaagacaaaggtcaagaagtacggggaccgcttgcttgcaaccatcgaggacttcctcagcaaacacccaaatccaaggagaaacagcggcggaggtggcggcggcaacgagcactccgatgcggcaaagaagcgaaggggctccaccgccatctctgcagcgagttacggcgactatgacttcgacgaacgcacgggccagcagtccaagaagcgcgcggccaagacgcgaactgtctctgcccacggcccccgctgcacggacgccgatctcgatgggcctgaggtggtggaggtggacggcgagctgcgcagcgtccggaagcccgtggcgtatggcaatggcagggttcttcccaagtgggcacccctctaacttattccaggaatttgggtacgtcaagtagagtagagtaccgctagggaataggaatgtaggcttgcacatatgtaatctcccaggttggctcgtgcacatgcagcgatgcagtgatgtcaagggttttctgtgatgcagttgtacattggaactgtggcgtcgaatgtacgtccagctggtacacgcgtcaaggacatacgagaccaggagcaagagttccgttgcttgcttccgtgggcagcatcgcgatcgcagtgtcggccacctgttgcccgaaacatcttggatgcaggtacatcttcgcacgcgtgtaccatcaagcgaccaaacttgaattaacatcatcgccatcatcatccgatggctactgtagtaatgtatgcatgtatgctgacgttggactgaccttaaacatttctcttgcatccagttgtcctaggctgtatataggtctagcaagtcttaagggtccgtttgtttcctcgcgggtattctggattatatagtctat

SEQ ID NO: 53975 - DNA, 4225 bp, Zea Mays
attccgcgccctgcctcgcggtcgcccttctgttttcttctccggccgcacccatttccgcggaatcccaccgccgccccgcccccgttcactcttcccccgcagccgccacgttagcaaccagcgcgtctgccacaggtcgtggctcgcttctcccctgcttttccgcatcgccgcagcgccgacgacgactgggtgcgcagcgcggcgccgccgttctacgccgggcgcccaagtcctcgacgggaccttctctggcgacgagcgccccaccaggccctaagctcatatgagcacggagcatcaatgcaagctaataaaccaccaaaggtcaattggccgcaccacgaaaacgctgtccaaggctactctagcagagacgactttctgagttcaagctttctcttctccttgccgacacagaggccgaaccctgaagctcgtgagaggatgctttcgctaaggtcttctgcctgtaaaattcaaggcccagagcgtcttcaggctccgttgatcgagaaggcctggcgttccctatgcaacactcaggctgcctgcaagagctatttaagacctggtttatctgcaaaagcgagagactgtgatagaggtcatgctcgtacctatggagaaggctcatacaacaccaacaaaatgtctactgtgccaggaaacaggattctttccatggaaagcacaggccaacccagtgaaagagtttctctgcagaacaacagcagccatcaaacagttggcatctgctcctctatgagaagtcaccagaacaaccatgttgtgcaggaagatatgagagcaacaaatcaatacaattttgcaagaacaaacgctgcattacaccaatctatggctgctgataacatgtgctcttatgataaatttgatgccatggatgatgatattctagcgactattgacgtggaccaaatagttatggaacattatcaagcaacaaatgcacccagaggatcagcatcccataacatgtcaactccaccaggaaacaagtgtagcgtcaatggcatggatgaggctaatttaccacgagaactatctgaattatgtaaccatcaatgcaagctagctttttgcagagaggcaatgactcatctgcaggagatgaaggatgagctgcttgcagtagccaatgagcttcttgatgatgatggtgaactcaatcctcaacattcacaagaacttcataaaagacgattgcatcttaaaaaactggttcagctacttgaggaccatatgacaaggtcagcccaagatgaggagagacaaatatcacactctatggcatccacaacatctacacagcagcatctgccacctatgaccccaggaagcacttttacaatggatagcaatagattccaatctcaggtttacgttggaaatggacctagggatagtgatttatgctattctcctgccccatattcctgttcagataatttaagcacaccattaaattctgtatggaagagctataccccaaaggttatcgatattaactacactgaaggatctggtgatagaaagtggagtagtacaaatttcccatggactaaggaacttgaggccaagaacagaaataagtttggaaaccattctttccgccccaaccaacgagaaataatcaatgccacaatgagtgggcatgatgtttttgttttgatgccaactggtggtgggaaaagtttgacatatcagcttccagcacttataagttctggcttaacattagtagtttgccctcttgtctcactgatccaagaccagatcatgcacttgtcacaggctaatattcctgcaacttatttgagtggcaacttggactggtctgaacagcaagagataatgaaagatttaatgtcatgccgctacaagttgctatacgtcactccagagaaaatagctaagagtggtgctttatcgagactattggacaatttaaattcacaagggcacctttctagaattgttattgatgaagctcattgtgtaagccagtggggtcatgacttccgtcctgattacaagagcttaggtgttctaaaacaaaacttccccaagacaccagtcctggccttgactgcaacagcaactgctagggttaaggaagatgtcgtgcaagctttagcccttgaaaactgcattgttttcaaacaaagttttaatcgtgcaaatctgaggtactacttaagacccaagacaaagaaatgcgttgaggacattgatttatttatccgcacaaatcattctaaagaatgtggcattatatattgcctttcaagaatggattgtgaaaaagtggcagaaaaactaagggactgtgggcacaaagtatcacactaccatggtagcatggatcctatggatagaacacatatacagaagctttggagcaaggataagatcaacataatctgtgctacagttgcatttgggatgggtatcaataaacctgatgttcgctttgttattcatcattcactgcccaagtcaattgaaggatatcatcaggagtgtggacgtgcgggtagagatgggcaaccttcatcttgtgtgctatattaccagtattctgactatattcgggtccgacatatgattacacaaggagttacggagcaaacaggagcaccacgtgatttatcttcacatgagcaagcactgaagacacataaggacaatctcctgaggatggtcagttactgtgaaaatgacgtggactgcagacgcctacttcaactgatccactttggagagaagtttgacccttcgctttgtgcaagaacatgtgataattgcttgaaagagtcaggatgggtcgaaaaagatgttaccaacattgccaggcaattggttgagctagtcacaaggacagggcactcacattcatctacttacattcttgaagtttacagagggtctatgagccaaaatgtcaagaagcagcgtcatgatgctttagctcttcatggagctgggaggcatctagctaaaggtgaggcagcaaggataatgcgacatttagtaactgaggaaatacttaatgaggatgtgaaaaagagcgatatgtatggatcaatatcatctgtcctcaaggtaaatcatttgaaagctagtggtcttctctctggcaagcacaacatcgtcctgaagtttcctgcttctgacaaggcctccaagatgaggaatcttgatgcctcgttgcttccgcaaaccaacaagaatgttcagcagcaaagtgaagtcgatgtgaagcttgcatcaatgctctatgaagctttacttagccttagagaacagataatggaggagtgtaacgaaggattcaatgcgtatcacatattcaaaacagacacgttgaaggaaatgagtatccgagtaccgagaacaaaagaagagcttttggatataaacggcctcggcaagacaaaggtcaagaagtacggggaccgcttgcttgcaaccatcgaggacttcctcagcaaacacccaaatccaaggagaaacagcggcggaggtggcggcggcaacgagcactccgatgcggcaaagaagcgaaggggctccaccgccatctctgcagcgagttacggcgactatgacttcgacgaacgcacgggccagcagtccaagaagcgcgcggccaagacgcgaactgtctctgcccacggcccccgctgcacggacgccgatctcgatgggcctgaggtggtggaggtggacggcgagctgcgcagcgtccggaagcccgtggcgtatggcaatggcagggttcttcccaagtgggcacccctctaacttattccaggaatttggttgtacattggaactgtggcgtcgaatgtacgtccagctggtacacgcgtcaaggacatacgagaccaggagcaagagttccgttgcttgcttccgtgggcagcatcgcgatcgcagtgtcggccacctgttgcccgaaacatcttggatgcaggtacatcttcgcacgcgtgtaccatcaagcgaccaaacttgaattaacatcatcgccatcatcatccgatggctactgtagtaatgtatgcatgtatgctgacgttggactgaccttaaacatttctcttgcatccagttgtcctaggctgtatataggtctagcaagtcttaagggtccgtttgtttcctcgcgggtattctggattatatagtctat

SEQ ID NO: 53976 - DNA, 3214 bp, Zea Mays
agagaagattgctcatgagacgttagctgggatatctgaggattcgagagacagtgaaagttttgatgcagagagtgggaatgaagatgccgaagatcagccctggagaccaagccatgttatcttcgggaaatcaaccatcaagcaggggcaaattgatgcaatgagaggaagatacttctgtgatatttcaattgtgagggctgggggagaaaattttgtccccctgcccgaagctaacgaggtggtagtttatagaagcttcatgaaggcagggcttcagttccctctggataaattgctagttgaagttttgaagacttttgaaatttaccttcatcagcttacccccgaagctatcatcaagatggcgatctttatttgggctatgaggagccaagtattggtaccaaatgcaaaatgtttctgcaatatccacgaactatcctatgagacgaaggctactgttaaggagcaatatcacaacaattttggttgttacagcttcgtgcctcgctctgaggtaagctacccacttccgacattttagaagatatggtcaggggcctggatgcaagagtggttctatgtgaaaaaacgacttggttgaaagggaacatattaaggggattatccaacgccctatctggtcttgcttcggcatcaggaggccatccactgcccttgggaacgacatacaagcatgctaggctgcttttaacacagtgtgcacttacataggcaccacagacttagtctaggagcatattgcttacagagtatggccactcacaagtgggtgggacatgccaaaggaaactgctgctgggtccagtgaaggtggtttggtctatctgaagtacacattcaagtacaggagccagtttgatgagccaaatgctgactggctatatgccattgaggcaaccattaatgaattgctcggtgcctattcgagggctagagatgaggctatgacaatgacctttgggggtcgaggcaaaaagagattgaatagagtttttgatgtcatcgggtttgtatacccggattattgttatccttcgtgaaagcaaggaaagaaaaggaagactgctgcttcggcgatttctagaatgtcgaagccgaaaaaagttaaggttttaacacaccgccccaagcgctttgaaacggccgaagtgccggggcctattgaggggtcttcttccatatctgagccaagtcgttccgctattgctgaagctaggacagaatcagccgaagagctagaactgaagatgtcatcggagcaaccgaaagctttgagtccattgcgagagacggagctatcgagggcatcaaagattcctacatcaactccaaagaggaggagaatggccagcctactagacgttgtcatggaatctgtgaaggtacaaactcctgcttcagcacctgattcagggagcgaagccttaaagaaatctggcgaagatgatatagcgcaagttacttctgagactggaccctcaggtgccgccgaagcatgccctttggggctgctcctgtacccatggaaaaaagaaagtgtatctgaaaaaattaagtctccttctcctgaggaatctactaaagagatggaatttatcgtgcgacatgcttcagggaagcaattgtcgaaggaacatattgccaaagctagacaatatgccagggatctgaagtatccacaaggatccttgatatacaatgacactgatgaagatgactttttatattgcctttcggataataaggagatatctgtttgccgggagatgatgaagaacatagggttcccgaagcttgagctcggtctatctacaatgtcaaaggatgatcttgcagatagccttgcttacaatagcttgaaggtatatattcttttgttgtaaaataaactatgtttgtaggttttcctgctgtcgttatgttctcacatatattttttagggattaattctaagtaaagctttaagagctcaaaaggaagcagatgacgagagctggcagatggctcttggaaatcttcgatcagaagtcatcacattaaggaacgaagctcttgaaaaagataagatactattttccttagtggagaagctaaaaacttgtgagccaagcttagtgctcaagacgaagcccataaagctgaagtcgaaggtttgaagaaaaaacttgaagaaatgaattaaaatttcgaagttgcaaaggctaagcaagaaataagtgaaatggagagatccagggtgcaaaagaatgttgaagagcttcgggattccaaggagagatgccacgaaacatccatggaatgcacgaagaaactgaaagatagctttgcaaaggtgggagcatactcttcggaacaaaaaaatatccgcagtgatctcgaaggagttatccaatggatcggcgaagaagtcgaagctttcgatgaaatactcggcgatcgcggggatttctgcgcattcactggtgcacaaggggttgcagcaattttggaaaaggccggttgtgaacatgttaaggtcgtagcctagtcagaatatacattctcagctgatgacacgaaggacccctcggccgaagcttctttgctaggcgggaagttctattcttatgtctggatgaaaggcggtcatgagatggttgatgaatccattaaaaaggatgaaaaagaatcgcacgacacccaagaaaaggcaaaaaaactgaagaagctgctgaacgcgccatgattatagctaggctttcaccaccactggagtcgtacaaccctgagaccgacccggttattgaagaggctttggatgtaatgaagattgctaacgaagtcgtcgatagactattgcatgaagttgctgagaaaataccgaaggaagattaaattcttgtatgctggaaaatgtaatgcttgtgtatggttgtcgccatgtgtatgaaacaaacatcaagtatttgtatgtacattaatgtaatatatctctttgtgatgcatgaaatctacgtacgcaccgtttttgagcccttggcaaaaaacaccttcccttcttttcatgcttcgcaaagagagttttccttatgccactgttgatgaaggttggcctcgtataatacatatgtctgtcgaaggtacatgttgtgctatagcacattctcttgtgagtcgacaaatatttttgaaggagcaatttcc

SEQ ID NO: 53977 - DNA, 2778 bp, Zea Mays
caacactatagtcttgtggcagttgctgcctgtttgggactaggagttgtcgggttatgcaagtcattgtattgtggtttgtccataccatgggtttctccaaggaatttgttttcggggtttgggagagtatactatgtaggagatctgcgaaatttttggcaacaattgctttcttaatgtcatcctccaggtaaatattgactttgtaattctactgacatccagctagatgaatgctaaataagacagccttttctcggcacacacttgccagttgtgatggttttatttcctttatagaaaatttgtttgcaaccgatggcttgctacctaaagaaaagcctgtaaaaatgcctcttcttcttgctctaagccctctcttggaatgtaatatttttactatggactattgaacttcttatcattttcgagatccccactatgaacttcttatgacaactgtagattcattgtccaatgcaagtattgtccttttactacagacaatttctgggacctcttgacacttgagggctagaagatgtaaattcatgagagcttagatgtaagtactcctttggatattttttctctgatttctgaataggtttttgtaacagtgaaaatttattgttgcctatagcgtggagtgtatgtgtcctgtttgagcttcgccagcttgtagaaggcacatttctgtccctacattttatttttcaccaatggcgaaacttgtgtagtcgtttgccactatttacttgtttgttttttcagcgaacatgcattttggagagaccaacttgaatgtgcggagcagtcgatcacacggtattttcataatggtatagaattctgaattcctaagcaattttgtaattgcagctgttctaagaccatttttgtagttgaatggaagcgataactgaatcaagaatgttctatttatatcggtctcacgtaattgtgagcagcaatagagactaagtagttctgtaattgcatttgttctaagaccattttctgtagttgcatggaagcgataactgaatcaagaatgctctatttatatcgatctcaggtaattctgaattcctaagcagttctgtaattgcagttgttcttagaccattttatgtagttgaatggaagcgatatctgaatcaagaatgttctaagaccattttctgtaattgcagctattctaagaccactgctattttgtaatagatgtcagtgcttattactggtcaatcctcctcagctgcactcaaatctgaagttcgttcagctctttagaagagaaacaaagctaatttcagaagtcgaatactacctgactaacctcatttcagcagagatgtttataatagatgttagtgctcactcgccctcaatggaggaaagggagtttcagaaacatatggaatcgacaagactagctactcaagtatctattgcaagcccaagtagctcacaggggcttcccacatctgcaagggcaaatcaggaggaaactgatatggcaggtttgcttactatactattcaatttattcggataagtttgtttgaccatgaatttgcattccaaaacagtttgttttttgccaccaagcaaaatgtgttcttttttgcttgaaaacaacatgatgtagttattattgcagtcctgttcaggaaccattttacctatcaaataaaataaaatgctaagctcttacagattttcctttaaatggttgttgtgtgtccgtactagttttgaggccgaatgatcatagcatccaaagcgatacatttgacaggttttagattccctttcatggactcagaaactaaaagcttgactctaggagaagtcaagcagctgcatgatctgtataagcgagttgtcacaagatacacgttgttgtctaaagccttaagaaagttatccatagacgaggatcagctccttaattcagtgcatgatccatgaggtgatgtgaagatgatgtctaggcatgatggtattaatcataagcaggcccttttagttatcgtttagttacatatctgattttattttaaacaggtacggatgagggatatccgtggtcaagtttgatgcttcaggaccaatatcgttgtgtgtcgttgctggtggtatctgaatgggggtaaagatatagagagggatttttttcttcaaatgatgatttatcgttgcgtgtcgatgctggtgttatttgaatgggggtatgcggtcggtgctcgtgcgacacagacccacgattctccttggacgccggccgcatgtccgtcagtgacatgggcttctcttgggatgagccctgtgcgtcgtgggacggctgaaacgtgtaacagagagtctcaagttctatagatcttcacttcccctgcttgttctacatttcacgatcctgactgatatttctttttatcatattagggccgagatgtatatatactggcaatacaactttggagaatgcgagttgtgtttctgcctctgagccagtgtagctatatctgatttaaaccatactctgttacagggttccacaaatgttggaaaatctgcatatatgttgttcgtttccatgtaattgttgtgcactaacatttatcgaatagtttgtacaccgttgtaacgcacgtgcactcacctagttgtagtatatatgacaaataatttgcagtcttcaacatcggaaaatccgggtcaaaaggcatgggttgtacacacatttattaaagtcacctagaaacttac

SEQ ID NO: 53978 - DNA, 1841 bp, Zea Mays
caacactatagtcttgtggcagttgctgcctgtttgggactaggagttgtcgggttatgcaagtcattgtattgtggtttgtccataccatgggtttctccaaggaatttgttttcggggtttgggagagtatactatgtaggagatctgcgaaatttttggcaacaattgctttcttaatgtcatcctccaggtaaatattgactttgtaattctactgacatccagctagatgaatgctaaataagacagccttttctcggcacacacttgccagttgtgatggttttatttcctttatagaaaatttgtttgcaaccgatggcttgctacctaaagaaaagcctgtaaaaatgcctcttcttcttgctctaagccctctcttggaatgtaatatttttactatggactattgaacttcttatcattttcgagatccccactatgaacttcttatgacaactgtagattcattgtccaatgcaagtattgtccttttactacagacaatttctgggacctcttgacacttgagggctagaagatgtaaattcatgagagcttagatcgaacatgcattttggagagaccaacttgaatgtgcggagcagtcgatcacacggtattttcataatgttgaatggaagcgataactgaatcaagaatgttctatttatatcggtctcacgtaattgtgagcagcaatagagactaagtagttctgtaattgcatttgttctaagaccattttctgtagttgcatggaagcgataactgaatcaagaatgctctatttatatcgatctcagctattctaagaccactgctattttgtaatagatgtcagtgcttattactggtcaatcctcctcagctgcactcaaatctgaagttcgttcagctctttagaagagaaacaaagctaatttcagaagtcgaatactacctgactaacctcatttcagcagagatgtttataatagatgttagtgctcactcgccctcaatggaggaaagggagtttcagaaacatatggaatcgacaagactagctactcaagtatctattgcaagcccaagtagctcacaggggcttcccacatctgcaagggcaaatcaggaggaaactgatatggcaggtacggatgagggatatccgtggtcaagtttgatgcttcaggaccaatatcgttgtgtgtcgttgctggtggtatctgaatgggggtaaagatatagagagggatttttttcttcaaatgatgatttatcgttgcgtgtcgatgctggtgttatttgaatgggggtatgcggtcggtgctcgtgcgacacagacccacgattctccttggacgccggccgcatgtccgtcagtgacatgggcttctcttgggatgagccctgtgcgtcgtgggacggctgaaacgtgtaacagagagtctcaagttctatagatcttcacttcccctgcttgttctacatttcacgatcctgactgatatttctttttatcatattagggccgagatgtatatatactggcaatacaactttggagaatgcgagttgtgtttctgcctctgagccagtgtagctatatctgatttaaaccatactctgttacagggttccacaaatgttggaaaatctgcatatatgttgttcgtttccatgtaattgttgtgcactaacatttatcgaatagtttgtacaccgttgtaacgcacgtgcactcacctagttgtagtatatatgacaaataatttgcagtcttcaacatcggaaaatccgggtcaaaaggcatgggttgtacacacatttattaaagtcacctagaaacttac

SEQ ID NO: 53979 - DNA, 2000 bp, Zea Mays
caaaattatcgtttggtagctggaacattttattacagaatgctctatttatatcgatctcagattcattgtccaatgcaagtattgtccttttactacagacaatttctgggacctcttgacacttgagggctagaagatgtaaattcatgagagcttagatgtaagtactcctttggatattttttctctgatttctgaataggtttttgtaacagtgaaaatttattgttgcctatagcgtggagtgtatgtgtcctgtttgagcttcgccagcttgtagaaggcacatttctgtccctacattttatttttcaccaatggcgaaacttgtgtagtcgtttgccactatttacttgtttgttttttcagcgaacatgcattttggagagaccaacttgaatgtgcggagcagtcgatcacacggtattttcataatggtatagaattctgaattcctaagcaattttgtaattgcagctgttctaagaccatttttgtagttgaatggaagcgataactgaatcaagaatgttctatttatatcggtctcacgtaattgtgagcagcaatagagactaagtagttctgtaattgcatttgttctaagaccattttctgtagttgcatggaagcgataactgaatcaagaatgctctatttatatcgatctcaggtaattctgaattcctaagcagttctgtaattgcagttgttcttagaccattttatgtagttgaatggaagcgatatctgaatcaagaatgttctaagaccattttctgtaattgcagctattctaagaccactgctattttgtaatagatgtcagtgcttattactggtcaatcctcctcagctgcactcaaatctgaagttcgttcagctctttagaagagaaacaaagctaatttcagaagtcgaatactacctgactaacctcatttcagcagagatgtttataatagatgttagtgctcactcgccctcaatggaggaaagggagtttcagaaacatatggaatcgacaagactagctactcaagtatctattgcaagcccaagtagctcacaggggcttcccacatctgcaagggcaaatcaggaggaaactgatatggcaggttttagattccctttcatggactcagaaactaaaagcttgactctaggagaagtcaagcagctgcatgatctgtataagcgagttgtcacaagatacacgttgttgtctaaagccttaagaaagttatccatagacgaggatcagctccttaattcagtgcatgatccatgaggtacggatgagggatatccgtggtcaagtttgatgcttcaggaccaatatcgttgtgtgtcgttgctggtggtatctgaatgggggtaaagatatagagagggatttttttcttcaaatgatgatttatcgttgcgtgtcgatgctggtgttatttgaatgggggtatgcggtcggtgctcgtgcgacacagacccacgattctccttggacgccggccgcatgtccgtcagtgacatgggcttctcttgggatgagccctgtgcgtcgtgggacggctgaaacgtgtaacagagagtctcaagttctatagatcttcacttcccctgcttgttctacatttcacgatcctgactgatatttctttttatcatattagggccgagatgtatatatactggcaatacaactttggagaatgcgagttgtgtttctgcctctgagccagtgtagctatatctgatttaaaccatactctgttacagggttccacaaatgttggaaaatctgcatatatgttgttcgtttccatgtaattgttgtgcactaacatttatcgaatagtttgtacaccgttgtaacgcacgtgcactcacctagttgtagtatatatgacaaataatttgcagtcttcaacatcggaaaatccgggtcaaaaggcatgggttgtacacacatttattaaagtcacctagaaacttac

SEQ ID NO: 53980 - DNA, 1468 bp, Zea Mays
gaagttgtgatggtcaaaattatcgtttggtagctggaacattttattacagaatgctctatttatatcgatctcagattcattgtccaatgcaagtattgtccttttactacagacaatttctgggacctcttgacacttgagggctagaagatgtaaattcatgagagcttagatcgaacatgcattttggagagaccaacttgaatgtgcggagcagtcgatcacacggtattttcataatgcgataactgaatcaagaatgctctatttatatcgatctcagctattctaagaccactgctattttgtaatagatgtcagtgcttattactggtcaatcctcctcagctgcactcaaatctgaagttcgttcagctctttagaagagaaacaaagctaatttcagaagtcgaatactacctgactaacctcatttcagcagagatgtttataatagatgttagtgctcactcgccctcaatggaggaaagggagtttcagaaacatatggaatcgacaagactagctactcaagtatctattgcaagcccaagtagctcacaggggcttcccacatctgcaagggcaaatcaggaggaaactgatatggcaggtacggatgagggatatccgtggtcaagtttgatgcttcaggaccaatatcgttgtgtgtcgttgctggtggtatctgaatgggggtaaagatatagagagggatttttttcttcaaatgatgatttatcgttgcgtgtcgatgctggtgttatttgaatgggggtatgcggtcggtgctcgtgcgacacagacccacgattctccttggacgccggccgcatgtccgtcagtgacatgggcttctcttgggatgagccctgtgcgtcgtgggacggctgaaacgtgtaacagagagtctcaagttctatagatcttcacttcccctgcttgttctacatttcacgatcctgactgatatttctttttatcatattagggccgagatgtatatatactggtaagcactcatcacttccattattgtgtttttctttagatgttaggggaaaaatgaagagggcaatttctattcaaagatatgtgcattatattgtatatgcaattgctattgctataaatataaatttaacaaacttcattaattcaggcaatacaactttggagaatgcgagttgtgtttctgcctctgagccagtgtagctatatctgatttaaaccatactctgttacagggttccacaaatgttggaaaatctgcatatatgttgttcgtttccatgtaattgttgtgcactaacatttatcgaatagtttgtacaccgttgtaacgcacgtgcactcacctagttgtagtatatatgacaaataatttgcagtcttcaacatcggaaaatccgggtcaaaaggcatgggttgtacacacatttattaaagtcacctagaaacttac

SEQ ID NO: 53981 - DNA, 1482 bp, Zea Mays
gtcgaagttgtgatggtcaaaattatcgtttggtagctggaacattttattacagaatgctctatttatatcgatctcagattcattgtccaatgcaagtattgtccttttactacagacaatttctgggacctcttgacacttgagggctagaagatgtaaattcatgagagcttagatcgaacatgcattttggagagaccaacttgaatgtgcggagcagtcgatcacacggtattttcataatgttgcatggaagcgataactgaatcaagaatgctctatttatatcgatctcagctattctaagaccactgctattttgtaatagatgtcagtgcttattactggtcaatcctcctcagctgcactcaaatctgaagttcgttcagctctttagaagagaaacaaagctaatttcagaagtcgaatactacctgactaacctcatttcagcagagatgtttataatagatgttagtgctcactcgccctcaatggaggaaagggagtttcagaaacatatggaatcgacaagactagctactcaagtatctattgcaagcccaagtagctcacaggggcttcccacatctgcaagggcaaatcaggaggaaactgatatggcaggtacggatgagggatatccgtggtcaagtttgatgcttcaggaccaatatcgttgtgtgtcgttgctggtggtatctgaatgggggtaaagatatagagagggatttttttcttcaaatgatgatttatcgttgcgtgtcgatgctggtgttatttgaatgggggtatgcggtcggtgctcgtgcgacacagacccacgattctccttggacgccggccgcatgtccgtcagtgacatgggcttctcttgggatgagccctgtgcgtcgtgggacggctgaaacgtgtaacagagagtctcaagttctatagatcttcacttcccctgcttgttctacatttcacgatcctgactgatatttctttttatcatattagggccgagatgtatatatactggtaagcactcatcacttccattattgtgtttttctttagatgttaggggaaaaatgaagagggcaatttctattcaaagatatgtgcattatattgtatatgcaattgctattgctataaatataaatttaacaaacttcattaattcaggcaatacaactttggagaatgcgagttgtgtttctgcctctgagccagtgtagctatatctgatttaaaccatactctgttacagggttccacaaatgttggaaaatctgcatatatgttgttcgtttccatgtaattgttgtgcactaacatttatcgaatagtttgtacaccgttgtaacgcacgtgcactcacctagttgtagtatatatgacaaataatttgcagtcttcaacatcggaaaatccgggtcaaaaggcatgggttgtacacacatttattaaagtcacctagaaacttac

SEQ ID NO: 53982 - DNA, 2287 bp, Zea Mays
aaataaggctgattcagattcagaagggtcacttgctactaatgatggcgtggcagataaactgaattattcagaaaataaggctaatcattagtcactcttaacaattcttttgctttttagattgtgtgcttgggtcgtgattcgatggatgatgagacagtggaccaaactgaaaaggattctcaaggaggtaataaaggagcccattgtacagtggaccaaaaaaattatagaggcagagctgaaccgactaatagaggcagagctggacaagtcgaagttgtgatggtcaaaattatcgtttggtagctggaacattttattacagaatgctctatttatatcgatctcagacaatttctgggacctcttgacacttgagggctagaagatgtaaattcatgagagcttagatgtaagtactcctttggatattttttctctgatttctgaataggtttttgtaacagtgaaaatttattgttgcctatagcgtggagtgtatgtgtcctgtttgagcttcgccagcttgtagaaggcacatttctgtccctacattttatttttcaccaatggcgaaacttgtgtagtcgtttgccactatttacttgtttgttttttcagcgaacatgcattttggagagaccaacttgaatgtgcggagcagtcgatcacacggtattttcataatggtatagaattctgaattcctaagcaattttgtaattgcagctgttctaagaccatttttgtagttgaatggaagcgataactgaatcaagaatgttctatttatatcggtctcacgtaattgtgagcagcaatagagactaagtagttctgtaattgcatttgttctaagaccattttctgtagttgcatggaagcgataactgaatcaagaatgctctatttatatcgatctcagctattctaagaccactgctattttgtaatagatgtcagtgcttattactggtcaatcctcctcagctgcactcaaatctgaagttcgttcagctctttagaagagaaacaaagctaatttcagaagtcgaatactacctgactaacctcatttcagcagagatgtttataatagatgttagtgctcactcgccctcaatggaggaaagggagtttcagaaacatatggaatcgacaagactagctactcaagtatctattgcaagcccaagtagctcacaggggcttcccacatctgcaagggcaaatcaggaggaaactgatatggcaggttttagattccctttcatggactcagaaactaaaagcttgactctaggagaagtcaagcagctgcatgatctgtataagcgagttgtcacaagatacacgttgttgtctaaagccttaagaaagttatccatagacgaggatcagctccttaattcagtgcatgatccatgaggtacggatgagggatatccgtggtcaagtttgatgcttcaggaccaatatcgttgtgtgtcgttgctggtggtatctgaatgggggtaaagatatagagagggatttttttcttcaaatgatgatttatcgttgcgtgtcgatgctggtgttatttgaatgggggtatgcggtcggtgctcgtgcgacacagacccacgattctccttggacgccggccgcatgtccgtcagtgacatgggcttctcttgggatgagccctgtgcgtcgtgggacggctgaaacgtgtaacagagagtctcaagttctatagatcttcacttcccctgcttgttctacatttcacgatcctgactgatatttctttttatcatattagggccgagatgtatatatactggtaagcactcatcacttccattattgtgtttttctttagatgttaggggaaaaatgaagagggcaatttctattcaaagatatgtgcattatattgtatatgcaattgctattgctataaatataaatttaacaaacttcattaattcaggcaatacaactttggagaatgcgagttgtgtttctgcctctgagccagtgtagctatatctgatttaaaccatactctgttacagggttccacaaatgttggaaaatctgcatatatgttgttcgtttccatgtaattgttgtgcactaacatttatcgaatagtttgtacaccgttgtaacgcacgtgcactcacctagttgtagtatatatgacaaataatttgcagtcttcaacatcggaaaatccgggtcaaaaggcatgggttgtacacacatttattaaagtcacctagaaacttac

SEQ ID NO: 53983 - DNA, 4935 bp, Zea Mays
ggtcgtcaaattttctccagtactgccttgagtagctgcagtggtgaccacacaagtgaacgagatgcaaagaaggtaaacagtaggagaactgatgtaaatgagaagacaaagttcttcacgtgaggtgagaagacaaagttcttcagataaacagtaggagtataaccagggagtgtggattttctgaatataaatggaaaagaggggatatggtactttagaatttggttttcggtgaaactataaattccattggcatgcttgatttaatgttcacttaaattgtctagatccttatccacttgtcctcatggaagcctctcaaccctcaaatgtttgtctttgctgatttatttgtttaggcaaccctcatttagctgcaccttttcctattaaggaaaaaagaagctttgcgttcaatttctcctagaatctttctgtgataccagctgatttttttattctcttatttggaacgttatgacaacaagaagccactagaaagaataaaggaacagaatgcagtgacaccaccgctccatcatgtaggtgttattacaaatgttagtactaaccttttatgtttatatttgatcaaacctaaaatggctgactcattaaagaatgagaaatgacaaacttttgtgttagagggagtagataatggtcatctgtgcaagctaatctgcagtagtagtcaccagccgatgatcatgtgtttctctgaattctgaaacctaatcctgcttcaaaatggcatatataattcctggtcctctcgaaaaggcaatacaacctgagcttgtgatcttgttttaggagtagataatggtatataattcaagatgttaagtatatataaacaggaatcgtatatgaacccagtttctctgcattctgaaacctaatcctgagatgatgtgattgtgatccactgactggaggatccatgcaaatctcagtgtcaccttctccagcaggcaacaactgactgtttgttggtgtgcagtgttcttcaaactattcagcaactaaactgttcaaacatgttactgaagattggcagctgaaacacatgatcaccggctgaacatggtaggcgtgaaaaataagatcaccgactgaacagtttatgatcaccagctgaaacacaagatctgggaggcgtggaacatggtagctgaactcttcaaacatgttagacaatagcaggcaacaacagtgaaacacaatcaccgactgaaaagttgtccggcacctggactgagcaaatttggttgcctggtggagggaggtctaacggcagacgctgctattcaattatttttttactttactttgtatcctccttacagatgttggatgaaagcaaaccttcattttttttgtttagcaggcctactaaaacaagcttagtgaacctgggtgaacaacatgcactgattcaaaattttatttgcattcattgcatttagcttgccttgatgaccctgtcattctaatcacagtcttgggcattttatttgtgtcggaatccaaacttacaaatttttaacacaaattttttgaaggtgtatggtctggatataaacccaagagttgttctggtagggcgcccgaacgggcgcctcctgttctagtgtggtataaaggggaatctcgatgcccaacgccgcatcgccgtcaagcgcttcaaccgctctgcctggcccgacccgcgctagttcctggtattccatccaccttctcttttaccttttctaattatgtgcatcttgtgggtgtaattgatagttgggaacctgggtgtaattgatagtttgcttataatgaagaagcaagcgtatgttgtgttgttttgtatgcgataggccagtgcatgcatggtggaagcatgacgactgaaaaaaacaatttttacctttcatcctaagcatcacatcttaactatatggcgttatgaaaaaagcatatcagatttcatctcatgctgtgttttggcggtagcttgattatggtataccgttgatgactggttcttttttcttctgatagccatattacagttgccattgtgctttgttgatttatagcttccatatatgcaaggaagaatatgttgatcaatgtcttgcgtgccattcctacatgtttgtgcaaggaggagtgtcctgtcgtgctcccacatgcacttgttgcagcgttcgtcaagaccgataaagatttctaggctatggctgacatttgtgataatagatgagtgggttgtgactagcatctgtcggtgattcacattgcatacgagaatctacttaggatcaaaggtactttttatcagctgatcatcgctttgactccaactcaaatgagccatggaaaggaagctcactgggtcagaactctattcgagaaattgaaagctccaatgaagtaattcctcgtcagtcatcttcaaagatgatgccatgattcccagaaagagaaccttgttgagggctcagaaaataaggctgattcagattcagaagggtcacttgctactaatgatggcgtggcagataaactgaattattcagaaaataaggctaatcattagtcactcttaacaattcttttgctttttagattgtgtgcttgggtcgtgattcgatggatgatgagacagtggaccaaactgaaaaggattctcaaggaggtaataaaggagcccattgtacagtggaccaaaaaaattatagaggcagagctgaaccgactaatagaggcagagctggacaagtcgaagttgtgatggtcaaaattatcgtttggtagctggaacattttattacagaatgctctatttatatcgatctcaggtaattctgaattcctaagcagttctataattacagttgttcttagaccattttatgtagttgaatggaagcgatatctgaatcaagaatgttctaagaccattttctgtaattgtagctactctaagaccactgctattttgtagtaaagtaaacaggcaacactatagtcttgtggcagttgctgcctgtttgggactaggagttgtcgggttatgcaagtcattgtattgtggtttgtccataccatgggtttctccaaggaatttgttttcggggtttgggagagtatactatgtaggagatctgcgaaatttttggcaacaattgctttcttaatgtcatcctccaggtaaatattgactttgtaattctactgacatccagctagatgaatgctaaataagacagccttttctcggcacacacttgccagttgtgatggttttatttcctttatagaaaatttgtttgcaaccgatggcttgctacctaaagaaaagcctgtaaaaatgcctcttcttcttgctctaagccctctcttggaatgtaatatttttactatggactattgaacttcttatcattttcgagatccccactatgaacttcttatgacaactgtagattcattgtccaatgcaagtattgtccttttactacagacaatttctgggacctcttgacacttgagggctagaagatgtaaattcatgagagcttagatcgtggagtgtatgtgtcctgtttgagcttcgccagcttgtagaagcgaacatgcattttggagagaccaacttgaatgtgcggagcagtcgatcacacggtattttcataatgttgcatggaagcgataactgaatcaagaatgctctatttatatcgatctcagctattctaagaccactgctattttgtaatagatgtcagtgcttattactggtcaatcctcctcagctgcactcaaatctgaagttcgttcagctctttagaagagaaacaaagctaatttcagaagtcgaatactacctgactaacctcatttcagcagagatgtttataatagatgttagtgctcactcgccctcaatggaggaaagggagtttcagaaacatatggaatcgacaagactagctactcaagtatctattgcaagcccaagtagctcacaggggcttcccacatctgcaagggcaaatcaggaggaaactgatatggcaggtacggatgagggatatccgtggtcaagtttgatgcttcaggaccaatatcgttgtgtgtcgttgctggtggtatctgaatgggggtaaagatatagagagggatttttttcttcaaatgatgatttatcgttgcgtgtcgatgctggtgttatttgaatgggggtatgcggtcggtgctcgtgcgacacagacccacgattctccttggacgccggccgcatgtccgtcagtgacatgggcttctcttgggatgagccctgtgcgtcgtgggacggctgaaacgtgtaacagagagtctcaagttctatagatcttcacttcccctgcttgttctacatttcacgatcctgactgatatttctttttatcatattagggccgagatgtatatatactggtaagcactcatcacttccattattgtgtttttctttagatgttaggggaaaaatgaagagggcaatttctattcaaagatatgtgcattatattgtatatgcaattgctattgctataaatataaatttaacaaacttcattaattcaggcaatacaactttggagaatgcgagttgtgtttctgcctctgagccagtgtagctatatctgatttaaaccatactctgttacagggttccacaaatgttggaaaatctgcatatatgttgttcgtttccatgtaattgttgtgcactaacatttatcgaatagtttgtacaccgttgtaacgcacgtgcactcacctagttgtagtatatatgacaaataatttgcagtcttcaacatcggaaaatccgggtcaaaaggcatgggttgtacacacatttattaaagtcacctagaaacttac

SEQ ID NO: 53984 - DNA, 2797 bp, Zea Mays
ggtcgtcaaattttctccagtactgccttgagtagctgcagtggtgaccacacaagtgaacgagatgcaaagaagatcttagcaggtaaacagtaggagaactgatgtaaatgagaagacaaagttcttcacgtgaggtgagaagacaaagttcttcagataaacagtaggagtataaccagggagtgtggattttctgaatataaatggaaaagaggggatatggtactttagaatttggttttcggtgaaactataaattccattggcatgcttgatttaatgttcacttaaattgtctagatccttatccacttgtcctcatggaagcctctcaaccctcaaatgtttgtctttgctgatttatttgtttaggcaaccctcatttagctgcaccttttcctattaaggaaaaaagaagctttgcgttcaatttctcctagaatctttctgtgataccagctgatttttttattctcttatttggaacgttatgacaacaagaagccactagaaagaataaaggaacagaatgcagtgacaccaccgctccatcatgtgtatggtctggatataaacccaagagttgttctggtagggcgcccgaacgggcgcctcctgttctagtgtggtataaaggggaatctcgatgcccaacgccgcatcgccgtcaagcgcttcaaccgctctgcctggcccgacccgcgctagttcctggaggagtgtcctgtcgtgctcccacatgcacttgttgcagcgttcgtcaagaccgataaagatttctaggctatggctgacatttgtgataatagatgagtgggttgtgactagcatctgtcggtgattcacattgcatacgagaatctacttaggatcaaaggtactttttatcagctgatcatcgctttgactccaactcaaatgagtaagtttttctcctaatgttatatatttcctatttttagggtcaatgttatatatttattattaagaattgttcgatgtttataatcttcctgttttttactgtcaagcgcgtgacgccatgtgggaccaaaccatttcaccatttttctttgcttcatgatatgactcccactctctttgttctttgctaattgtttgacccaaaagcgaccctgtggtttgggtgaacttgtgatgttgttctttgtttcagctttctaaagaatacattttgtcatggttcttcaattgtaaggttactttttaccttgtagtttgagggagaagcacttccatttggttttgaaatgtccaggagatctgaatactactaaaaattaattagcacatcaacttcttttctgtatttggcaattaccaatgagtacagtagctgacctgttctctgaaaattgttactatcttccttaccaacatgcttttgcattatgttttagaaatgcctccacaatgatcaattactgatcgtcggtacgatgtccactagcgtaaattcatcaagatgaggtttataaatatattgcatttggtatacgtgagacttttggatcttctggtatcattgtggcttgcatgtcagtactttgtataatagagattatgcgagtaatcttaccagtgatgtcgttgtcgatcttacgcttggtgtccctaataacaatcttattaggtccatcagcctttcctgatgaactgtgctgcctgctgtaacattgctgctccgtttgggagcataggtgggtgcaaagctattggggtaggagtaggacagtggttatggctacagctgaaacatctgaagccaaaagcaaactgatttgggtgactaaaatttggacctgaaagaacctaatgaattgtgtcatgtggtgattcaagttcaagatgcatgcgcaacacagacatgcagcagcgcaagggatgaaacgaggcctatttgcagatttagttggtttgaatgtttagcctgttggtttggttttaggatatactagggattgattagtttattaggaacttcaggagatgtcatcagtgccgtatataaacctatggatggtgtaggaaaatatttacctccaatttacctaacacccactctgttcttgcctcgaggttgtgatgagctgatcatggccctgccgtcgtgccattgatgtccacggtcacacccaccccacaactatgccatcgccatccacctccctccaatgtcccccctacatcacaaattgttcagtattttttattccatatagacaacacaatggtaaaatcttctgattttcagtcatacatgggatagaacacaatacatatgctgttgcacatgaatctatactgcattttttattctccagaagttagcataaattaataaatttatgaacaagcagtacaaaccttttctactgatagcctgaatcaaaatgttcttcccttagatgttataacctgctataagtaatgaaaagtgggaaaatacaaaatagtgatcttctttaattagtgacaagtaaacactaaatagttgatgttctttaagcaaaagtattgaaagagaaatgtgaaaggtctattttactaccatgaataattcactttgccagcttgatgttcaaaattttagctcactttactcccctaaactttttgaaattgtccaatctacaccctaattagaattttcttgtatgtctctcataagtagagatgtcaatggggacccgatacccgataacccgtggggaattcccctattagggtacgggtatgggacaaaaattgtccccatgggtatggatatgag

SEQ ID NO: 53985 - DNA, 3890 bp, Zea Mays
cccagatccatgctgaaaatgcttctggacgctggacgctgctttacatgtcttcatgtcagtggtcgtcaaattttctccagtactgccttgagtagctgcagtggtgaccacacaagtgaacgagatgcaaagaaggcagatcttagcaggtaaacagtaggagaactgatgtaaatgagaagacaaagttcttcacgtgaggtgagaagacaaagttcttcagataaacagtaggagtataaccagggagtgtggattttctgaatataaatggaaaagaggggatatggtactttagaatttggttttcggtgaaactataaattccattggcatgcttgatttaatgttcacttaaattgtctagatccttatccacttgtcctcatggaagcctctcaaccctcaaatgtttgtctttgctgatttatttgtttaggcaaccctcatttagctgcaccttttcctattaaggaaaaaagaagctttgcgttcaatttctcctagaatctttctgtgataccagctgatttttttattctcttatttggaacgttatgacaacaagaagccactagaaagaataaaggaacagaatgcagtgacaccaccgctccatcatgtaggtgttattacaaatgttagtactaaccttttatgtttatatttgatcaaacctaaaatggctgactcattaaagaatgagaaatgacaaacttttgtgttagagggagtagataatggtcatctgtgcaagctaatctgcagtagtagtcaccagccgatgatcatgtgtttctctgaattctgaaacctaatcctgcttcaaaatggcatatataattcctggtcctctcgaaaaggcaatacaacctgagcttgtgatcttgttttaggagtagataatggtatataattcaagatgttaagtatatataaacaggaatcgtatatgaacccagtttctctgcattctgaaacctaatcctgagatgatgtgattgtgatccactgactggaggatccatgcaaatctcagtgtcaccttctccagcaggcaacaactgactgtttgttggtgtgcagtgttcttcaaactattcagcaactaaactgttcaaacatgttactgaagattggcagctgaaacacatgatcaccggctgaacatggtaggcgtgaaaaataagatcaccgactgaacagtttatgatcaccagctgaaacacaagatctgggaggcgtggaacatggtagctgaactcttcaaacatgttagacaatagcaggcaacaacagtgaaacacaatcaccgactgaaaagttgtccggcacctggactgagcaaatttggttgcctggtggagggaggtctaacggcagacgctgctattcaattatttttttactttactttgtatcctccttacagatgttggatgaaagcaaaccttcattttttttgtttagcaggcctactaaaacaagcttagtgaacctgggtgaacaacatgcactgattcaaaattttatttgcattcattgcatttagcttgccttgatgaccctgtcattctaatcacagtcttgggcattttatttgtgtcggaatccaaacttacaaatttttaacacaaattttttgaaggtgtatggtctggatataaacccaagagttgttctggtagggcgcccgaacgggcgcctcctgttctagtgtggtataaaggggaatctcgatgcccaacgccgcatcgccgtcaagcgcttcaaccgctctgcctggcccgacccgcgctagttcctggaggagtgtcctgtcgtgctcccacatgcacttgttgcagcgttcgtcaagaccgataaagatttctaggctatggctgacatttgtgataatagatgagtgggttgtgactagcatctgtcggtgattcacattgcatacgagaatctacttaggatcaaaggtactttttatcagctgatcatcgctttgactccaactcaaatgagtaagtttttctcctaatgttatatatttcctatttttagggtcaatgttatatatttattattaagaattgttcgatgtttataatcttcctgttttttactgtcaagcgcgtgacgccatgtgggaccaaaccatttcaccatttttctttgcttcatgatatgactcccactctctttgttctttgctaattgtttgacccaaaagcgaccctgtggtttgggtgaacttgtgatgttgttctttgtttcagctttctaaagaatacattttgtcatggttcttcaattgtaaggttactttttaccttgtagtttgagggagaagcacttccatttggttttgaaatgtccaggagatctgaatactactaaaaattaattagcacatcaacttcttttctgtatttggcaattaccaatgagtacagtagctgacctgttctctgaaaattgttactatcttccttaccaacatgcttttgcattatgttttagaaatgcctccacaatgatcaattactgatcgtcggtacgatgtccactagcgtaaattcatcaagatgaggtttataaatatattgcatttggtatacgtgagacttttggatcttctggtatcattgtggcttgcatgtcagtactttgtataatagagattatgcgagtaatcttaccagtgatgtcgttgtcgatcttacgcttggtgtccctaataacaatcttattaggtccatcagcctttcctgatgaactgtgctgcctgctgtaacattgctgctccgtttgggagcataggtgggtgcaaagctattggggtaggagtaggacagtggttatggctacagctgaaacatctgaagccaaaagcaaactgatttgggtgactaaaatttggacctgaaagaacctaatgaattgtgtcatgtggtgattcaagttcaagatgcatgcgcaacacagacatgcagcagcgcaagggatgaaacgaggcctatttgcagatttagttggtttgaatgtttagcctgttggtttggttttaggatatactagggattgattagtttattaggaacttcaggagatgtcatcagtgccgtatataaacctatggatggtgtaggaaaatatttacctccaatttacctaacacccactctgttcttgcctcgaggttgtgatgagctgatcatggccctgccgtcgtgccattgatgtccacggtcacacccaccccacaactatgccatcgccatccacctccctccaatgtcccccctacatcacaaattgttcagtattttttattccatatagacaacacaatggtaaaatcttctgattttcagtcatacatgggatagaacacaatacatatgctgttgcacatgaatctatactgcattttttattctccagaagttagcataaattaataaatttatgaacaagcagtacaaaccttttctactgatagcctgaatcaaaatgttcttcccttagatgttataacctgctataagtaatgaaaagtgggaaaatacaaaatagtgatcttctttaattagtgacaagtaaacactaaatagttgatgttctttaagcaaaagtattgaaagagaaatgtgaaaggtctattttactaccatgaataattcactttgccagcttgatgttcaaaattttagctcactttactcccctaaactttttgaaattgtccaatctacaccctaattagaattttcttgtatgtctctcataagtagagatgtcaatggggacccgatacccgataacccgtggggaattcccctattagggtacgggtatgggacaaaaattgtccccatgggtatggatatgag

SEQ ID NO: 53986 - DNA, 1857 bp, Zea Mays
attttcagagaccgacagcatggaggcgtcatgagcagacagagcatggtcgccgtggagcagctcaccggccctgccagtgccagacccgctcacacgtgcgctgctcagcctcatgctcaccagctgctcagtgctcgatacgatcaccgtggcgcgtgcgcgtctcaagttgaattaccggaccggatctcgccatccaacgcttccacgttctgcacgagcatgtactcgtcgtcgtcgtcgtcgtcggcggcggcggattcctccaagtcgtgccggcgggcaggcgctctgccgttcctgccccatcctcctaaacgtgagcagcagcagcagcagcagtcatccagctctccatcactgctcgtctgtactgacctcggcaacggtggtcaagacgaggctgaagctgaacatccggctgagctcaaggacttcctgaacctctctggagaagcttcatggagaggcggtttccatggagagagcagcggcgtcgctttcagattcggagagcaggtggagtttcagttcttgtctgaacagctcgggatcgccatcaccgaccacgacgagagccctcgactagatgacatatacgacaggccgccgcaaacctcttcttgtccggtactgtcttgctccgaccaagaagaaggtctccagagggcagggtctcctgttaaagctcagccgagttcatctcgagctgcatcatgtaataacaagccaagactgaggtggactctggagctccatgagcttttcgtgaaggctgtcaacaagcttggagggccagaaaaggcaactcctaagggcgtgttgaggcttatgaaggtagaaggcttgaccatctatcatgtgaagagccatttgcagaagtatcgttttgccaagtatcttccggagacaaaagaagacatgaagtcctcttcagaagacaagatatccaaatcagagatgcctggaagcaacgctggcagaaagaagattctcagaagcttacaagtagcagaagctcttcggatgcaaatggaggttcagaaacaacttcatgaacaattagaggtgcaaaggcagctacaagtgcgcatagaagaacatgcaaagtatctgcacaagatattagaacagcagaaggcaaggaattccttatcagctacgacaagttcaatagaaacagagctttctgaatctacaaaggaagagaaacctgagacacaagcggatacttcttcagctcagttgccaaataaaaagaactcagatactgacatggaatgactcataaccaaagaactcattatgtatgaacaactgaacatgttgactcgccaagcactttccttctctaaccttgtagaatacaaacacttctgcctagatgcttctctcttgtatcatcatccctagtgcttgaaagagttctagctagccattgtatatgatttattttcagatgaaaatgctacaaaaaaaggaggaggaccagccattcatctattccatgtgtcactaaatttatttctgcctgtaaatgacgacagctgttcacagaagaaagaatgactttctgatttctacagtttctgcgtgtatcgtaagaacaaaactgttgcctacacaaactggggatctatgtagaacttcctgtgtaattttctgcatacctacagcagtgggtgtgcttgaatggccccttcaggtgaggaatgctgaataggccagccacttctgttttcttcttcagtgaatcgcaggagctcctcttgccctcttcgaagaggtttctttggagaactagaagtatagtcccatcccatcattgaaggtgctagtttcgaagaggctaaa

SEQ ID NO: 53987 - DNA, 2064 bp, Zea Mays
ggaataggagcgggggagtccgaggataggcaactcattgcttctgaatctctctcctcgtcgcgacgagatcctctgcatctctacttccccggggaagtagctgctagcgtgtgggtctgacctctcctcatcccgagttcttcattttcagagtcttgactcttcaggcccagaggctccgcaatgaactttttggaatctattgcggtgaatggacacagagaccgacagcatggaggcgtcatgagcagacagagcatggtcgccgtggagcagctcaccggccctgccagtgccagacccgctcacacgtgcgctgctcagcctcatgctcaccagctgctcagtgctcgatacgatcaccgtggcgcgtgcgcgtctcaagttgaattaccggaccggatctcgccatccaacgcttccacgttctgcacgagcatgtactcgtcgtcgtcgtcgtcgtcggcggcggcggattcctccaagtcgtgccggcgggcaggcgctctgccgttcctgccccatcctcctaaacgtgagcagcagcagcagcagcagtcatccagctctccatcactgctcgtctgtactgacctcggcaacggtggtcaagacgaggctgaagctgaacatccggctgagctcaaggacttcctgaacctctctggagaagcttcatggagaggcggtttccatggagagagcagcggcgtcgctttcagattcggagagcaggtggagtttcagttcttgtctgaacagctcgggatcgccatcaccgaccacgacgagagccctcgactagatgacatatacgacaggccgccgcaaacctcttcttgtccggtactgtcttgctccgaccaagaagaaggtctccagagggcagggtctcctgttaaagctcagccgagttcatctcgagctgcatcatgtaataacaagccaagactgaggtggactctggagctccatgagcttttcgtgaaggctgtcaacaagcttggagggccagaaaaggcaactcctaagggcgtgttgaggcttatgaaggtagaaggcttgaccatctatcatgtgaagagccatttgcagaagtatcgttttgccaagtatcttccggagacaaaagaagacatgaagtcctcttcagaagacaagatatccaaatcagagatgcctggaagcaacgctggcagaaagaaaagcttacaagtagcagaagctcttcggatgcaaatggaggttcagaaacaacttcatgaacaattagaggtgcaaaggcagctacaagtgcgcatagaagaacatgcaaagtatctgcacaagatattagaacagcagaaggcaaggaattccttatcagctacgacaagttcaatagaaacagagctttctgaatctacaaaggaagagaaacctgagacacaagcggatacttcttcagctcagttgccaaataaaaagaactcagatactgacatggaatgactcataaccaaagaactcattatgtatgaacaactgaacatgttgactcgccaagcactttccttctctaaccttgtagaatacaaacacttctgcctagatgcttctctcttgtatcatcatccctagtgcttgaaagagttctagctagccattgtatatgatttattttcagatgaaaatgctacaaaaaaaggaggaggaccagccattcatctattccatgtgtcactaaatttatttctgcctgtaaatgacgacagctgttcacagaagaaagaatgactttctgatttctacagtttctgcgtgtatcgtaagaacaaaactgttgcctacacaaactggggatctatgtagaacttcctgtgtaattttctgcatacctacagcagtgggtgtgcttgaatggccccttcaggtgaggaatgctgaataggccagccacttctgttttcttcttcagtgaatcgcaggagctcctcttgccctcttcgaagaggtttctttggagaactagaagtatagtcccatcccatcattgaaggtgctagtttcgaagaggctaaa

SEQ ID NO: 53988 - DNA, 2208 bp, Zea Mays
ggaataggagcgggggagtccgaggataggcaactcattgcttctgaatctctctcctcgtcgcgacgagatcctctgcatctctacttccccggggaagtagctgctagcgtgtgggtctgacctctcctcatcccgagttcttcattttcagtggtctgcttgggaaccgaaccaccatgaaccttgcgtgggctctgcattcctttccttccgattcctgctgcctctgtgtctcctccaatccatgtgacgtgaagcagctatgatatatatatattttttccagagtcttgactcttcaggcccagaggctccgcaatgaactttttggaatctattgcggtgaatggacacagagaccgacagcatggaggcgtcatgagcagacagagcatggtcgccgtggagcagctcaccggccctgccagtgccagacccgctcacacgtgcgctgctcagcctcatgctcaccagctgctcagtgctcgatacgatcaccgtggcgcgtgcgcgtctcaagttgaattaccggaccggatctcgccatccaacgcttccacgttctgcacgagcatgtactcgtcgtcgtcgtcgtcgtcggcggcggcggattcctccaagtcgtgccggcgggcaggcgctctgccgttcctgccccatcctcctaaacgtgagcagcagcagcagcagcagtcatccagctctccatcactgctcgtctgtactgacctcggcaacggtggtcaagacgaggctgaagctgaacatccggctgagctcaaggacttcctgaacctctctggagaagcttcatggagaggcggtttccatggagagagcagcggcgtcgctttcagattcggagagcaggtggagtttcagttcttgtctgaacagctcgggatcgccatcaccgaccacgacgagagccctcgactagatgacatatacgacaggccgccgcaaacctcttcttgtccggtactgtcttgctccgaccaagaagaaggtctccagagggcagggtctcctgttaaagctcagccgagttcatctcgagctgcatcatgtaataacaagccaagactgaggtggactctggagctccatgagcttttcgtgaaggctgtcaacaagcttggagggccagaaaaggcaactcctaagggcgtgttgaggcttatgaaggtagaaggcttgaccatctatcatgtgaagagccatttgcagaagtatcgttttgccaagtatcttccggagacaaaagaagacatgaagtcctcttcagaagacaagatatccaaatcagagatgcctggaagcaacgctggcagaaagaagattctcagaagcttacaagtagcagaagctcttcggatgcaaatggaggttcagaaacaacttcatgaacaattagaggtgcaaaggcagctacaagtgcgcatagaagaacatgcaaagtatctgcacaagatattagaacagcagaaggcaaggaattccttatcagctacgacaagttcaatagaaacagagctttctgaatctacaaaggaagagaaacctgagacacaagcggatacttcttcagctcagttgccaaataaaaagaactcagatactgacatggaatgactcataaccaaagaactcattatgtatgaacaactgaacatgttgactcgccaagcactttccttctctaaccttgtagaatacaaacacttctgcctagatgcttctctcttgtatcatcatccctagtgcttgaaagagttctagctagccattgtatatgatttattttcagatgaaaatgctacaaaaaaaggaggaggaccagccattcatctattccatgtgtcactaaatttatttctgcctgtaaatgacgacagctgttcacagaagaaagaatgactttctgatttctacagtttctgcgtgtatcgtaagaacaaaactgttgcctacacaaactggggatctatgtagaacttcctgtgtaattttctgcatacctacagcagtgggtgtgcttgaatggccccttcaggtgaggaatgctgaataggccagccacttctgttttcttcttcagtgaatcgcaggagctcctcttgccctcttcgaagaggtttctttggagaactagaagtatagtcccatcccatcattgaaggtgctagtttcgaagaggctaaa

SEQ ID NO: 53989 - DNA, 2354 bp, Zea Mays
ggaataggagcgggggagtccgaggataggcaactcattgcttctgaatctctctcctcgtcgcgacgagatcctctgcatctctacttccccggggaagtagctgctagcgtgtgggtctgacctctcctcatcccgagttcttcattttcaggtaagtggtttggatcttaccgcagcatcatttttttctttccttccatgaatggttgtttggtttctcctcctcagagttagctgcagtcccagactctcgttctcgttcctggtcttcttcttcctccaccatttgtgcttgtgctgtttcagtggtctgcttgggaaccgaaccaccatgaaccttgcgtgggctctgcattcctttccttccgattcctgctgcctctgtgtctcctccaatccatgtgacgtgaagcagctatgatatatatatattttttccagagtcttgactcttcaggcccagaggctccgcaatgaactttttggaatctattgcggtgaatggacacagagaccgacagcatggaggcgtcatgagcagacagagcatggtcgccgtggagcagctcaccggccctgccagtgccagacccgctcacacgtgcgctgctcagcctcatgctcaccagctgctcagtgctcgatacgatcaccgtggcgcgtgcgcgtctcaagttgaattaccggaccggatctcgccatccaacgcttccacgttctgcacgagcatgtactcgtcgtcgtcgtcgtcgtcggcggcggcggattcctccaagtcgtgccggcgggcaggcgctctgccgttcctgccccatcctcctaaacgtgagcagcagcagcagcagcagtcatccagctctccatcactgctcgtctgtactgacctcggcaacggtggtcaagacgaggctgaagctgaacatccggctgagctcaaggacttcctgaacctctctggagaagcttcatggagaggcggtttccatggagagagcagcggcgtcgctttcagattcggagagcaggtggagtttcagttcttgtctgaacagctcgggatcgccatcaccgaccacgacgagagccctcgactagatgacatatacgacaggccgccgcaaacctcttcttgtccggtactgtcttgctccgaccaagaagaaggtctccagagggcagggtctcctgttaaagctcagccgagttcatctcgagctgcatcatgtaataacaagccaagactgaggtggactctggagctccatgagcttttcgtgaaggctgtcaacaagcttggagggccagaaaaggcaactcctaagggcgtgttgaggcttatgaaggtagaaggcttgaccatctatcatgtgaagagccatttgcagaagtatcgttttgccaagtatcttccggagacaaaagaagacatgaagtcctcttcagaagacaagatatccaaatcagagatgcctggaagcaacgctggcagaaagaaaagcttacaagtagcagaagctcttcggatgcaaatggaggttcagaaacaacttcatgaacaattagaggtgcaaaggcagctacaagtgcgcatagaagaacatgcaaagtatctgcacaagatattagaacagcagaaggcaaggaattccttatcagctacgacaagttcaatagaaacagagctttctgaatctacaaaggaagagaaacctgagacacaagcggatacttcttcagctcagttgccaaataaaaagaactcagatactgacatggaatgactcataaccaaagaactcattatgtatgaacaactgaacatgttgactcgccaagcactttccttctctaaccttgtagaatacaaacacttctgcctagatgcttctctcttgtatcatcatccctagtgcttgaaagagttctagctagccattgtatatgatttattttcagatgaaaatgctacaaaaaaaggaggaggaccagccattcatctattccatgtgtcactaaatttatttctgcctgtaaatgacgacagctgttcacagaagaaagaatgactttctgatttctacagtttctgcgtgtatcgtaagaacaaaactgttgcctacacaaactggggatctatgtagaacttcctgtgtaattttctgcatacctacagcagtgggtgtgcttgaatggccccttcaggtgaggaatgctgaataggccagccacttctgttttcttcttcagtgaatcgcaggagctcctcttgccctcttcgaagaggtttctttggagaactagaagtatagtcccatcccatcattgaaggtgctagtttcgaagaggctaaa

SEQ ID NO: 53990 - DNA, 2073 bp, Zea Mays
ggaataggagcgggggagtccgaggataggcaactcattgcttctgaatctctctcctcgtcgcgacgagatcctctgcatctctacttccccggggaagtagctgctagcgtgtgggtctgacctctcctcatcccgagttcttcattttcagagtcttgactcttcaggcccagaggctccgcaatgaactttttggaatctattgcggtgaatggacacagagaccgacagcatggaggcgtcatgagcagacagagcatggtcgccgtggagcagctcaccggccctgccagtgccagacccgctcacacgtgcgctgctcagcctcatgctcaccagctgctcagtgctcgatacgatcaccgtggcgcgtgcgcgtctcaagttgaattaccggaccggatctcgccatccaacgcttccacgttctgcacgagcatgtactcgtcgtcgtcgtcgtcgtcggcggcggcggattcctccaagtcgtgccggcgggcaggcgctctgccgttcctgccccatcctcctaaacgtgagcagcagcagcagcagcagtcatccagctctccatcactgctcgtctgtactgacctcggcaacggtggtcaagacgaggctgaagctgaacatccggctgagctcaaggacttcctgaacctctctggagaagcttcatggagaggcggtttccatggagagagcagcggcgtcgctttcagattcggagagcaggtggagtttcagttcttgtctgaacagctcgggatcgccatcaccgaccacgacgagagccctcgactagatgacatatacgacaggccgccgcaaacctcttcttgtccggtactgtcttgctccgaccaagaagaaggtctccagagggcagggtctcctgttaaagctcagccgagttcatctcgagctgcatcatgtaataacaagccaagactgaggtggactctggagctccatgagcttttcgtgaaggctgtcaacaagcttggagggccagaaaaggcaactcctaagggcgtgttgaggcttatgaaggtagaaggcttgaccatctatcatgtgaagagccatttgcagaagtatcgttttgccaagtatcttccggagacaaaagaagacatgaagtcctcttcagaagacaagatatccaaatcagagatgcctggaagcaacgctggcagaaagaagattctcagaagcttacaagtagcagaagctcttcggatgcaaatggaggttcagaaacaacttcatgaacaattagaggtgcaaaggcagctacaagtgcgcatagaagaacatgcaaagtatctgcacaagatattagaacagcagaaggcaaggaattccttatcagctacgacaagttcaatagaaacagagctttctgaatctacaaaggaagagaaacctgagacacaagcggatacttcttcagctcagttgccaaataaaaagaactcagatactgacatggaatgactcataaccaaagaactcattatgtatgaacaactgaacatgttgactcgccaagcactttccttctctaaccttgtagaatacaaacacttctgcctagatgcttctctcttgtatcatcatccctagtgcttgaaagagttctagctagccattgtatatgatttattttcagatgaaaatgctacaaaaaaaggaggaggaccagccattcatctattccatgtgtcactaaatttatttctgcctgtaaatgacgacagctgttcacagaagaaagaatgactttctgatttctacagtttctgcgtgtatcgtaagaacaaaactgttgcctacacaaactggggatctatgtagaacttcctgtgtaattttctgcatacctacagcagtgggtgtgcttgaatggccccttcaggtgaggaatgctgaataggccagccacttctgttttcttcttcagtgaatcgcaggagctcctcttgccctcttcgaagaggtttctttggagaactagaagtatagtcccatcccatcattgaaggtgctagtttcgaagaggctaaa

SEQ ID NO: 53991 - DNA, 2187 bp, Zea Mays
ggaataggagcgggggagtccgaggataggcaactcattgcttctgaatctctctcctcgtcgcgacgagatcctctgcatctctacttccccggggaagtagctgctagcgtgtgggtctgacctctcctcatcccgagttcttcattttcagagttagctgcagtcccagactctcgttctcgttcctggtcttcttcttcctccaccatttgtgcttgtgctgtttcagtggtctgcttgggaaccgaaccaccatgaaccttgcagtcttgactcttcaggcccagaggctccgcaatgaactttttggaatctattgcggtgaatggacacagagaccgacagcatggaggcgtcatgagcagacagagcatggtcgccgtggagcagctcaccggccctgccagtgccagacccgctcacacgtgcgctgctcagcctcatgctcaccagctgctcagtgctcgatacgatcaccgtggcgcgtgcgcgtctcaagttgaattaccggaccggatctcgccatccaacgcttccacgttctgcacgagcatgtactcgtcgtcgtcgtcgtcgtcggcggcggcggattcctccaagtcgtgccggcgggcaggcgctctgccgttcctgccccatcctcctaaacgtgagcagcagcagcagcagcagtcatccagctctccatcactgctcgtctgtactgacctcggcaacggtggtcaagacgaggctgaagctgaacatccggctgagctcaaggacttcctgaacctctctggagaagcttcatggagaggcggtttccatggagagagcagcggcgtcgctttcagattcggagagcaggtggagtttcagttcttgtctgaacagctcgggatcgccatcaccgaccacgacgagagccctcgactagatgacatatacgacaggccgccgcaaacctcttcttgtccggtactgtcttgctccgaccaagaagaaggtctccagagggcagggtctcctgttaaagctcagccgagttcatctcgagctgcatcatgtaataacaagccaagactgaggtggactctggagctccatgagcttttcgtgaaggctgtcaacaagcttggagggccagaaaaggcaactcctaagggcgtgttgaggcttatgaaggtagaaggcttgaccatctatcatgtgaagagccatttgcagaagtatcgttttgccaagtatcttccggagacaaaagaagacatgaagtcctcttcagaagacaagatatccaaatcagagatgcctggaagcaacgctggcagaaagaagattctcagaagcttacaagtagcagaagctcttcggatgcaaatggaggttcagaaacaacttcatgaacaattagaggtgcaaaggcagctacaagtgcgcatagaagaacatgcaaagtatctgcacaagatattagaacagcagaaggcaaggaattccttatcagctacgacaagttcaatagaaacagagctttctgaatctacaaaggaagagaaacctgagacacaagcggatacttcttcagctcagttgccaaataaaaagaactcagatactgacatggaatgactcataaccaaagaactcattatgtatgaacaactgaacatgttgactcgccaagcactttccttctctaaccttgtagaatacaaacacttctgcctagatgcttctctcttgtatcatcatccctagtgcttgaaagagttctagctagccattgtatatgatttattttcagatgaaaatgctacaaaaaaaggaggaggaccagccattcatctattccatgtgtcactaaatttatttctgcctgtaaatgacgacagctgttcacagaagaaagaatgactttctgatttctacagtttctgcgtgtatcgtaagaacaaaactgttgcctacacaaactggggatctatgtagaacttcctgtgtaattttctgcatacctacagcagtgggtgtgcttgaatggccccttcaggtgaggaatgctgaataggccagccacttctgttttcttcttcagtgaatcgcaggagctcctcttgccctcttcgaagaggtttctttggagaactagaagtatagtcccatcccatcattgaaggtgctagtttcgaagaggctaaa

SEQ ID NO: 53992 - DNA, 3798 bp, Zea Mays
ctccaagccaagaccaagagtaatcagaagcagctgccaaatggccaaatcccgaaagcccctgtccccagcccgcctctcaaacccctaatccctagccacaccacgccctcttccctccttccccgttggcttcggcggcgggcggccatcagcaaccagcatcgtacggaggagaagcgctgtttacacccgtctggcagggatgccgctggggcagcgttcgggggacaagagcgactcccgctactgcggggtggaggttctcgacttccccgccggggagggcctccctgccgtcctcaatcactccctcgcctccgccttcgacttcatcctcgcccctctggttgatcccaactaccggccggcgcccggcgccgttctgccagtgtcagcgtcggacctcgtcctcggcccgtcccagtggagcaaccacgtcgtcgggaagatcagcgagtggattgatttggacgcggaggacgagcggctccggctggactccgagctcacgctgaagcaggagatcgcttgggcatctcacgtttcgctgcaggcatgtgttattcctgcccccaggagatctttttgcggcaattatgccagagttgtgaatcaaattttgcaaggcctgaccaatatgaatttgtggcttaggttgcctctggagaagtccgagcctatggatggtgatcttgataaaataaagaacaacaaccacacgagtgaaatagcagactcatgggaattatggaattcattcagattgctatgtgaccatagtagccaactatgcgtggcacttgatatttcgggcacactgccatcaatgaactcattagggcgctggtttggggagcctgtaagggctgctattctgcaaaccaatgcttttcttacaaatgcaagaggatatccttgtttatcaaagcggcatcagaggctgctaactggactttttaatcattctgttcaggcgataatctctgggagatcgaatcacaatgtttttccagcatctgaaggagtgctctcaggcgatgagggcaacgctgaagattcctatgttcgacatgcattagctccgtacctggagtacattgcatacctgtatcagaagatggatccgcttcctgagcaggaacgctttgagattaattacagggattttttgcagtctcctctccagcctctaatggataatttggaagctcagacttacgagacttttgagaaggatgttgtgaagtatactcagtatcgaagagcagttgctaaggccttggttgatagggttgcagatgatgcagtctccacaactaggacggttctgatggttgtgggagcaggccgagggcctctagtacgagcatcattgcaggctgctgaagaaactggtcgcaagttaaaagtatatgctgttgaaaaaaatcctaacgctgttattactcttcatagtttgatcaaattggagggttgggaaagcctggttactgtaatttctagtgacatgcggtgttgggatgcccctgaaaaggcagatattttggtaagtgaattgcttgggtcctttggggacaatgaactatctccggagtgtctggatggtgctcaacgattcttgaagcctgatgggatttccattccttcatcatacaccagcttcatccaaccaataacagcgtcaaaattgcacgacgacatcaaagcacacaaagatattgcacattttgaaacggcatatgttgtgaaactacaccgcatagcgacacttgcacctccacaacaggtttttactttcacccatccaaatttctcaccaaatgccagcaaccaaaggtacaccaagttgcaatttgaaatgctgccagacatgggttcatgccttgtgcacggatttgctggctattttgactctgttctttataaggatgttcatcttggaatcgagccaaacaccgctacaccaaacatgttcagctggttcccgatcttcttcccattgagaaagcccatctacgtgcccgaagggtctcctatagaagtgcacttctggcggtgctgtgcccccacgaaggtgtggtacgagtgggctgtgactacgccgaccccgtcgccgatccacaacagcaatggccggtcctattgggttggtctataataaggcatcaagatcatctttgtgttgtaacagagaggaaaaataacagagatgatatggtttagttctatctgagttgagcagtgtgcttagtgctactggtttctgcctggagagctgatcaaaggatatatgtagcgtgttgttatctgatctgaaagggagtgcttgacccccaacgttgttctactcgattttgctagcgtttcagtaggatttttctagaattgcaaacgttatgctttcgtcagattctgaagcgtctgcatcctttcctttttcatctatgtactgtggctcttgtgtgtgactggaaattcgttaccagtttgctatgctggaacatggaaaagaaaaaaaagagataattataattgtttcattcaggacgcccgtctccacgtagcctggaaggttcacgaggttcattgagccgttgagcgtgtaactgccgtgaaggttcccgaagcatctggaacacgtgggcacgccgcacgccactgggcgtgtgcgctgaccctgacggcaccaaaaggagaaagaggaagcgagcccccaggaaagcggtcagaattggagtgcaagcgacgcgtcgagccccatcccgttcccgcgcctcgccgagagatctgcgccgtcgtcggcaccaatccgtacacccgtcagtccgtccgtcgtcggcgccggcgaacgagtagagatggaggagacggcggcagcggcaccggctgagaaggcgtcgtcgtacaggtactgggtgcgggaagccaccggcgacgccgcgccgctccccgtcccgcgcaagctcgaccccgccgccaatgggaacgggaacccgccgcccctcgggtccgtctggaatcaggctggaacttgggaggaaaagaacctcaactcatgggctaatagtaggataaaggatttgctgggctctctaggttcattgaagttccctacagggaatgcatccgttgatgaagtgtccaagtgctcaggcgatgcctttcaggtcactgtccgcaacaagaagagagtaggatataactacgaactaagcttgagatttaaaggtgaatggttagttaaagaagaaaacaagaagatcaaaggacacttagacattcccgagttctcgttcggtgagatcgatgacctggaggtgcaagtaaggttcagtgacgacaagggcctcgcatccgacgacaaggcacggatctgcaaggatctcaagtcctttatggccccgattcaggagaaaatgcgcgtgttcgaagaagagctcaagggtagatagcgagcattagcgagaatcggcagtgctaggtgggcgctgccgtgcccgtgctggaatgatgagtaaaacatgttgacgtcttgtggtgtctccacgttctaaagtcgtcttcggatgactgggactgtctgtgtactgatgctatgcacttccggagatgagtatgtacggttacgaactgcctaaaccgtctcttcgtcctaatcattttcgggatatgatggtagtagagagatttagggcttgtttggttcctaatttgtttttatctaaggttagttctttaatttggtcgactaaccttagacaagttatgaatagtggtaatgaatcacgatctaaa

SEQ ID NO: 53993 - DNA, 3808 bp, Zea Mays
gagactccaagccaagaccaagagtaatcagaagcagctgccaaatggccaaatcccgaaagcccctgtccccagcccgcctctcaaacccctaatccctagccacaccacgccctcttccctccttccccgttggcttcggcggcgggcggccatcagcaaccagcatcgtacggaggagaagcgctgtttacacccgtctggcagggatgccgctggggcagcgttcgggggacaagagcgactcccgctactgcggggtggaggttctcgacttccccgccggggagggcctccctgccgtcctcaatcactccctcgcctccgccttcgacttcatcctcgcccctctggttgatcccaactaccggccggcgcccggcgccgttctgccagtgtcagcgtcggacctcgtcctcggcccgtcccagtggagcaaccacgtcgtcgggaagatcagcgagtggattgatttggacgcggaggacgagcggctccggctggactccgagctcacgctgaagcaggagatcgcttgggcatctcacgtttcgctgcaggcatgtgttattcctgcccccaggagatctttttgcggcaattatgccagagttgtgaatcaaattttgcaaggcctgaccaatatgaatttgtggcttaggttgcctctggagaagtccgagcctatggatggtgatcttgataaaataaagaacaacaaccacacgctacagagtgaaatagcagactcatgggaattatggaattcattcagattgctatgtgaccatagtagccaactatgcgtggcacttgatatttcgggcacactgccatcaatgaactcattagggcgctggtttggggagcctgtaagggctgctattctgcaaaccaatgcttttcttacaaatgcaagaggatatccttgtttatcaaagcggcatcagaggctgctaactggactttttaatcattctgttcaggcgataatctctgggagatcgaatcacaatgtttttccagcatctgaaggagtgctctcaggcgatgagggcaacgctgaagattcctatgttcgacatgcattagctccgtacctggagtacattgcatacctgtatcagaagatggatccgcttcctgagcaggaacgctttgagattaattacagggattttttgcagtctcctctccagcctctaatggataatttggaagctcagacttacgagacttttgagaaggatgttgtgaagtatactcagtatcgaagagcagttgctaaggccttggttgatagggttgcagatgatgcagtctccacaactaggacggttctgatggttgtgggagcaggccgagggcctctagtacgagcatcattgcaggctgctgaagaaactggtcgcaagttaaaagtatatgctgttgaaaaaaatcctaacgctgttattactcttcatagtttgatcaaattggagggttgggaaagcctggttactgtaatttctagtgacatgcggtgttgggatgcccctgaaaaggcagatattttggtaagtgaattgcttgggtcctttggggacaatgaactatctccggagtgtctggatggtgctcaacgattcttgaagcctgatgggatttccattccttcatcatacaccagcttcatccaaccaataacagcgtcaaaattgcacgacgacatcaaagcacacaaagatattgcacattttgaaacggcatatgttgtgaaactacaccgcatagcgacacttgcacctccacaacaggtttttactttcacccatccaaatttctcaccaaatgccagcaaccaaaggtacaccaagttgcaatttgaaatgctgccagacatgggttcatgccttgtgcacggatttgctggctattttgactctgttctttataaggatgttcatcttggaatcgagccaaacaccgctacaccaaacatgttcagctggttcccgatcttcttcccattgagaaagcccatctacgtgcccgaagggtctcctatagaagtgcacttctggcggtgctgtgcccccacgaaggtgtggtacgagtgggctgtgactacgccgaccccgtcgccgatccacaacagcaatggccggtcctattgggttggtctataataaggcatcaagatcatctttgtgttgtaacagagaggaaaaataacagagatgatatggtttagttctatctgagttgagcagtgtgcttagtgctactggtttctgcctggagagctgatcaaaggatatatgtagcgtgttgttatctgatctgaaagggagtgcttgacccccaacgttgttctactcgattttgctagcgtttcagtaggatttttctagaattgcaaacgttatgctttcgtcagattctgaagcgtctgcatcctttcctttttcatctatgtactgtggctcttgtgtgtgactggaaattcgttaccagtttgctatgctggaacatggaaaagaaaaaaaagagataattataattgtttcattcaggacgcccgtctccacgtagcctggaaggttcacgaggttcattgagccgttgagcgtgtaactgccgtgaaggttcccgaagcatctggaacacgtgggcacgccgcacgccactgggcgtgtgcgctgaccctgacggcaccaaaaggagaaagaggaagcgagcccccaggaaagcggtcagaattggagtgcaagcgacgcgtcgagccccatcccgttcccgcgcctcgccgagagatctgcgccgtcgtcggcaccaatccgtacacccgtcagtccgtccgtcgtcggcgccggcgaacgagtagagatggaggagacggcggcagcggcaccggctgagaaggcgtcgtcgtacaggtactgggtgcgggaagccaccggcgacgccgcgccgctccccgtcccgcgcaagctcgaccccgccgccaatgggaacgggaacccgccgcccctcgggtccgtctggaatcaggctggaacttgggaggaaaagaacctcaactcatgggctaatagtaggataaaggatttgctgggctctctaggttcattgaagttccctacagggaatgcatccgttgatgaagtgtccaagtgctcaggcgatgcctttcaggtcactgtccgcaacaagaagagagtaggatataactacgaactaagcttgagatttaaaggtgaatggttagttaaagaagaaaacaagaagatcaaaggacacttagacattcccgagttctcgttcggtgagatcgatgacctggaggtgcaagtaaggttcagtgacgacaagggcctcgcatccgacgacaaggcacggatctgcaaggatctcaagtcctttatggccccgattcaggagaaaatgcgcgtgttcgaagaagagctcaagggtagatagcgagcattagcgagaatcggcagtgctaggtgggcgctgccgtgcccgtgctggaatgatgagtaaaacatgttgacgtcttgtggtgtctccacgttctaaagtcgtcttcggatgactgggactgtctgtgtactgatgctatgcacttccggagatgagtatgtacggttacgaactgcctaaaccgtctcttcgtcctaatcattttcgggatatgatggtagtagagagatttagggcttgtttggttcctaatttgtttttatctaaggttagttctttaatttggtcgactaaccttagacaagttatgaatagtggtaatgaatcacgatctaaa

SEQ ID NO: 53994 - DNA, 3405 bp, Zea Mays
gagagactccaagccaagaccaagagtaatcagaagcagctgccaaatggccaaatcccgaaagcccctgtccccagcccgcctctcaaacccctaatccctagccacaccacgccctcttccctccttccccgttggcttcggcggcgggcggccatcagcaaccagcatcgtacggaggagaagcgctgtttacacccgtctggcagggatgccgctggggcagcgttcgggggacaagagcgactcccgctactgcggggtggaggttctcgacttccccgccggggagggcctccctgccgtcctcaatcactccctcgcctccgccttcgacttcatcctcgcccctctggttgatcccaactaccggccggcgcccggcgccgttctgccagtgtcagcgtcggacctcgtcctcggcccgtcccagtggagcaaccacgtcgtcgggaagatcagcgagtggattgatttggacgcggaggacgagcggctccggctggactccgagctcacgctgaagcaggagatcgcttgggcatctcacgtttcgctgcaggcatgtgttattcctgcccccaggagatctttttgcggcaattatgccagagttgtgaatcaaattttgcaaggcctgaccaatatgaatttgtggcttaggttgcctctggagaagtccgagcctatggatggtgatcttgataaaataaagaacaacaaccacacgagtgaaatagcagactcatgggaattatggaattcattcagattgctatgtgaccatagtagccaactatgcgtggcacttgatatttcgggcacactgccatcaatgaactcattagggcgctggtttggggagcctgtaagggctgctattctgcaaaccaatgcttttcttacaaatgcaagaggatatccttgtttatcaaagcggcatcagaggctgctaactggactttttaatcattctgttcaggcgataatctctgggagatcgaatcacaatgtttttccagcatctgaaggagtgctctcaggcgatgagggcaacgctgaagattcctatgttcgacatgcattagctccgtacctggagtacattgcatacctgtatcagaagatggatccgcttcctgagcaggaacgctttgagattaattacagggattttttgcagtctcctctccagcctctaatggataatttggaagctcagacttacgagacttttgagaaggatgttgtgaagtatactcagtatcgaagagcagttgctaaggccttggttgatagggttgcagatgatgcagtctccacaactaggacggttctgatggttgtgggagcaggccgagggcctctagtacgagcatcattgcaggctgctgaagaaactggtcgcaagttaaaagtatatgctgttgaaaaaaatcctaacgctgttattactcttcatagtttgatcaaattggagggttgggaaagcctggttactgtaatttctagtgacatgcggtgttgggatgcccctgaaaaggcagatattttggtaagtgaattgcttgggtcctttggggacaatgaactatctccggagtgtctggatggtgctcaacgattcttgaagcctgatgggatttccattccttcatcatacaccagcttcatccaaccaataacagcgtcaaaattgcacgacgacatcaaagcacacaaagatattgcacattttgaaacggcatatgttgtgaaactacaccgcatagcgacacttgcacctccacaacaggtttttactttcacccatccaaatttctcaccaaatgccagcaaccaaaggtacaccaagttgcaatttgaaatgctgccagacatgggttcatgccttgtgcacggatttgctggctattttgactctgttctttataaggatgttcatcttggaatcgagccaaacaccgctacaccaaacatgttcagctggttcccgatcttcttcccattgagaaagcccatctacgtgcccgaagggtctcctatagaagtgcacttctggcggtgctgtgcccccacgaaggtgtggtacgagtgggctgtgactacgccgaccccgtcgccgatccacaacagcaatggccggtcctattgggacgcccgtctccacgtagcctggaaggttcacgaggttcattgagccgttgagcgtgtaactgccgtgaaggttcccgaagcatctggaacacgtgggcacgccgcacgccactgggcgtgtgcgctgaccctgacggcaccaaaaggagaaagaggaagcgagcccccaggaaagcggtcagaattggagtgcaagcgacgcgtcgagccccatcccgttcccgcgcctcgccgagagatctgcgccgtcgtcggcaccaatccgtacacccgtcagtccgtccgtcgtcggcgccggcgaacgagtagagatggaggagacggcggcagcggcaccggctgagaaggcgtcgtcgtacaggtactgggtgcgggaagccaccggcgacgccgcgccgctccccgtcccgcgcaagctcgaccccgccgccaatgggaacgggaacccgccgcccctcgggtccgtctggaatcaggctggaacttgggaggaaaagaacctcaactcatgggctaatagtaggataaaggatttgctgggctctctaggttcattgaagttccctacagggaatgcatccgttgatgaagtgtccaagtgctcaggcgatgcctttcaggtcactgtccgcaacaagaagagagtaggatataactacgaactaagcttgagatttaaaggtgaatggttagttaaagaagaaaacaagaagatcaaaggacacttagacattcccgagttctcgttcggtgagatcgatgacctggaggtgcaagtaaggttcagtgacgacaagggcctcgcatccgacgacaaggcacggatctgcaaggatctcaagtcctttatggccccgattcaggagaaaatgcgcgtgttcgaagaagagctcaagggtagatagcgagcattagcgagaatcggcagtgctaggtgggcgctgccgtgcccgtgctggaatgatgagtaaaacatgttgacgtcttgtggtgtctccacgttctaaagtcgtcttcggatgactgggactgtctgtgtactgatgctatgcacttccggagatgagtatgtacggttacgaactgcctaaaccgtctcttcgtcctaatcattttcgggatatgatggtagtagagagatttagggcttgtttggttcctaatttgtttttatctaaggttagttctttaatttggtcgactaaccttagacaagttatgaatagtggtaatgaatcacgatctaaa

SEQ ID NO: 53995 - DNA, 3835 bp, Zea Mays
aaaagcgctagagagaagagagagagactccaagccaagaccaagagtaatcagaagcagctgccaaatggccaaatcccgaaagcccctgtccccagcccgcctctcaaacccctaatccctagccacaccacgccctcttccctccttccccgttggcttcggcggcgggcggccatcagcaaccagcatcgtacggaggagaagcgctgtttacacccgtctggcagggatgccgctggggcagcgttcgggggacaagagcgactcccgctactgcggggtggaggttctcgacttccccgccggggagggcctccctgccgtcctcaatcactccctcgcctccgccttcgacttcatcctcgcccctctggttgatcccaactaccggccggcgcccggcgccgttctgccagtgtcagcgtcggacctcgtcctcggcccgtcccagtggagcaaccacgtcgtcgggaagatcagcgagtggattgatttggacgcggaggacgagcggctccggctggactccgagctcacgctgaagcaggagatcgcttgggcatctcacgtttcgctgcaggcatgtgttattcctgcccccaggagatctttttgcggcaattatgccagagttgtgaatcaaattttgcaaggcctgaccaatatgaatttgtggcttaggttgcctctggagaagtccgagcctatggatggtgatcttgataaaataaagaacaacaaccacacgagtgaaatagcagactcatgggaattatggaattcattcagattgctatgtgaccatagtagccaactatgcgtggcacttgatatttcgggcacactgccatcaatgaactcattagggcgctggtttggggagcctgtaagggctgctattctgcaaaccaatgcttttcttacaaatgcaagaggatatccttgtttatcaaagcggcatcagaggctgctaactggactttttaatcattctgttcaggcgataatctctgggagatcgaatcacaatgtttttccagcatctgaaggagtgctctcaggcgatgagggcaacgctgaagattcctatgttcgacatgcattagctccgtacctggagtacattgcatacctgtatcagaagatggatccgcttcctgagcaggaacgctttgagattaattacagggattttttgcagtctcctctccagcctctaatggataatttggaagctcagacttacgagacttttgagaaggatgttgtgaagtatactcaggttctgatggttgtgggagcaggccgagggcctctagtacgagcatcattgcaggctgctgaagaaactggtcgcaagttaaaagtatatgctgttgaaaaaaatcctaacgctgttattactcttcatagtttgatcaaattggagggttgggaaagcctggttactgtaatttctagtgacatgcggtgttgggatgcccctgaaaaggcagatattttggtaagtgaattgcttgggtcctttggggacaatgaactatctccggagtgtctggatggtgctcaacgattcttgaagcctgatgggatttccattccttcatcatacaccagcttcatccaaccaataacagcgtcaaaattgcacgacgacatcaaagcacacaaagatattgcacattttgaaacggcatatgttgtgaaactacaccgcatagcgacacttgcacctccacaacaggtttttactttcacccatccaaatttctcaccaaatgccagcaaccaaaggtacaccaagttgcaatttgaaatgctgccagacatgggttcatgccttgtgcacggatttgctggctattttgactctgttctttataaggatgttcatcttggaatcgagccaaacaccgctacaccaaacatgttcagctggttcccgatcttcttcccattgagaaagcccatctacgtgcccgaagggtctcctatagaagtgcacttctggcggtgctgtgcccccacgaaggtgtggtacgagtgggctgtgactacgccgaccccgtcgccgatccacaacagcaatggccggtcctattgggttggtctataataaggcatcaagatcatctttgtgttgtaacagagaggaaaaataacagagatgatatggtttagttctatctgagttgagcagtgtgcttagtgctactggtttctgcctggagagctgatcaaaggatatatgtagcgtgttgttatctgatctgaaagggagtgcttgacccccaacgttgttctactcgattttgctagcgtttcagtaggatttttctagaattgcaaacgttatgctttcgtcagattctgaagcgtctgcatcctttcctttttcatctatgtactgtggctcttgtgtgtgactggaaattcgttaccagtttgctatgctggaacatggaaaagaaaaaaaagagataattataattgtttcattcaggtagcattttttatcttagggttggaaaagaaacatttttgaagtctcacgatcgttttcgttttccacgtgactgaaggacgcccgtctccacgtagcctggaaggttcacgaggttcattgagccgttgagcgtgtaactgccgtgaaggttcccgaagcatctggaacacgtgggcacgccgcacgccactgggcgtgtgcgctgaccctgacggcaccaaaaggagaaagaggaagcgagcccccaggaaagcggtcagaattggagtgcaagcgacgcgtcgagccccatcccgttcccgcgcctcgccgagagatctgcgccgtcgtcggcaccaatccgtacacccgtcagtccgtccgtcgtcggcgccggcgaacgagtagagatggaggagacggcggcagcggcaccggctgagaaggcgtcgtcgtacaggtactgggtgcgggaagccaccggcgacgccgcgccgctccccgtcccgcgcaagctcgaccccgccgccaatgggaacgggaacccgccgcccctcgggtccgtctggaatcaggctggaacttgggaggaaaagaacctcaactcatgggctaatagtaggataaaggatttgctgggctctctaggttcattgaagttccctacagggaatgcatccgttgatgaagtgtccaagtgctcaggcgatgcctttcaggtcactgtccgcaacaagaagagagtaggatataactacgaactaagcttgagatttaaaggtgaatggttagttaaagaagaaaacaagaagatcaaaggacacttagacattcccgagttctcgttcggtgagatcgatgacctggaggtgcaagtaaggttcagtgacgacaagggcctcgcatccgacgacaaggcacggatctgcaaggatctcaagtcctttatggccccgattcaggagaaaatgcgcgtgttcgaagaagagctcaagggtagatagcgagcattagcgagaatcggcagtgctaggtgggcgctgccgtgcccgtgctggaatgatgagtaaaacatgttgacgtcttgtggtgtctccacgttctaaagtcgtcttcggatgactgggactgtctgtgtactgatgctatgcacttccggagatgagtatgtacggttacgaactgcctaaaccgtctcttcgtcctaatcattttcgggatatgatggtagtagagagatttagggcttgtttggttcctaatttgtttttatctaaggttagttctttaatttggtcgactaaccttagacaagttatgaatagtggtaatgaatcacgatctaaa

SEQ ID NO: 53996 - DNA, 839 bp, Zea Mays
gaaaaaggttaagaactgaaagagttcgggtcgtggaagctgcaggaactggacggatttgcaggagcatgtctgggcactcaagtatgcatcatcatcgtcatcaaattcacagagaagtgcgcaaggtgatactgatatcagaacggaagcggatggaatgttccggagagcagttgaacttttaacagagaaatcgtcaatcatggcaagaacagaacagcggctccaccatcatactctagtctagcaccaagaaaggcaaggggccaaaaaaaaaccataagaacgccaaccaagtgcagcaaaaggccaaagcactcaccactcaccagaaaaaagaacgggcaggacaacctgcctgtcaatccgcaccagcgcgctggacagccatggagctcaagccgtggcggcggcggcgcatcggtgagctcgggggcgccacgggcaacgggcaagaagctcagcctcgcgcaccgggacacaggcttgggcacaagctcacccgcatggagcttcctgagatctatacccctgttaggctattcctgcttcctctcctccccctcagcctggaaaccacagcatcgccaagtcgtcatcagcaactccggtctccggcggctggaccctactacacacatgatggcatggcgactggcaaccacagccacgccccccgcgattctactccctccgtccgatctttcagcaagaatctcacctcgctttggatgatggggaatctgctgtctcgtggcagctcttgcacagcgaccggcagtgggggaggaagcagtggggaagggagccaacgcctcacaaacccaaaagcctag

SEQ ID NO: 53997 - DNA, 755 bp, Zea Mays
cagaaggcttgtgtgttgtcttgtgtctgtttaatagaggcaagataaattcagtgataaagctaacagattcagcattggaacagattatttgcacagtgttaacattgaagctactttcgtacaaactacaaagtgctgaaaatatagtggtcatggcatggacttaataactttgaactaatgcttactcatcttcctagtatctccaaagcatcaatttgtttgtgcaaatgtaaagtgggttttcctgaagtgtaatgtggaacacaaccatggcggacaaaaccgaatcatgtgttagattctaaactgaaaagaacagagcaaatgtgcccctccaaggaacaattacaacttaattggtaactcctttgtcccatctatattctatacaaaacaaaatggcactccctcagatgttcatcaattaccagtactgccagagtaatcatgacatatcatatcataaaaaaaatgaatcacaccttaaaaatcatgacactgaattgtgaataaacaagcagactaacttcacagataaaatattgcagctttgtgctcctaagttattgtggcatccagttgagagcatgcatgaaaaagtaaagattcttaaacataatagttactagaataaaaaataacaaataatgcattgccttcacaaaatgacaaggcaaccaacagcttatcactaccatagaacattgccgacagccttgatgacccaaaagaaagtgcttcaggttgtg

SEQ ID NO: 53998 - DNA, 1700 bp, Zea Mays
cagctgtttgacagaagagagagagcacgatgaaggtccggttgtggggcgccgttctggttggaggcgaccgcagaagcttcaacgcctgaatgaatgaatgaaaaaacacgtaaagggcagcagtttaaccaaaaacactgttcgcagagtgaagtttgaatatggatatagtttgaatatggatatgagtataggtaaactgttgaagatagcattaataggtagtatatgtttagctgtgtgaaattcagttgatcttgtatagtttcatggtaaatataagtatagcatagcagggtcaaaaaaatcatgcagagcatatcatcaatagtgaaatcaattatatgatcagatcatttactgaataataacagtctgactcggtgcctctgcttgccacatgtttcgagcagaagcagcaaaaaaaaatcaatcaatcagttaagttgttcctagaatctggaactgaagcatgttgtctagaagaatgacactaattagctacttactgatttccccagcaacacgagaaaaaaggggggaaattgacggttgcaatctacttcacaacgtggcaaatttcagaaccagccatgggtgccatagtgccatctattttgcaatacgccaaatttgggaaccaaccttgatataaaccccacaccttacacagagatcaacacaaactgccctaggtcccaattatggtgaagtgggtctgattctgagaacttggcttagcgtgttgtatcctttggacatgttatgaaagagctgaatcaaggtttaggtggcagctactgatgttgacaatttagcgaagcgggcgagtttcagttgagactgcaggtcttttctgactcggcacttccaatacactagcgtgttcaagcctcgagtaaaaaggcgcaatcatgttgcaataaggtagtacaaagataagaaatagattactcggatgttactaggaaattgtgactggtgctcattaactgaccaagataaaaacatggcatagcagtcaggcactgattgttggagcacatggttgttatggtagattggattgcttctcaaggcaaggtagatgtgactccactggtttgttgtttccttgtactgtaagtagatactttgtttatgtatccactggtttgttgtttccttgtactgtaagtagatactttgtttatgtatatctctcgtgtcttatgctccaagatgtatttgccacgctaggggcttttcctagcgtatataacacggatacgtgagcctgagagggcatcatgttacatccattttcagactgatctcatcccttccaaagaaaggtttttggattgcaaatgcaaattcagaaacatgccatatactagtgtgatgcaaactcatatgaaaggataattaaagccctacacttcaaatcatgtggtatcaaacaatgtacactaacacagagacagaagaatcatctaaaagataaattttatgaaaggctcctaaaataacaataggtgcacctatctacgaattttccatggtttggaatttcaggagaaacagttttcgtgcaggtgactggccttcagttcagaagtagagatgaaaaattaccttgatgaaggacctttgcattggttcctttgaaagctgtgaacccatcaaaatcttgatggacaccatgtggcataaag

SEQ ID NO: 53999 - DNA, 852 bp, Zea Mays
agattcgttattttggaaggtgcctccatccagggactaattgctgctggtagaacatttgagaacagtcctgcaattagaaaggcatgcgactttctgttgtcaaaagaacttccttccggtggttggggagaaagctatttgtcatctcaagaccaggtttacaccaatctcaaaggcaaccggcctcatgcggtgaacactagttgggccatgctggcgctgattgatgcgggccaggccgagagagatccaacgcctctacaccgagcagcaaaggttttgatcaacttacaatcagaggacggagaatttcctcagcaagagatcataggagtgttcaacaagaactgcatgataagctactcccagtacaggaacatcttcccgatttgggctctgggtgagtaccggtgtcgagtcttgggggctggcaagccttggcggtgaacgggaggtgtgtgtgtgtgtgtgtcatggatcagcttttgtgagtagccatgtggaagttggaataatgtagctacgttacgttcagggggttgcgttactagtggtcctagtaataatagtgatggtgatagtaatgtactcctcattattacaatctcaaagcggttcatgccattgccatgcacatctcagatccgagtcacgcacttgagagagttcaaggattgcaagtatagttgggagaatcaaatccaatcggcttattgtctgctcatctcaggtgtcaggtcttttcagccacacacacatacacataccctgacctagagatttttgccattatgaaacattacatgttcggcttcgttgaaatgaagatgagaagggattcgacgattt

SEQ ID NO: 54000 - DNA, 1319 bp, Zea Mays
caataaggaaatttactttagaagcattctgaggaggagagggatttgtgggtgctggctggggccaagaatttggatcttctaacagcccctatcccagggcttcattattgttatcaaggatctctcccaaaattgttggtgaaccgatggaagctaatagattttatgatgctgtcagttgtctgatgtcttatatgaatgataatggcggtttcgcgacatatgaactcacaagatcttatccctggttggagctgatcaatcccgctgagacctttggggatattgtgattgattacccgtatgttgaatgtacatcagcagcaattcaggccctgacatcattcaaaaaactataccctgggcaccgcaggaaagaggtggataactgtatcagcaaagcttccaatttcatcgagagtattcagaaaagcgatggttcatggtatggctcttgggccgtctgtttcacatacggcacttggtttggtgtgaagggactaattgctgctggtagaacatttgagaacagtcctgcaattagaaaggcatgcgactttctgttgtcaaaagaacttccttccggtggttggggagaaagctatttgtcatctcaagaccaggtttacaccaatctcaaaggcaaccggcctcatgcggtgaacactagttgggccatgctggcgctgattgatgcgggccaggccgagagagatccaacgcctctacaccgagcagcaaaggttttgatcaacttacaatcagaggacggagaatttcctcagcaagagatcataggagtgttcaacaagaactgcatgataagctactcccagtacaggaacatcttcccgatttgggctctgggtgagtaccggtgtcgagtcttgggggctggcaagccttggcggtgaacgggaggtgtgtgtgtgtgtgtgtcatggatcagcttttgtgagtagccatgtggaagttggaataatgtagctacgttacgttcagggggttgcgttactagtggtcctagtaataatagtgatggtgatagtaatgtactcctcattattacaatctcaaagcggttcatgccattgccatgcacatctcagatccgagtcacgcacttgagagagttcaaggattgcaagtatagttgggagaatcaaatccaatcggcttattgtctgctcatctcaggtgtcaggtcttttcagccacacacacatacacataccctgacctagagatttttgccattatgaaacattacatgttcggcttcgttgaaatgaagatgagaagggattcgacgattt

SEQ ID NO: 54001 - DNA, 1247 bp, Zea Mays
attaccaataaggaaatttactttagaaggcttcattattgttatcaaggatctctcccaaaattgttggtgaaccgatggaagctaatagattttatgatgctgtcagttgtctgatgtcttatatgaatgataatggcggtttcgcgacatatgaactcacaagatcttatccctggttggagctgatcaatcccgctgagacctttggggatattgtgattgattacccgtatgttgaatgtacatcagcagcaattcaggccctgacatcattcaaaaaactataccctgggcaccgcaggaaagaggtggataactgtatcagcaaagcttccaatttcatcgagagtattcagaaaagcgatggttcatggtatggctcttgggccgtctgtttcacatacggcacttggtttggtgtgaagggactaattgctgctggtagaacatttgagaacagtcctgcaattagaaaggcatgcgactttctgttgtcaaaagaacttccttccggtggttggggagaaagctatttgtcatctcaagaccaggtttacaccaatctcaaaggcaaccggcctcatgcggtgaacactagttgggccatgctggcgctgattgatgcgggccaggccgagagagatccaacgcctctacaccgagcagcaaaggttttgatcaacttacaatcagaggacggagaatttcctcagcaagagatcataggagtgttcaacaagaactgcatgataagctactcccagtacaggaacatcttcccgatttgggctctgggtgagtaccggtgtcgagtcttgggggctggcaagccttggcggtgaacgggaggtgtgtgtgtgtgtgtgtcatggatcagcttttgtgagtagccatgtggaagttggaataatgtagctacgttacgttcagggggttgcgttactagtggtcctagtaataatagtgatggtgatagtaatgtactcctcattattacaatctcaaagcggttcatgccattgccatgcacatctcagatccgagtcacgcacttgagagagttcaaggattgcaagtatagttgggagaatcaaatccaatcggcttattgtctgctcatctcaggtgtcaggtcttttcagccacacacacatacacataccctgacctagagatttttgccattatgaaacattacatgttcggcttcgttgaaatgaagatgagaagggattcgacgattt

SEQ ID NO: 54002 - DNA, 2852 bp, Zea Mays
ctgactggctctcgcaggttgcagttcgccaaagaaaactcgattgagcttcaccttccaggcatcaagctcggtgagcatgaagatgtgaccgaggaagctgtgttgactacattgaaaagggcaatcagccgtttctctactctccaggcacatgatggacactggcctggggattatggtggtcctatgttccttatgccaggcttggtgcctctttcaactcttcttctatagtgatatgtttaacttgcttacttcacttggatatgcattcctacgactaaatctgtgctctgtgattaatcttgtgatatgtttaagacaaaattgtgctatcttgctttcttacatcttatgcctcatattctatatgagcacaatgttttttttttcttgcattcactgtgagtaccaatttagatgcctcatgaaataggaactagcaaattgtagcaggaatctgatttttagattacatggaagacttatgtttcatgtttcctggtttacaaaacagctactaattgtgtgtaccctttgtccagatcataacattgtatgtgactggagcactaaacactgtcttgtcattggaacaccagaaggagatccgccggtatctttataatcaccagaatgaagatggcggctggggcttgcacattgagggtccaagcaccatgttcggctcagcactgacctatgttattttgagattgcttggagagggaccagatagtggagatggagccatggagaaaggtcgaaactggatattagaccatggtggagcaacatatataacatcgtgggggaagttttggctttcggtactaggtgtatttgaatggtctggtaacaacccggtgccaccagaagtatggctactgccatatctcctcccatttcacccagggaggatgtggtgtcattgtcgaatggtgtatttgccaatgtgctacatttatgggaagaggtttgttggccgaatcacaccacttctgttggaattaaggaaggaacttttcaaagacccttacagcaagattgattgggacaaggcccgcaacctatgtgccaaggaagatctgtactacccacacccattcgttcaagatgtgttgtgggccactctccataaattcgttgaaccagttatgatgcattggcctggcagcaaattgagggagaaagctctggaaacagtcatgcaacatgttcattatgaagatgagaacactcgttatatttgcattggtcctgtaaacaaggtattgaatatgcttgcttgctggattgaagatccaaactcggaggccttcaaacttcatatcccacgagtctatgattacttgtggcttgctgaagatggcatgaagatgcagggttataatggcagccaactttgggatacagctttcacagttcaagccattgtggctaccaaccttattgaagagtttggtcctacccttaaactagcacacaactatatcaagaattcacaggttcttgatgactgccctggtgatctgaatgactggtaccgccacacatctaaaggtgcatggccattctcaactgctgatcatggttggcctatatctgattgcactgctgaaggactaaaggcttcattattgttatcaaggatctctcccaaaattgttggtgaaccgatggaagctaatagattttatgatgctgtcagttgtctgatgtcttatatgaatgataatggcggtttcgcgacatatgaactcacaagatcttatccctggttggagctgatcaatcccgctgagacctttggggatattgtgattgattacccgtatgttgaatgtacatcagcagcaattcaggccctgacatcattcaaaaaactataccctgggcaccgcaggaaagaggtggataactgtatcagcaaagcttccaatttcatcgagagtattcagaaaagcgatggttcatggtatggctcttgggccgtctgtttcacatacggcacttggtttggtgtgaagggactaattgctgctggtagaacatttgagaacagtcctgcaattagaaaggcatgcgactttctgttgtcaaaagaacttccttccggtggttggggagaaagctatttgtcatctcaagaccaggtttacaccaatctcaaaggcaaccggcctcatgcggtgaacactagttgggccatgctggcgctgattgatgcgggccaggccgagagagatccaacgcctctacaccgagcagcaaaggttttgatcaacttacaatcagaggacggagaatttcctcagcaagagatcataggagtgttcaacaagaactgcatgataagctactcccagtacaggaacatcttcccgatttgggctctgggtgagtaccggtgtcgagtcttgggggctggcaagccttggcggtgaacgggaggtgtgtgtgtgtgtgtgtcatggatcagcttttgtgagtagccatgtggaagttggaataatgtagctacgttacgttcagggggttgcgttactagtggtcctagtaataatagtgatggtgatagtaatgtactcctcattattacaatctcaaagcggttcatgccattgccatgcacatctcagatccgagtcacgcacttgagagagttcaaggattgcaagtatagttgggagaatcaaatccaatcggcttattgtctgctcatctcaggtgtcaggtcttttcagccacacacacatacacataccctgacctagagatttttgccattatgaaacattacatgttcggcttcgttgaaatgaagatgagaagggattcgacgattt

SEQ ID NO: 54003 - DNA, 2515 bp, Zea Mays
gctgactggctctcgcaggttgcagttcgccaaagaaaactcgattgagcttcaccttccaggcatcaagctcggtgagcatgaagatgtgaccgaggaagctgtgttgactacattgaaaagggcaatcagccgtttctctactctccaggcacatgatggacactggcctggggattatggtggtcctatgttccttatgccaggcttgatcataacattgtatgtgactggagcactaaacactgtcttgtcattggaacaccagaaggagatccgccggtatctttataatcaccagaatgaagatggcggctggggcttgcacattgagggtccaagcaccatgttcggctcagcactgacctatgttattttgagattgcttggagagggaccagatagtggagatggagccatggagaaaggtcgaaactggatattagaccatggtggagcaacatatataacatcgtgggggaagttttggctttcggtactaggtgtatttgaatggtctggtaacaacccggtgccaccagaagtatggctactgccatatctcctcccatttcacccagggaggatgtggtgtcattgtcgaatggtgtatttgccaatgtgctacatttatgggaagaggtttgttggccgaatcacaccacttctgttggaattaaggaaggaacttttcaaagacccttacagcaagattgattgggacaaggcccgcaacctatgtgccaaggaagatctgtactacccacacccattcgttcaagatgtgttgtgggccactctccataaattcgttgaaccagttatgatgcattggcctggcagcaaattgagggagaaagctctggaaacagtcatgcaacatgttcattatgaagatgagaacactcgttatatttgcattggtcctgtaaacaaggtattgaatatgcttgcttgctggattgaagatccaaactcggaggccttcaaacttcatatcccacgagtctatgattacttgtggcttgctgaagatggcatgaagatgcagggttataatggcagccaactttgggatacagctttcacagttcaagccattgtggctaccaaccttattgaagagtttggtcctacccttaaactagcacacaactatatcaagaattcacaggttcttgatgactgccctggtgatctgaatgactggtaccgccacacatctaaaggtgcatggccattctcaactgctgatcatggttggcctatatctgattgcactgctgaaggactaaaggcttcattattgttatcaaggatctctcccaaaattgttggtgaaccgatggaagctaatagattttatgatgctgtcagttgtctgatgtcttatatgaatgataatggcggtttcgcgacatatgaactcacaagatcttatccctggttggagctgatcaatcccgctgagacctttggggatattgtgattgattacccgtatgttgaatgtacatcagcagcaattcaggccctgacatcattcaaaaaactataccctgggcaccgcaggaaagaggtggataactgtatcagcaaagcttccaatttcatcgagagtattcagaaaagcgatggttcatggtatggctcttgggccgtctgtttcacatacggcacttggtttggtgtgaagggactaattgctgctggtagaacatttgagaacagtcctgcaattagaaaggcatgcgactttctgttgtcaaaagaacttccttccggtggttggggagaaagctatttgtcatctcaagaccaggtttacaccaatctcaaaggcaaccggcctcatgcggtgaacactagttgggccatgctggcgctgattgatgcgggccaggccgagagagatccaacgcctctacaccgagcagcaaaggttttgatcaacttacaatcagaggacggagaatttcctcagcaagagatcataggagtgttcaacaagaactgcatgataagctactcccagtacaggaacatcttcccgatttgggctctgggtgagtaccggtgtcgagtcttgggggctggcaagccttggcggtgaacgggaggtgtgtgtgtgtgtgtgtcatggatcagcttttgtgagtagccatgtggaagttggaataatgtagctacgttacgttcagggggttgcgttactagtggtcctagtaataatagtgatggtgatagtaatgtactcctcattattacaatctcaaagcggttcatgccattgccatgcacatctcagatccgagtcacgcacttgagagagttcaaggattgcaagtatagttgggagaatcaaatccaatcggcttattgtctgctcatctcaggtgtcaggtcttttcagccacacacacatacacataccctgacctagagatttttgccattatgaaacattacatgttcggcttcgttgaaatgaagatgagaagggattcgacgattt

SEQ ID NO: 54004 - DNA, 2849 bp, Zea Mays
cctgccggtcgctagccgcccttcgccaaagaaaactcgattgagcttcaccttccaggcatcaagctcggtgagcatgaagatgtgaccgaggaagctgtgttgactacattgaaaagggcaatcagccgtttctctactctccaggcacatgatggacactggcctggggattatggtggtcctatgttccttatgccaggcttggtgcctctttcaactcttcttctatagtgatatgtttaacttgcttacttcacttggatatgcattcctacgactaaatctgtgctctgtgattaatcttgtgatatgtttaagacaaaattgtgctatcttgctttcttacatcttatgcctcatattctatatgagcacaatgttttttttttcttgcattcactgtgagtaccaatttagatgcctcatgaaataggaactagcaaattgtagcaggaatctgatttttagattacatggaagacttatgtttcatgtttcctggtttacaaaacagctactaattgtgtgtaccctttgtccagatcataacattgtatgtgactggagcactaaacactgtcttgtcattggaacaccagaaggagatccgccggtatctttataatcaccagaatgaagatggcggctggggcttgcacattgagggtccaagcaccatgttcggctcagcactgacctatgttattttgagattgcttggagagggaccagatagtggagatggagccatggagaaaggtcgaaactggatattagaccatggtggagcaacatatataacatcgtgggggaagttttggctttcggtactaggtgtatttgaatggtctggtaacaacccggtgccaccagaagtatggctactgccatatctcctcccatttcacccagggaggatgtggtgtcattgtcgaatggtgtatttgccaatgtgctacatttatgggaagaggtttgttggccgaatcacaccacttctgttggaattaaggaaggaacttttcaaagacccttacagcaagattgattgggacaaggcccgcaacctatgtgccaaggaagatctgtactacccacacccattcgttcaagatgtgttgtgggccactctccataaattcgttgaaccagttatgatgcattggcctggcagcaaattgagggagaaagctctggaaacagtcatgcaacatgttcattatgaagatgagaacactcgttatatttgcattggtcctgtaaacaaggtattgaatatgcttgcttgctggattgaagatccaaactcggaggccttcaaacttcatatcccacgagtctatgattacttgtggcttgctgaagatggcatgaagatgcagggttataatggcagccaactttgggatacagctttcacagttcaagccattgtggctaccaaccttattgaagagtttggtcctacccttaaactagcacacaactatatcaagaattcacaggttcttgatgactgccctggtgatctgaatgactggtaccgccacacatctaaaggtgcatggccattctcaactgctgatcatggttggcctatatctgattgcactgctgaaggactaaaggcttcattattgttatcaaggatctctcccaaaattgttggtgaaccgatggaagctaatagattttatgatgctgtcagttgtctgatgtcttatatgaatgataatggcggtttcgcgacatatgaactcacaagatcttatccctggttggagctgatcaatcccgctgagacctttggggatattgtgattgattacccgtatgttgaatgtacatcagcagcaattcaggccctgacatcattcaaaaaactataccctgggcaccgcaggaaagaggtggataactgtatcagcaaagcttccaatttcatcgagagtattcagaaaagcgatggttcatggtatggctcttgggccgtctgtttcacatacggcacttggtttggtgtgaagggactaattgctgctggtagaacatttgagaacagtcctgcaattagaaaggcatgcgactttctgttgtcaaaagaacttccttccggtggttggggagaaagctatttgtcatctcaagaccaggtttacaccaatctcaaaggcaaccggcctcatgcggtgaacactagttgggccatgctggcgctgattgatgcgggccaggccgagagagatccaacgcctctacaccgagcagcaaaggttttgatcaacttacaatcagaggacggagaatttcctcagcaagagatcataggagtgttcaacaagaactgcatgataagctactcccagtacaggaacatcttcccgatttgggctctgggtgagtaccggtgtcgagtcttgggggctggcaagccttggcggtgaacgggaggtgtgtgtgtgtgtgtgtcatggatcagcttttgtgagtagccatgtggaagttggaataatgtagctacgttacgttcagggggttgcgttactagtggtcctagtaataatagtgatggtgatagtaatgtactcctcattattacaatctcaaagcggttcatgccattgccatgcacatctcagatccgagtcacgcacttgagagagttcaaggattgcaagtatagttgggagaatcaaatccaatcggcttattgtctgctcatctcaggtgtcaggtcttttcagccacacacacatacacataccctgacctagagatttttgccattatgaaacattacatgttcggcttcgttgaaatgaagatgagaagggattcgacgattt

SEQ ID NO: 54005 - DNA, 3217 bp, Zea Mays
gctgcgaactccactcaaatcccaaatcaaatcaactccccagcctgaactgtcctccctggactcccctcgccattcatcaacgcccgccacagagggggatcccggcctcccggtgccgggagccaagccaagccacgcaccggccggccgcggcggatcggaaccttccccaccgctcgcccgccgcatttgaggagggcgatgtggcgcctgcggatcgcggaggggggcggggacccctggctacgcacgaagaacgcccacgtcggccgccaggtgtgggagttcgacgccgccgccgaccccgaccccgccgtcgacgccgcgcgccgcgccttcgtcgccaccaggggccacctcaagcacagcgccgacctcctcatgcgcatccagttcgccaaagaaaactcgattgagcttcaccttccaggcatcaagctcggtgagcatgaagatgtgaccgaggaagctgtgttgactacattgaaaagggcaatcagccgtttctctactctccaggcacatgatggacactggcctggggattatggtggtcctatgttccttatgccaggcttggtgcctctttcaactcttcttctatagtgatatgtttaacttgcttacttcacttggatatgcattcctacgactaaatctgtgctctgtgattaatcttgtgatatgtttaagacaaaattgtgctatcttgctttcttacatcttatgcctcatattctatatgagcacaatgttttttttttcttgcattcactgtgagtaccaatttagatgcctcatgaaataggaactagcaaattgtagcaggaatctgatttttagattacatggaagacttatgtttcatgtttcctggtttacaaaacagctactaattgtgtgtaccctttgtccagatcataacattgtatgtgactggagcactaaacactgtcttgtcattggaacaccagaaggagatccgccggtatctttataatcaccagaatgaagatggcggctggggcttgcacattgagggtccaagcaccatgttcggctcagcactgacctatgttattttgagattgcttggagagggaccagatagtggagatggagccatggagaaaggtcgaaactggatattagaccatggtggagcaacatatataacatcgtgggggaagttttggctttcggtgtatttgaatggtctggtaacaacccggtgccaccagaagtatggctactgccatatctcctcccatttcacccagggaggatgtggtgtcattgtcgaatggtgtatttgccaatgtgctacatttatgggaagaggtttgttggccgaatcacaccacttctgttggaattaaggaaggaacttttcaaagacccttacagcaagattgattgggacaaggcccgcaacctatgtgccaaggaagatctgtactacccacacccattcgttcaagatgtgttgtgggccactctccataaattcgttgaaccagttatgatgcattggcctggcagcaaattgagggagaaagctctggaaacagtcatgcaacatgttcattatgaagatgagaacactcgttatatttgcattggtcctgtaaacaaggtattgaatatgcttgcttgctggattgaagatccaaactcggaggccttcaaacttcatatcccacgagtctatgattacttgtggcttgctgaagatggcatgaagatgcagggttataatggcagccaactttgggatacagctttcacagttcaagccattgtggctaccaaccttattgaagagtttggtcctacccttaaactagcacacaactatatcaagaattcacaggttcttgatgactgccctggtgatctgaatgactggtaccgccacacatctaaaggtgcatggccattctcaactgctgatcatggttggcctatatctgattgcactgctgaaggactaaaggcttcattattgttatcaaggatctctcccaaaattgttggtgaaccgatggaagctaatagattttatgatgctgtcagttgtctgatgtcttatatgaatgataatggcggtttcgcgacatatgaactcacaagatcttatccctggttggagctgatcaatcccgctgagacctttggggatattgtgattgattacccgtatgttgaatgtacatcagcagcaattcaggccctgacatcattcaaaaaactataccctgggcaccgcaggaaagaggtggataactgtatcagcaaagcttccaatttcatcgagagtattcagaaaagcgatggttcatggtatggctcttgggccgtctgtttcacatacggcacttggtttggtgtgaagggactaattgctgctggtagaacatttgagaacagtcctgcaattagaaaggcatgcgactttctgttgtcaaaagaacttccttccggtggttggggagaaagctatttgtcatctcaagaccaggtttacaccaatctcaaaggcaaccggcctcatgcggtgaacactagttgggccatgctggcgctgattgatgcgggccaggccgagagagatccaacgcctctacaccgagcagcaaaggttttgatcaacttacaatcagaggacggagaatttcctcagcaagagatcataggagtgttcaacaagaactgcatgataagctactcccagtacaggaacatcttcccgatttgggctctgggtgagtaccggtgtcgagtcttgggggctggcaagccttggcggtgaacgggaggtgtgtgtgtgtgtgtgtcatggatcagcttttgtgagtagccatgtggaagttggaataatgtagctacgttacgttcagggggttgcgttactagtggtcctagtaataatagtgatggtgatagtaatgtactcctcattattacaatctcaaagcggttcatgccattgccatgcacatctcagatccgagtcacgcacttgagagagttcaaggattgcaagtatagttgggagaatcaaatccaatcggcttattgtctgctcatctcaggtgtcaggtcttttcagccacacacacatacacataccctgacctagagatttttgccattatgaaacattacatgttcggcttcgttgaaatgaagatgagaagggattcgacgattt

SEQ ID NO: 54006 - DNA, 3303 bp, Zea Mays
gctgcgaactccactcaaatcccaaatcaaatcaactccccagcctgaactgtcctccctggactcccctcgccattcatcaacgcccgccacagagggggatcccggcctcccggtgccgggagccaagccaagccacgcaccggccggccgcggcggatcggaaccttccccaccgctcgcccgccgcatttgaggagggcgatgtggcgcctgcggatcgcggaggggggcggggacccctggctacgcacgaagaacgcccacgtcggccgccaggtgtgggagttcgacgccgccgccgaccccgaccccgccgtcgacgccgcgcgccgcgccttcgtcgccaccaggggccacctcaagcacagcgccgacctcctcatgcgcatccagttcgccaaagaaaactcgattgagcttcaccttccaggcatcaagctcggtgagcatgaagatgtgaccgaggaagctgtgttgactacattgaaaagggcaatcagccgtttctctactctccaggcacatgatggacactggcctggggattatggtggtcctatgttccttatgccaggcttgatcataacattgtatgtgactggagcactaaacactgtcttgtcattggaacaccagaaggagatccgccggtatctttataatcaccagaatgaagatggcggctggggcttgcacattgagggtccaagcaccatgttcggctcagcactgacctatgttattttgagattgcttggagagggaccagatagtggagatggagccatggagaaaggtcgaaactggatattagaccatggtggagcaacatatataacatcgtgggggaagttttggctttcggtactaggtgtatttgaatggtctggtaacaacccggtgccaccagaagtatggctactgccatatctcctcccatttcacccagggaggatgtggtgtcattgtcgaatggtgtatttgccaatgtgctacatttatgggaagaggtttgttggccgaatcacaccacttctgttggaattaaggaaggaacttttcaaagacccttacagcaagattgattgggacaaggcccgcaacctatgtgccaaggaagatctgtactacccacacccattcgttcaagatgtgttgtgggccactctccataaattcgttgaaccagttatgatgcattggcctggcagcaaattgagggagaaagctctggaaacagtcatgcaacatgttcattatgaagatgagaacactcgttatatttgcattggtcctgtaaacaaggtattgaatatgcttgcttgctggattgaagatccaaactcggaggccttcaaacttcatatcccacgagtctatgattacttgtggcttgctgaagatggcatgaagatgcagggttataatggcagccaactttgggatacagctttcacagttcaagccattgtggctaccaaccttattgaagagtttggtcctacccttaaactagcacacaactatatcaagaattcacaggttcttgatgactgccctggtgatctgaatgactggtaccgccacacatctaaaggtgcatggccattctcaactgctgatcatggttggcctatatctgattgcactgctgaaggactaaagcattctgaggaggagagggatttgtgggtgctggctggggccaagaatttggatcttctaacagcccctatcccagggttgtaggtgttctgttgtcagctctctagctatggactgttttttgtattttcgtttttggccaccgtgaggtgccttgtttttgtacctgtctcgtccattttggaccttttatcttcttaatataatcatgtgcaactctcctgcgcgttcgagaaaaaaatgttccaacattcttgactgtatagtgtctggcacattgtcataatttcataattatttgttttaataaatagtaattgcttattttcttttactccaggcttcattattgttatcaaggatctctcccaaaattgttggtgaaccgatggaagctaatagattttatgatgctgtcagttgtctgatgtcttatatgaatgataatggcggtttcgcgacatatgaactcacaagatcttatccctggttggagctgatcaatcccgctgagacctttggggatattgtgattgattacccgtaagatgcagtaacctttcatcgtgctgatttgtacttataaaacaaattgaagaaacataaaacccatcttgcaggtatgttgaatgtacatcagcagcaattcaggccctgacatcattcaaaaaactataccctgggcaccgcaggaaagaggtggataactgtatcagcaaagcttccaatttcatcgagagtattcagaaaagcgatggttcatggtatggctcttgggccgtctgtttcacatacggcacttggtttggtgtgaagggactaattgctgctggtagaacatttgagaacagtcctgcaattagaaaggcatgcgactttctgttgtcaaaagaacttccttccggtggttggggagaaagctatttgtcatctcaagaccaggtttacaccaatctcaaaggcaaccggcctcatgcggtgaacactagttgggccatgctggcgctgattgatgcgggccaggccgagagagatccaacgcctctacaccgagcagcaaaggttttgatcaacttacaatcagaggacggagaatttcctcagcaagagatcataggagtgttcaacaagaactgcatgataagctactcccagtacaggaacatcttcccgatttgggctctgggtgagtaccggtgtcgagtcttgggggctggcaagccttggcggtgaacgggaggtgtgtgtgtgtgtgtgtcatggatcagcttttgtgagtagccatgtggaagttggaataatgtagctacgttacgttcagggggttgcgttactagtggtcctagtaataatagtgatggtgatagtaatgtactcctcattattacaatctcaaagcggttcatgccattgccatgcacatctcagatccgagtcacgcacttgagagagttcaaggattgcaagtatagttgggagaatcaaatccaatcggcttattgtctgctcatctcaggtgtcaggtcttttcagccacacacacatacacataccctgacctagagatttttgccattatgaaacattacatgttcggcttcgttgaaatgaagatgagaagggattcgacgattt

SEQ ID NO: 54007 - DNA, 3584 bp, Zea Mays
cccgaacaacaacgactactgctgcgaactccactcaaatcccaaatcaaatcaactccccagcctgaactgtcctccctggactcccctcgccattcatcaacgcccgccacagagggggatcccggcctcccggtgccgggagccaagccaagccacgcaccggccggccgcggcggatcggaaccttccccaccgctcgcccgccgcatttgaggagggcgatgtggcgcctgcggatcgcggaggggggcggggacccctggctacgcacgaagaacgcccacgtcggccgccaggtgtgggagttcgacgccgccgccgaccccgaccccgccgtcgacgccgcgcgccgcgccttcgtcgccaccaggggccacctcaagcacagcgccgacctcctcatgcgcatccagttcgccaaagaaaactcgattgagcttcaccttccaggcatcaagctcggtgagcatgaagatgtgaccgaggaagctgtgttgactacattgaaaagggcaatcagccgtttctctactctccaggcacatgatggacactggcctggggattatggtggtcctatgttccttatgccaggcttggtgcctctttcaactcttcttctatagtgatatgtttaacttgcttacttcacttggatatgcattcctacgactaaatctgtgctctgtgattaatcttgtgatatgtttaagacaaaattgtgctatcttgctttcttacatcttatgcctcatattctatatgagcacaatgttttttttttcttgcattcactgtgagtaccaatttagatgcctcatgaaataggaactagcaaattgtagcaggaatctgatttttagattacatggaagacttatgtttcatgtttcctggtttacaaaacagctactaattgtgtgtaccctttgtccagatcataacattgtatgtgactggagcactaaacactgtcttgtcattggaacaccagaaggagatccgccggtatctttataatcaccagaatgaagatggcggctggggcttgcacattgagggtccaagcaccatgttcggctcagcactgacctatgttattttgagattgcttggagagggaccagatagtggagatggagccatggagaaaggtcgaaactggatattagaccatggtggagcaacatatataacatcgtgggggaagttttggctttcggtactaggtgtatttgaatggtctggtaacaacccggtgccaccagaagtatggctactgccatatctcctcccatttcacccagggaggatgtggtgtcattgtcgaatggtgtatttgccaatgtgctacatttatgggaagaggtttgttggccgaatcacaccacttctgttggaattaaggaaggaacttttcaaagacccttacagcaagattgattgggacaaggcccgcaacctatgtgccaaggaagatctgtactacccacacccattcgttcaagatgtgttgtgggccactctccataaattcgttgaaccagttatgatgcattggcctggcagcaaattgagggagaaagctctggaaacagtcatgcaacatgttcattatgaagatgagaacactcgttatatttgcattggtcctgtaaacaaggtattgaatatgcttgcttgctggattgaagatccaaactcggaggccttcaaacttcatatcccacgagtctatgattacttgtggcttgctgaagatggcatgaagatgcagggttataatggcagccaactttgggatacagctttcacagttcaagccattgtggctaccaaccttattgaagagtttggtcctacccttaaactagcacacaactatatcaagaattcacaggttcttgatgactgccctggtgatctgaatgactggtaccgccacacatctaaaggtgcatggccattctcaactgctgatcatggttggcctatatctgattgcactgctgaaggactaaagcattctgaggaggagagggatttgtgggtgctggctggggccaagaatttggatcttctaacagcccctatcccagggttgtaggtgttctgttgtcagctctctagctatggactgttttttgtattttcgtttttggccaccgtgaggtgccttgtttttgtacctgtctcgtccattttggaccttttatcttcttaatataatcatgtgcaactctcctgcgcgttcgagaaaaaaatgttccaacattcttgactgtatagtgtctggcacattgtcataatttcataattatttgttttaataaatagtaattgcttattttcttttactccaggcttcattattgttatcaaggatctctcccaaaattgttggtgaaccgatggaagctaatagattttatgatgctgtcagttgtctgatgtcttatatgaatgataatggcggtttcgcgacatatgaactcacaagatcttatccctggttggagctgatcaatcccgctgagacctttggggatattgtgattgattacccgtatgttgaatgtacatcagcagcaattcaggccctgacatcattcaaaaaactataccctgggcaccgcaggaaagaggtggataactgtatcagcaaagcttccaatttcatcgagagtattcagaaaagcgatggttcatggtatggctcttgggccgtctgtttcacatacggcacttggtttggtgtgaagggactaattgctgctggtagaacatttgagaacagtcctgcaattagaaaggcatgcgactttctgttgtcaaaagaacttccttccggtggttggggagaaagctatttgtcatctcaagaccaggtttacaccaatctcaaaggcaaccggcctcatgcggtgaacactagttgggccatgctggcgctgattgatgcgggccaggccgagagagatccaacgcctctacaccgagcagcaaaggttttgatcaacttacaatcagaggacggagaatttcctcagcaagagatcataggagtgttcaacaagaactgcatgataagctactcccagtacaggaacatcttcccgatttgggctctgggtgagtaccggtgtcgagtcttgggggctggcaagccttggcggtgaacgggaggtgtgtgtgtgtgtgtgtcatggatcagcttttgtgagtagccatgtggaagttggaataatgtagctacgttacgttcagggggttgcgttactagtggtcctagtaataatagtgatggtgatagtaatgtactcctcattattacaatctcaaagcggttcatgccattgccatgcacatctcagatccgagtcacgcacttgagagagttcaaggattgcaagtatagttgggagaatcaaatccaatcggcttattgtctgctcatctcaggtgtcaggtcttttcagccacacacacatacacataccctgacctagagatttttgccattatgaaacattacatgttcggcttcgttgaaatgaagatgagaagggattcgacgattt

SEQ ID NO: 54008 - DNA, 3302 bp, Zea Mays
tattaactatagtgaatttaaacacccgagtggtgagcaggggtaaaaatgcaattgtcccgaacaacaacgactactgctgcgaactccactcaaatcccaaatcaaatcaactccccagcctgaactgtcctccctggactcccctcgccattcatcaacgcccgccacagagggggatcccggcctcccggtgccgggagccaagccaagccacgcaccggccggccgcggcggatcggaaccttccccaccgctcgcccgccgcatttgaggagggcgatgtggcgcctgcggatcgcggaggggggcggggacccctggctacgcacgaagaacgcccacgtcggccgccaggtgtgggagttcgacgccgccgccgaccccgaccccgccgtcgacgccgcgcgccgcgccttcgtcgccaccaggggccacctcaagcacagcgccgacctcctcatgcgcatccagttcgccaaagaaaactcgattgagcttcaccttccaggcatcaagctcggtgagcatgaagatgtgaccgaggaagctgtgttgactacattgaaaagggcaatcagccgtttctctactctccaggcacatgatggacactggcctggggattatggtggtcctatgttccttatgccaggcttggtgcctctttcaactcttcttctatagtgatatgtttaacttgcttacttcacttggatatgcattcctacgactaaatctgtgctctgtgattaatcttgtgatatgtttaagacaaaattgtgctatcttgctttcttacatcttatgcctcatattctatatgagcacaatgttttttttttcttgcattcactgtgagtaccaatttagatgcctcatgaaataggaactagcaaattgtagcaggaatctgatttttagattacatggaagacttatgtttcatgtttcctggtttacaaaacagctactaattgtgtgtaccctttgtccagatcataacattgtatgtgactggagcactaaacactgtcttgtcattggaacaccagaaggagatccgccggtatctttataatcaccagaatgaagatggcggctggggcttgcacattgagggtccaagcaccatgttcggctcagcactgacctatgttattttgagattgcttggagagggaccagatagtggagatggagccatggagaaaggtcgaaactggatattagaccatggtggagcaacatatataacatcgtgggggaagttttggctttcggtactaggtgtatttgaatggtctggtaacaacccggtgccaccagaagtatggctactgccatatctcctcccatttcacccagggaggatgtggtgtcattgtcgaatggtgtatttgccaatgtgctacatttatgggaagaggtttgttggccgaatcacaccacttctgttggaattaaggaaggaacttttcaaagacccttacagcaagattgattgggacaaggcccgcaacctatgtgccaaggaagatctgtactacccacacccattcgttcaagatgtgttgtgggccactctccataaattcgttgaaccagttatgatgcattggcctggcagcaaattgagggagaaagctctggaaacagtcatgcaacatgttcattatgaagatgagaacactcgttatatttgcattggtcctgtaaacaaggtattgaatatgcttgcttgctggattgaagatccaaactcggaggccttcaaacttcatatcccacgagtctatgattacttgtggcttgctgaagatggcatgaagatgcagggttataatggcagccaactttgggatacagctttcacagttcaagccattgtggctaccaaccttattgaagagtttggtcctacccttaaactagcacacaactatatcaagaattcacaggttcttgatgactgccctggtgatctgaatgactggtaccgccacacatctaaaggtgcatggccattctcaactgctgatcatggttggcctatatctgattgcactgctgaaggactaaaggcttcattattgttatcaaggatctctcccaaaattgttggtgaaccgatggaagctaatagattttatgatgctgtcagttgtctgatgtcttatatgaatgataatggcggtttcgcgacatatgaactcacaagatcttatccctggttggagctgatcaatcccgctgagacctttggggatattgtgattgattacccgtatgttgaatgtacatcagcagcaattcaggccctgacatcattcaaaaaactataccctgggcaccgcaggaaagaggtggataactgtatcagcaaagcttccaatttcatcgagagtattcagaaaagcgatggttcatggtatggctcttgggccgtctgtttcacatacggcacttggtttggtgtgaagggactaattgctgctggtagaacatttgagaacagtcctgcaattagaaaggcatgcgactttctgttgtcaaaagaacttccttccggtggttggggagaaagctatttgtcatctcaagaccaggtttacaccaatctcaaaggcaaccggcctcatgcggtgaacactagttgggccatgctggcgctgattgatgcgggccaggccgagagagatccaacgcctctacaccgagcagcaaaggttttgatcaacttacaatcagaggacggagaatttcctcagcaagagatcataggagtgttcaacaagaactgcatgataagctactcccagtacaggaacatcttcccgatttgggctctgggtgagtaccggtgtcgagtcttgggggctggcaagccttggcggtgaacgggaggtgtgtgtgtgtgtgtgtcatggatcagcttttgtgagtagccatgtggaagttggaataatgtagctacgttacgttcagggggttgcgttactagtggtcctagtaataatagtgatggtgatagtaatgtactcctcattattacaatctcaaagcggttcatgccattgccatgcacatctcagatccgagtcacgcacttgagagagttcaaggattgcaagtatagttgggagaatcaaatccaatcggcttattgtctgctcatctcaggtgtcaggtcttttcagccacacacacatacacataccctgacctagagatttttgccattatgaaacattacatgttcggcttcgttgaaatgaagatgagaagggattcgacgattt

SEQ ID NO: 54009 - DNA, 888 bp, Zea Mays
cttagtataaacgcgacattagttagtcattcgcgtgtgtcgcgcgcgtcgtcgcgtgtcgtccgcgcgtgttgttcacccgcgttggcgcgcgtcgttcgcgtgtgtcacacgcctcgccgcgtgcgagattaaaccatttgtttataattactcatgtgaattaattagttacttatttgatcatcaactaataaaagggtaagttagacaagaactaagtagtagtgttagtttacatttaattaatatcaattaatatagagatatcggattaaatattccaattaatatttgcttagcgtaaacccattgacttctcgaccatagctccaactatctcgtttctttgtcctcgtgtgaccgtagtagcacactctattttattttgcgtattttactatgctttacttgaatggtgtaatgttcttatgcatatatatgcttgtttgtttgttcctgtttgtattcgctgtgcgtcgtgaatggactgcgatccaactccgagattcgaggaatcgacgatcaagcttcggcgaccaaatgacctagctcttcgagttccacgaagttaaagaccttgagcatctgtttggtgaaggcaagtgtcctctgacctattatgtcccatttactttataattcatcaacccgcataccatgatcaacctaaggattgactagctttctattcacgtggtccttgattaccttttgggctactatggttagattcatgctattgctttactttaatcaatgaacatgatgtgaacacttatgatatgatgttgtcattatgattatgatgttggactggtgatactttagggggctcgagcggtttctcgagtgcctctccgtaaggacctgttcgttggatgatcg

SEQ ID NO: 54010 - DNA, 439 bp, Zea Mays
gcgatgccacgctgccatgccacgagcaccaccgacccgccatggccactgcacgccctggccggcgagcggccacgcccgcccggaccggtgagctccttccccttgctgctcgtccatggaagaactgtcgggcgccgctaccctgctccactggccgcatcaccgacgcctagccatggccgccgacaccgacgtggtccatctcctggccagcaactaacttgcttgaatgccccttgcggttgtcgtggtggtagggagagaaaaatcaaccgtacacgtcatgcgtgggtgcaagaaggaaaaaggcatgcaagtagaaatgcccgcgagccccacgttgcatgtcgtattcctctcctgcttgcatgcgatcaagggaaacagtcctccaaggatccaaggtggatgcaaaatccatgaccatccctgggat

SEQ ID NO: 54011 - DNA, 678 bp, Zea Mays
ctccaatctcccaccttagttcaagagtggtctcttacttatctcacccgtggatatatcctatactttaccacttgcaagacttatcttaactttattcttggttgtacctagattcttgttttttaatgcacatttacctcttcctttatatccttgcctattatcacctttgacccttgatctctctccatatttaccatgatgtttacctatttttcttagcctcacttattccatttcaatccgagagtgttgttttccctatcccgctcttgttcgtttcctttccctttgttgctttgcaatcttgcctcaccttaacttcatcctttgttgagcttttgtttgatatcatccttacctttgtaatctgtagatcttgccttgatacttatcttaggtctgcttgttgaaatcccctcttttcgatctgaattcgagagctatgttttacttatctcacccttggctatatcctcttctttaccgcgtaagccttgacatacctccattctttgttgtacatataccactggctcttctgtgctttcgtattttcccttatgcccttgtctattatcgcctttgacccttgtgatattgaggccttccacctaaatgtttactttaaacttatcctttaaaagtctcccctttctttcaacccagtttgag

SEQ ID NO: 54012 - DNA, 599 bp, Zea Mays
ctacagcctcagggaatctttgtaaaggcttcgtagtgaatccctggacattcaccttggtagtgaataagggtctttcaagcccgggctagagagggaatcacggcttgtgggtaaagtgcgcaacctctgcagagtgttatgaaactgatatattagtcgtgctcgcggttatgagcggccaagggagctccagtgattagtgatacttgatcagagatgttcggattacaggtggtgatgagaatgatggtttttgattatgactatggtaatggtaagtggtattatttccgtttggaaagggtactttgggttgataaacttgggttaacgctaaaactggctttctactagtaataataacctgaccaactaaaagcaactgcttgacttaactccacataaagctagttcactgcagccaaacgggacatttgctgagtacgttgatgtgtactcacccttgctttcacaaacaccaggttgcctttggtgcaacctatgctcaggtaaagaagaaggagaacggtgtcgaggcggatctccaggggttccaggacttcgacgagttcgaggattaggctagcgacctcccc

SEQ ID NO: 54013 - DNA, 3540 bp, Zea Mays
ctacaagatggcagtagcagtaggacttcttcagtttttggaaagttgctgttactgttgccgaccttatgaatcattctatgaccaggtcagccgaaaagacacttactaaccactgggtggagtctttttgtgggcggcaagagactatttgctggtgattctgtcatttttgttagggacgaaaggcagcaacttctactgggaatcagacgggctagccggcaacccactaatatatcttcttcagtactttcaagtgacagtatgcacataggggtgcttgctgcagcagcccatgctgctgccaacaatagcccatttaccatattttacaatcctagggctagccctactgagtttgttatcccatttgccaaattccagaaggcactgtatagtaaccaaatatctttaggaatgcgattccggatgatgtttgagaccgaggaattagggatgagaaggtacatgggtacaataactgggataactgatctagatcctgtaagatggaaaaactcccagtggcgcaacttacaggttggttgggatgaatctgccgcaggggaaaggagaaacagagtttcaatgtgggagattgaaccaattgctgctcctttcttcatatgcccccagcctttctttggcgtaaagcgccctaggcaaatagatgacgagtcatcagagatggaaaaccttttcaagagggcaatgccttggcttggtgaggagatatgcataaaggacgctcagacccataacaccacaatgcctggtttgagcttggttcaatggatgaacatgaacaggccgcagagctccacattaaatacaggcatacagtcagagtatctgcgatctctaagtaaccctgccatgcaaaaccttggtgcggctgagctcgcaaggcagctatatgtccagaaccatctcctgcaacaaaacagtgtacagcttaatgcttccaagctccctcagcaagtgcaacctataaatgagcttgctaagggatcattgtcttgtaatcaacttgacgtcatcatcaatcaacaagaactgaagcaagaagttggcaatcagcagaggcaacagcagcccgttaaccaagcaattcctttaagtcaggctcaaaccaatcttgtccaggcccaggtaattatccagaatcagatgcaacagcagcagcaacaacagcagcagtctccaactaggtgccagaagggaaccagtgtgcaacagctgcttctttcacagcaacagcaggaccagaattttcagctgcagcaacaacagcagcttttacttcagcaactgcagcagcagaatcagcagcagcagcaacaacagcagaatcagcagcagctaaacaagttgccagctcaacttgtgaatctggctggtcaacaggctcagttgtctgaccaggaacttcagctgcagctattacagaaactacagcagcagtcacttgtatcacagccaacagttacactctcgccgttacaggtaatacaggaacaacagaagttacttttggacatgcagcagctatcaagctctcattcacttgcccagcagcggatcctgcctcaacaagatagcgatgtttcgctgcaagcatcacaggcgccaccaccaatgaagcaagaacagcagaagccttcacagaaacaatttgtgcttgcagatgtgtcagatgttgtctatccacagatttcatcaaccaacgttttgtccaaagctggaacccaactgatgactccaggtgctacacaatctgtactaacggaggaaattccttcttgctcaacatcaccttctacagccaccggaaatcatttggcatacccaatcattggcaggaacgagcattgcaaggtcaccattgagaaagttcctcaatcgtcttctctgatgtcaattccaacagctggtgaagctgtaacaactccaataatggcgaaggaattgtcaaagttgaaccataatctgaaggagaatgtaaccacatcaaagtcacccattgttgggactggacatgagaatcttttgaacattgtaccgtcaacagacaacctggaaacagcttcatcagcaacttctttatggcctacccaaacagatggacttttgcatcaaggttttcctactaacttcaatcaacaacaaatgttcaaagatgcacttccagatgtggaaattcaagaagtggatccgactaacaatgccttctttgggatcaacagtgatggtccattgggctttcctatggaaaccgaaggcttgttggtaagtgcaattaatcctgtgaagtgtcagcctaatttgtcaactgacgttgagatcaattaccgaatacaaaaggatgcccaacaagagatctcaacctccatggtttcacagtcattcggtcagtctgatatagcttttaactcaattgattctgcaatcaacgatggtgtcatgttgaatagaaattcttgcccccctgcacctccgcagagaatgcggacattcacaaaggtctacaagcgtggagctgtaggccgatccattgacataggcaggttctccggatatgaagaattgaagcatgctgtggcccgcatgtttggtatagagggccaacttgaggaccgacagagaataggatggaagttagtctacacggatcatgaggatgacgtcctacttcttggtgacgacccatgggaggagtttgtgaattgtgtgaagtgcattaggatcctatccccccaagaagtgcagcagatgagcttagatggtgatttggggaacaatgtcctctccaaccaggcttgcagcagctcagatggtgggaatgcctggaagcctcgccgcgaccagaaccctggtaacccttccatcgggttctacgaccaatttgagtgacctgatcacggaaattcgagatgagaattatagctgcaaaaagcaaccagtgtccagccatctacagaattatcgccacggaaagggtaagcagatgcaggatgccgtagacgtcttggcttttatagttgggagaggaaatgctcctcagattagggtatgttctagatatatgtgtagttttctttgttttgaaacaatgtaggcaagaagaatgaaacttacctagagctgttgctgagtcgaaacatcagacagatggttaggcaaaacctgaacttcagacagagtaggcagatctgaagataaagtattttgattgagagtattttgtaattctgtattgaactgccgctggggtttgcttgagacccatgcggcactatatgagtctctctcagttcagaaaatactgaagcagatctaagaggtcctactgattattactatatgtttgatgtgaatggccccatttacaaatggacagtctgtccgtctccacttgtaggtgtaatatgttcaacaacaaccaggttttataacactggcattacgaggaaactttttgtacaacttatttttctcaaagtgtaatgataaaattcgatatattctttttactac

SEQ ID NO: 54014 - DNA, 4313 bp, Zea Mays
acggcccttggtcttcgtgagctgctgctcgcgttgtcggggaggcgccgccacgccgctcgcctcgcctagcgccgcgtccggattccggagcaacaactcctaggcaggtagtagtagtagcctagtaggttgtgaacgacccggccggccggcggcgcggtgcagcgtccccgctgctccatgcccgagggccaccagtgaagctcccgcgtggccacgcgacgcgaccatgaagcagtccccggccagctctggtgtcacggccgcgcccgtcgtccctgcccccgcgcccgcggccgcctccaccggcgcggcgccgccatgcgaaggggagcggaaggcgccggcgatcaacgccgacctgtggtacgcctgcgcgggcccgctcgtgtctctgccgccggtgggcagcctcgtcgtctacttcccgcagggccacagcgagcaggttgcagcttctatgcaaaaggacatcgatgcacatgtgccaagctacccaaatcttccctcaaagctgatatgtcttcttcacagtgttactttgcacgctgacccggatactgacgaggtgtacgcgcagatgactcttcagccagtgaacacgtatgggaaagaggctttacagctatcggagcttgcactgaaacatgcaaggccacagatggagttcttctgcaagacgcttactgcaagtgatacgagtacacatggaggcttctctgtgcctcgtcgtgctgcggagaagatattacctccactggacttcggtatgcagcctccggctcaagaacttcaagccagggacatacatgacaatgtgtggacatttcgccatatatttcgaggtcagccgaaaagacacttactaaccactgggtggagtctttttgtgggcggcaagagactatttgctggtgattctgtcatttttgttagggacgaaaggcagcaacttctactgggaatcagacgggctagccggcaacccactaatatatcttcttcagtactttcaagtgacagtatgcacataggggtgcttgctgcagcagcccatgctgctgccaacaatagcccatttaccatattttacaatcctagggctagccctactgagtttgttatcccatttgccaaattccagaaggcactgtatagtaaccaaatatctttaggaatgcgattccggatgatgtttgagaccgaggaattagggatgagaaggtacatgggtacaataactgggataactgatctagatcctgtaagatggaaaaactcccagtggcgcaacttacagtgtaattttgtaggttggttgggatgaatctgccgcaggggaaaggagaaacagagtttcaatgtgggagattgaaccaattgctgctcctttcttcatatgcccccagcctttctttggcgtaaagcgccctaggcaaatagatgacgagtcatcagagatggaaaaccttttcaagagggcaatgccttggcttggtgaggagatatgcataaaggacgctcagacccataacaccacaatgcctggtttgagcttggttcaatggatgaacatgaacaggccgcagagctccacattaaatacaggcatacagtcagagtatctgcgatctctaagtaaccctgccatgcaaaaccttggtgcggctgagctcgcaaggcagctatatgtccagaaccatctcctgcaacaaaacagtgtacagcttaatgcttccaagctccctcagcaagtgcaacctataaatgagcttgctaagggatcattgtcttgtaatcaacttgacgtcatcatcaatcaacaagaactgaagcaagaagttggcaatcagcagaggcaacagcagcccgttaaccaagcaattcctttaagtcaggctcaaaccaatcttgtccaggcccaggtaattatccagaatcagatgcaacagcagcagcaacaacagcagcagtctccaactaggtgccagaagggaaccagtgtgcaacagctgcttctttcacagcaacagcaggaccagaattttcagctgcagcaacaacagcagcttttacttcagcaactgcagcagcagaatcagcagcagcagcaacaacagcagaatcagcagcagctaaacaagttgccagctcaacttgtgaatctggctggtcaacaggctcagttgtctgaccaggaacttcagctgcagctattacagaaactacagcagcagtcacttgtatcacagccaacagttacactctcgccgttacaggtaatacaggaacaacagaagttacttttggacatgcagcagctatcaagctctcattcacttgcccagcagcggatcctgcctcaacaagatagcgatgtttcgctgcaagcatcacaggcgccaccaccaatgaagcaagaacagcagaagccttcacagaaacaatttgtgcttgcagatgtgtcagatgttgtctatccacagatttcatcaaccaacgttttgtccaaagctggaacccaactgatgactccaggtgctacacaatctgtactaacggaggaaattccttcttgctcaacatcaccttctacagccaccggaaatcatttggcatacccaatcattggcaggaacgagcattgcaaggtcaccattgagaaagttcctcaatcgtcttctctgatgtcaattccaacagctggtgaagctgtaacaactccaataatggcgaaggaattgtcaaagttgaaccataatctgaaggagaatgtaaccacatcaaagtcacccattgttgggactggacatgagaatcttttgaacattgtaccgtcaacagacaacctggaaacagcttcatcagcaacttctttatggcctacccaaacagatggacttttgcatcaaggttttcctactaacttcaatcaacaacaaatgttcaaagatgcacttccagatgtggaaattcaagaagtggatccgactaacaatgccttctttgggatcaacagtgatggtccattgggctttcctatggaaaccgaaggcttgttggtaagtgcaattaatcctgtgaagtgtcagcctaatttgtcaactgacgttgagatcaattaccgaatacaaaaggatgcccaacaagagatctcaacctccatggtttcacagtcattcggtcagtctgatatagcttttaactcaattgattctgcaatcaacgatggtgtcatgttgaatagaaattcttgcccccctgcacctccgcagagaatgcggacattcacaaaggtctacaagcgtggagctgtaggccgatccattgacataggcaggttctccggatatgaagaattgaagcatgctgtggcccgcatgtttggtatagagggccaacttgaggaccgacagagaataggatggaagttagtctacacggatcatgaggatgacgtcctacttcttggtgacgacccatgggaggagtttgtgaattgtgtgaagtgcattaggatcctatccccccaagaagtgcagcagatgagcttagatggtgatttggggaacaatgtcctctccaaccaggcttgcagcagctcagatggtgggaatgcctggaagcctcgccgcgaccagaaccctggtaacccttccatcgggttctacgaccaatttgagtgacctgatcacggaaattcgagatgagaattatagctgcaaaaagcaaccagtgtccagccatctacagaattatcgccacggaaagggtaagcagatgcaggatgccgtagacgtcttggcttttatagttgggagaggaaatgctcctcagattagggtatgttctagatatatgtgtagttttctttgttttgaaacaatgtaggcaagaagaatgaaacttacctagagctgttgctgagtcgaaacatcagacagatggttaggcaaaacctgaacttcagacagagtaggcagatctgaagataaagtattttgattgagagtattttgtaattctgtattgaactgccgctggggtttgcttgagacccatgcggcactatatgagtctctctcagttcagaaaatactgaagcagatctaagaggtcctactgattattactatatgtttgatgtgaatggccccatttacaaatggacagtctgtccgtctccacttgtaggtgtaatatgttcaacaacaaccaggttttataacactggcattacgaggaaactttttgtacaacttatttttctcaaagtgtaatgataaaattcgatatattctttttactac

SEQ ID NO: 54015 - DNA, 4371 bp, Zea Mays
gggaaacaaggagcgtttcgttttaactcccgaggcaacgcaccaactagccagcccacgcagctcagcaccacccctctctctctctctctctctctctctctctgcgggaagacggcccttggtcttcgtgagctgctgctcgcgttgtcggggaggcgccgccacgccgctcgcctcgcctagcgccgcgtccggattccggagcaacaactcctaggcaggtagtagtagtagcctagtaggttgtgaacgacccggccggccggcggcgcggtgcagcgtccccgctgctccatgcccgagggccaccagtgaagctcccgcgtggccacgcgacgcgaccatgaagcagtccccggccagctctggtgtcacggccgcgcccgtcgtccctgcccccgcgcccgcggccgcctccaccggcgcggcgccgccatgcgaaggggagcggaaggcgccggcgatcaacgccgacctgtggtacgcctgcgcgggcccgctcgtgtctctgccgccggtgggcagcctcgtcgtctacttcccgcagggccacagcgagcaggttgcagcttctatgcaaaaggacatcgatgcacatgtgccaagctacccaaatcttccctcaaagctgatatgtcttcttcacagtgttactttgcacgctgacccggatactgacgaggtgtacgcgcagatgactcttcagccagtgaacacgtatgggaaagaggctttacagctatcggagcttgcactgaaacatgcaaggccacagatggagttcttctgcaagacgcttactgcaagtgatacgagtacacatggaggcttctctgtgcctcgtcgtgctgcggagaagatattacctccactggacttcggtatgcagcctccggctcaagaacttcaagccagggacatacatgacaatgtgtggacatttcgccatatatttcgaggtcagccgaaaagacacttactaaccactgggtggagtctttttgtgggcggcaagagactatttgctggtgattctgtcatttttgttagggacgaaaggcagcaacttctactgggaatcagacgggctagccggcaacccactaatatatcttcttcagtactttcaagtgacagtatgcacataggggtgcttgctgcagcagcccatgctgctgccaacaatagcccatttaccatattttacaatcctagaaggcactgtatagtaaccaaatatctttaggaatgcgattccggatgatgtttgagaccgaggaattagggatgagaaggtacatgggtacaataactgggataactgatctagatcctgtaagatggaaaaactcccagtggcgcaacttacaggttggttgggatgaatctgccgcaggggaaaggagaaacagagtttcaatgtgggagattgaaccaattgctgctcctttcttcatatgcccccagcctttctttggcgtaaagcgccctaggcaaatagatgacgagtcatcagagatggaaaaccttttcaagagggcaatgccttggcttggtgaggagatatgcataaaggacgctcagacccataacaccacaatgcctggtttgagcttggttcaatggatgaacatgaacaggccgcagagctccacattaaatacaggcatacagtcagagtatctgcgatctctaagtaaccctgccatgcaaaaccttggtgcggctgagctcgcaaggcagctatatgtccagaaccatctcctgcaacaaaacagtgtacagcttaatgcttccaagctccctcagcaagtgcaacctataaatgagcttgctaagggatcattgtcttgtaatcaacttgacgtcatcatcaatcaacaagaactgaagcaagaagttggcaatcagcagaggcaacagcagcccgttaaccaagcaattcctttaagtcaggctcaaaccaatcttgtccaggcccaggtaattatccagaatcagatgcaacagcagcagcaacaacagcagcagtctccaactaggtgccagaagggaaccagtgtgcaacagctgcttctttcacagcaacagcaggaccagaattttcagctgcagcaacaacagcagcttttacttcagcaactgcagcagcagaatcagcagcagcagcaacaacagcagaatcagcagcagctaaacaagttgccagctcaacttgtgaatctggctggtcaacaggctcagttgtctgaccaggaacttcagctgcagctattacagaaactacagcagcagtcacttgtatcacagccaacagttacactctcgccgttacaggtaatacaggaacaacagaagttacttttggacatgcagcagctatcaagctctcattcacttgcccagcagcggatcctgcctcaacaagatagcgatgtttcgctgcaagcatcacaggcgccaccaccaatgaagcaagaacagcagaagccttcacagaaacaatttgtgcttgcagatgtgtcagatgttgtctatccacagatttcatcaaccaacgttttgtccaaagctggaacccaactgatgactccaggtgctacacaatctgtactaacggaggaaattccttcttgctcaacatcaccttctacagccaccggaaatcatttggcatacccaatcattggcaggaacgagcattgcaaggtcaccattgagaaagttcctcaatcgtcttctctgatgtcaattccaacagctggtgaagctgtaacaactccaataatggcgaaggaattgtcaaagttgaaccataatctgaaggagaatgtaaccacatcaaagtcacccattgttgggactggacatgagaatcttttgaacattgtaccgtcaacagacaacctggaaacagcttcatcagcaacttctttatggcctacccaaacagatggacttttgcatcaaggttttcctactaacttcaatcaacaacaaatgttcaaagatgcacttccagatgtggaaattcaagaagtggatccgactaacaatgccttctttgggatcaacagtgatggtccattgggctttcctatggaaaccgaaggcttgttggtaagtgcaattaatcctgtgaagtgtcagcctaatttgtcaactgacgttgagatcaattaccgaatacaaaaggatgcccaacaagagatctcaacctccatggtttcacagtcattcggtcagtctgatatagcttttaactcaattgattctgcaatcaacgatggtgtcatgttgaatagaaattcttgcccccctgcacctccgcagagaatgcggacattcacaaaggtctacaagcgtggagctgtaggccgatccattgacataggcaggttctccggatatgaagaattgaagcatgctgtggcccgcatgtttggtatagagggccaacttgaggaccgacagagaataggatggaagttagtctacacggatcatgaggatgacgtcctacttcttggtgacgacccatgggaggagtttgtgaattgtgtgaagtgcattaggatcctatccccccaagaagtgcagcagatgagcttagatggtgatttggggaacaatgtcctctccaaccaggcttgcagcagctcagatggtgggaatgcctggaagcctcgccgcgaccagaaccctggtaacccttccatcgggttctacgaccaatttgagtgacctgatcacggaaattcgagatgagaattatagctgcaaaaagcaaccagtgtccagccatctacagaattatcgccacggaaagggtaagcagatgcaggatgccgtagacgtcttggcttttatagttgggagaggaaatgctcctcagattagggtatgttctagatatatgtgtagttttctttgttttgaaacaatgtaggcaagaagaatgaaacttacctagagctgttgctgagtcgaaacatcagacagatggttaggcaaaacctgaacttcagacagagtaggcagatctgaagataaagtattttgattgagagtattttgtaattctgtattgaactgccgctggggtttgcttgagacccatgcggcactatatgagtctctctcagttcagaaaatactgaagcagatctaagaggtcctactgattattactatatgtttgatgtgaatggccccatttacaaatggacagtctgtccgtctccacttgtaggtgtaatatgttcaacaacaaccaggttttataacactggcattacgaggaaactttttgtacaacttatttttctcaaagtgtaatgataaaattcgatatattctttttactac

SEQ ID NO: 54016 - DNA, 1177 bp, Zea Mays
atgaaaagtctccttggacaagtatgacgtccataccatgttaatcatcggaccttaatcttctggcccaaagtttcctgattggttggttgcatagatatgttggattcttggaagtggccatcttcccctaaaaaatataaagtagagcatgttttcatcttggatgcatccaatacccctaccttatcatcatgagttgatatgttctcaagttatctgacagacgagctacccactgtgtttatttcagatttcatgtataaatttggatatctggcagaaaaggcaggtgctataaagtccttcctgaccttgtatattagtgctaaacttctaacatagattaccactaaacactgcgaatttgtttttgttcactttcatcttgcatacttccagtgacgatcacccaaaaacatgcatgtgaagggtggcatgacaatatgcttacattgcttatgcacatgccatttccaccgtccgtgaggccatgatactagatctggcaaatgtgtcagcttgctccatattgttgataccatgacatgtgcaaccatttgcactctgttgctctgttcttcgtgtttgctttgatttaatccgtaccgacttctactgtttctatagtgtttttatctttatatattgtaactgtaacagtccaaatgtttctatctctatgtattgcagttgtaacaatccaaacaaacggctttaatctgaagcgaatcgatctgctcggacgctagaatttcagagcccatgtgagtgaccaaatgtgtcacgaagaagggaggaacaggtacttcagtcttcagtcatgcaatctgatgcaacaatgggagttcacacttttctggccacaatgaagtaataaaacaaacagtacttctgaattttcagtacgtatagttgtagacacagttgatgcatccctcctcgctcggctctttgcaatgatgaggtggtaactgtcgtcctgcgctcttttagcttctttgtttgtgttcagtgtccaattcagttcagttattaggaaagttcagccctgactaccaactaatacagtatatttgtgatatatacgtattgtgttctcgacataaaattatttccatgtgagccgccggattaaaaaccacctgtttataaattctggccgactttatttgtc

SEQ ID NO: 54017 - DNA, 1275 bp, Zea Mays
atggggaagcacgagttcctgacgccgaaggcgatcgcaaaccggatcaaggcgaaggggctgcagaagctgcggtggtactgtcagatgtgtcagaagcagtgccgcgacgagaacgggttcaagtgccactgcatgtcggagtcgcaccagaggcagatgcaggtgttcggcatggcccccgaccgcgtcgtcgagggcttctccgaggagttcctcgagtccttcctctccctcatccgccgcgcgcaccgccactcccgcgtcgccgccaccgtcgtctacaacgagtacatcgccgaccggcaccacgtccacatgaactccacgcggtgggccacgctcaccgagttcgtcaagttcctggggcgcgaggggtactgtaaggtcgaggacacgcccaaggggtggttcatgacctacatcgaccgtgactcggagcaggccgtcaaggaacgcctcaagcgcaagaggatcaagtcagacatggctgacgacgagcgccaggagcgcatgattgcccgccagattgagcgtgcgcacaagtccttagctaaacccaatggtggtggtgctgccgagggcgagcctgagtctggcagtgaaggagagtattcaggttcggatgatgatgagcaggagccggaggatgactcgaaagaggcagataaggcaacaggtaagattgcgattgcgcttcagaaggctgtgccggggcccaaggttaatccttttgacgataagccgaagatgaaatttggttttgatgaggaggatggctcaggcacccgagaccaggagaagaatgagttgaccaagaagatgggaaaggatgtgaaggcagcagaggcaaagaggtcagcattggacgagctgatgaaggaggaggagaaggccaaggagaggagcaataggaaggactactggctgtgccctgggattgtggtcaaagtgatgagcaagtcattggcagagaaggggtactacaagcagaaaggggtggtgaagaaagttattgataaatatgttggggagattgagatgttggagagcaagcatgttctcagggtcgaccaagatgagcttgagaccgtgatccctcagattggtggacttgtgcggattgtcaatggggcttatcgggggtcaaatgccaggttgctttcagtggacactgagaaattctgtgcaaaagtgcaggttgagaaaggcctctatgatgggaaggttctcagggctgtcgaatacgaggacatttgcaagatatcctcatga

SEQ ID NO: 54018 - DNA, 1310 bp, Zea Mays
caggaatcgacgtcaggctgatagactagtctgctgctcacatcatttccgctcaggctactgcgttctccagctacaaaaaaagggcattgtcacatcgcgagaagagctccatcaacctgctgtagcgtttcatcaacaacaaattcttcagcaatcacctctctctaaggcataccttagagagaaactggttccaaagacttcaagggcatacccttgaggaagatcgcgtcgccggattatacacaatctcaagggcatacccttgagagagatcacactgcaatgacatatacgtcgttgtggcctaacggaaaggtctactgcaaggtaagaaaagccccttatatcgctgcactgttccttgtcttctttaccgtcgagtttgataacctccacgcgcatacacgacctcgtatattggaagagctatgttcttccattcatgctgttgaagtcggcatcatgataaatacaattgtaatccgcacatatgtataaaacggtgagttaaacggtggaagttgaaattctgtgtcatggggtgtcaaataaaaaaaatcaagttcctctgatttgatacggaagcaggccatcgtcgcctgtttccctgcgagaaaataaaaaatgttgcttggcaccatgcatacatacacccaaattaaattattctgatcggcatatatatgcaatagctcaaaatacatgcatgcccaaactattaaattaagatcgtattctgaattattaatacttaatgtcacgttatggtctaaatgaacaaattcagcaaataacttcgttacaaatgaaagggcaaactctacccaaaagttgtgacggacaggctatatgaaatctacacacactagttatacatggcaatatgactataaaaagttagctggtgccacagaatgctcatcaaacagaggctgcgcatatgcatcattattgtcgtccaaatatttatggcataaagataaaaaaataatagacaaacccctcgtttatgcataggctattcctaaattccaaagtgtattataagcatataaaacagttgtgctaatagtaaaaatgaatgtaaaagaaactatcacacatactatattcctacatgatagttgtgctggtagtaaaattgaatatataaaaggaacaaacctctattagggttatgcattaggaaataaatcctcctaccagaatactggtcatgaaaatccccatgcgtgaatagtatattttaatgagctaaattatatgtcaaatgaaaatagatattccatatgttgaaagtaaat

SEQ ID NO: 54019 - DNA, 791 bp, Zea Mays
cggggctcgccggcgacggcgccgggtcgcggaagtcccggaacgcgctgctcacgggggccggcgacgagcagttcttggcggcggacgggctctgcggctgcggcagcggcgacggcgcgggtatgtctcggagcaggaatgcggagtcggcgaggacggggagcggcgggaggaggtcggaggaggaggcgtcgagcgccgccgcgagcccggagagctgccgcgacgacggcgggcgcggcggcgccgtcttggggctcttcttgacggggaagacggaggggtggatggacgccagcagcgcggcggcctcgttgtacgcctggttcggccgcttccgcggcgcgcgcgcccgcttcagcgacacggacgtcgccgacgacgacgcgttggacgcctccgacagcgtcgacgacggcgacgagtgcaccgggcgcagcggcgacgagtgcgcgcccggcgacgccgccgccttcaccatgtccaggtccagccgcaggcccgtcggcatgcaggaagacgacattgcaccggctcaacggcaacagctgtaaccgttcaaacgatcgccttcgccttcgttttctcggaagggaaatggagcagctccagcctccagctacccttggattaattccacgaccatgaatccaagaacactggggcaagaatggctgaacaacctaatcgatcaagccctttcctcctccccaaaaaagcctaacattcaagaaacccaaacactttggcagttgcctccacctggggcaccaacaacaccttgggag

SEQ ID NO: 54020 - DNA, 1759 bp, Zea Mays
tccagggcttgccgaagaagagacgggctcctaacaaacctcccctgcaagaaaccacagcaggaacagagaaacacagagcacgtcagcgcctcagaaccttcggcctttacgacgaactgcaatactgcgtcatcaggatgaacttttttttttctctccctttggtgttgagtgttttctggggccttacggacacatcttttacgctctttctaatcagttctagtggtgcttgccttcatccgaggccggcagtcggcgttcaccttgcgcacctggtaccggatcttcttggagaagagccgggtgcgcctcttctccttgtaccgcagcacgctggcctccctgacgccgccggcgccggcgccggcttcgttctccggaaacaggtccatgtctgagagcttggcctgtgatgacaagggtcaatgcaacgcagtgatcgtcagtaagagagagagttcccattcctcggtttcagagcttcagatggcgtgcaaattaagatattcaggaggaactttgcaaggctgttattacaccgtcgtcgtcaacgagaagtctctaatggaaaccacatgcttggtatgcccatactatataaagagctggctgtcttgtatgagtgacaggctccaaatacgcatgcatgtggccacagagcaaattgcagaacggccaaggccgccaagccaaccgagttggggctagcagcgtttgttgcgattgctctatcgtttggttggcccaagggccaccaaaaaaccgagcccaaaacgacccttttctagaggacaggacaggcagacctgttgttgtgcttggcaccagatctccaggctctactgtctgtggtccactgttgaatgattgagtttaactagccatatataaccaaatagaatggctggtttggattattcccttatctaacagaattacattgaactaatagagcagaaagtagttcatccaaatttgaaaaattgttcttgctgagacctaagagcaacgtcaagagactatctatattcttccttatgaatagagtttttttttaaatatcatccaacaacttatttaaatggctatccaaatatagtcttcttttgttccagatttctcacgataaagatagaaaatatgaatgactctctagagcgcaaacaatgtatagaaaagctgttgaagattggaaatataaacaacatatagaaaagatgttggagactaaaaagatatacaaagtgatttttatgtaaataactctccaaatgataatttagaaagtgaaatttataaagactatccgacatactctaagcgtctaaggttcactattttctatattttcttccccggtaaataaaaaactcaatattttatctcgataacttttttttctacgggttactgcagtaccgctgatgttctgaaaaagacgtgtactcgctgatacgtagcagtgcagtactgcacagtactttatgcgagggaccatccatttagataaacagtccctctggtttacttgttcgaaggaagcaattcacaattccagatttttttaccactgcgagccttgtcaccgcaaattatagattgcttcaaattttctatgcgtggtttttactatacatctaaaatttgtttagaaatccaaatttttaaacgaaagaacactggagatgcatgcagacggtacccaattgttacacttacccgcgcttcggcgaccgatgtcggcgactccggc

SEQ ID NO: 54021 - DNA, 1196 bp, Zea Mays
ctttagatgtttacatattttagcttatgttactgacttgctcgagccagatctcccactccaaatgatatgtcaattgctccgaggactcaaatatctccattcagcagaaatactccacagagacctaaaacctggaaacctgctggtgaatgcaaattgtgatctgaagatatgtgattttggtctcgcacgtacaaacagtagcaaaggccagttcatgactgaatacgtcgtcacccgctggtacagagctcctgagctgctcctctgctgcgacaactacggcacatccatagacgtctggtctgttgggtgcatctttgctgagctccttggccgcaagccaatatttccaggaactgaatgcctgaatcaactcaagctcatagtgaacgtcctcggcaccatgagtgaggctgacctagagttcatcgacaacccaaaggctcggagatacatcaagtcccttccctatacccctggtgttcccctcgtaagtatgtacccacatgcgcaccctcttgccattgatctgttgcagaagatgctcatcttcgaccccaccaaaaggatcagtgtcaccgaggctctcgagcacccttacatgtcccctctgtatgatccaagcgcaaatcccccagcccaagtgcccatcgatctggacatagacgaaaacatcagctcagagatgatccgggaaatgatgtggcaggagatgcttcactaccaccctgaagttgccacagcaataagcatgtcatgagagattccacagcccccaggacatcagcgggggctcacctcttctttttttgtctttgataaaagcctactgcgagtagccgattattgcggcacctagctgttatagtacacttaatgtctgcttggaaccaattatggcgcctagctgttgtagtacccttaatgtctgcttggacacttccgcttgtgtaaatacgcgcccaataagagcggcgtatggatagatgctgtcactatggaccattacttgttgtatgcactgtatatctgtggactgttgtggtgttgtattagttcatgaaccatgaagctttgaagtaaaaatcccatgcatgttaagtttgtatgcttccctacctcttcttttgttaactctgttttctccaggagacacatcgtacatttgtaaaaaaaaaaacaagaaaaaa

SEQ ID NO: 54022 - DNA, 1902 bp, Zea Mays
ctgccccgccgcgccccctcgcgtccgttcctcccttcctttccgtgtcggtctccggcgcgcccgacgtagcgcccgcatccgacggccgtgggggcatcgacggccgggcgacgcgacgcgatgtgaccatgacccgtcagtcagcaggtcagaatattcctcccctctcccggtcctccccacccccatccctcctcacggtcacggcacgggactcgcctccccccctcctcttcctcccctcccgcccacggctggaggtgctcacagcgagcggagcggaggcgagggattcggccgcgcgcatggcgacgcctctctgaccgaagctgctccacccactcggccagtacaaaatggcgatgatggtggatcctccgaatggaatcgggaaccaaggaaagcattactactcaatgtggcagaccttatttgagatagacaccaaatatgtaccgatcaagcccattggtcgaggagcttatgggatagtttgttcatccattaatcgtgaaacaaatgagaaagtagcaataaagaagatacacaacgttttcgacaaccgtgtggatgcactacggaccttgcgggagctgaaactccttcgccatctccggcatgagaatgtcattgctttgaaggatataatgatgccaatacacaggagaagctttaaggatgtgtacttggtatacgaactcatggatactgatttgcaccagataatcaaatcacctcagggcctttccaatgaccactgccagtattttctttttcagttgctccgaggactcaaatatctccattcagcagaaatactccacagagacctaaaacctggaaacctgctggtgaatgcaaattgtgatctgaagatatgtgattttggtctcgcacgtacaaacagtagcaaaggccagttcatgactgaatacgtcgtcacccgctggtacagagctcctgagctgctcctctgctgcgacaactacggcacatccatagacgtctggtctgttgggtgcatctttgctgagctccttggccgcaagccaatatttccaggaactgaatgcctgaatcaactcaagctcatagtgaacgtcctcggcaccatgagtgaggctgacctagagttcatcgacaacccaaaggctcggagatacatcaagtcccttccctatacccctggtgttcccctcgtaagtatgtacccacatgcgcaccctcttgccattgatctgttgcagaagatgctcatcttcgaccccaccaaaaggatcagtgtcaccgaggctctcgagcacccttacatgtcccctctgtatgatccaagcgcaaatcccccagcccaagtgcccatcgatctggacatagacgaaaacatcagctcagagatgatccgggaaatgatgtggcaggagatgcttcactaccaccctgaagttgccacagcaataagcatgtcatgagagattccacagcccccaggacatcagcgggggctcacctcttctttttttgtctttgataaaagcctactgcgagtagccgattattgcggcacctagctgttatagtacacttaatgtctgcttggaaccaattatggcgcctagctgttgtagtacccttaatgtctgcttggacacttccgcttgtgtaaatacgcgcccaataagagcggcgtatggatagatgctgtcactatggaccattacttgttgtatgcactgtatatctgtggactgttgtggtgttgtattagttcatgaaccatgaagctttgaagtaaaaatcccatgcatgttaagtttgtatgcttccctacctcttcttttgttaactctgttttctccaggagacacatcgtacatttgtaaaaaaaaaaacaagaaaaaa

SEQ ID NO: 54023 - DNA, 1222 bp, Zea Mays
ctgccccgccgcgccccctcgcgtccgttcctcccttcctttccgtgtcggtctccggcgcgcccgacgtagcgcccgcatccgacggccgtgggggcatcgacggccgggcgacgcgacgcgatgtgaccatgacccgtcagtcagcagttgctccgaggactcaaatatctccattcagcagaaatactccacagagacctaaaacctggaaacctgctggtgaatgcaaattgtgatctgaagatatgtgattttggtctcgcacgtacaaacagtagcaaaggccagttcatgactgaatacgtcgtcacccgctggtacagagctcctgagctgctcctctgctgcgacaactacggcacatccatagacgtctggtctgttgggtgcatctttgctgagctccttggccgcaagccaatatttccaggaactgaatgcctgaatcaactcaagctcatagtgaacgtcctcggcaccatgagtgaggctgacctagagttcatcgacaacccaaaggctcggagatacatcaagtcccttccctatacccctggtgttcccctcgtaagtatgtacccacatgcgcaccctcttgccattgatctgttgcagaagatgctcatcttcgaccccaccaaaaggatcagtgtcaccgaggctctcgagcacccttacatgtcccctctgtatgatccaagcgcaaatcccccagcccaagtgcccatcgatctggacatagacgaaaacatcagctcagagatgatccgggaaatgatgtggcaggagatgcttcactaccaccctgaagttgccacagcaataagcatgtcatgagagattccacagcccccaggacatcagcgggggctcacctcttctttttttgtctttgataaaagcctactgcgagtagccgattattgcggcacctagctgttgtagtacccttaatgtctgcttggacacttccgcttgtgtaaatacgcgcccaataagagcggcgtatggatagatgctgtcactatggaccattacttgttgtatgcactgtatatctgtggactgttgtggtgttgtattagttcatgaaccatgaagctttgaagtaaaaatcccatgcatgttaagtttgtatgcttccctacctcttcttttgttaactctgttttctccaggagacacatcgtacatttgtaaaaaaaaaaacaagaaaaaa

SEQ ID NO: 54024 - DNA, 1630 bp, Zea Mays
aaatactctcgtccatgcttatctggtcgcgagggcgcggaccattcaggctacagggttagaccgtccaatcgtaatcagtacaaaatggcgatgatggtggatcctccgaatggaatcgggaaccaaggaaagcattactactcaatgtggcagaccttatttgagatagacaccaaatatgtaccgatcaagcccattggtcgaggagcttatgggatagtttgttcatccattaatcgtgaaacaaatgagaaagtagcaataaagaagatacacaacgttttcgacaaccgtgtggatgcactacggaccttgcgggagctgaaactccttcgccatctccggcatgagaatgtcattgctttgaaggatataatgatgccaatacacaggagaagctttaaggatgtgtacttggtatacgaactcatggatactgatttgcaccagataatcaaatcacctcagggcctttccaatgaccactgccagtattttctttttcagttgctccgaggactcaaatatctccattcagcagaaatactccacagagacctaaaacctggaaacctgctggtgaatgcaaattgtgatctgaagatatgtgattttggtctcgcacgtacaaacagtagcaaaggccagttcatgactgaatacgtcgtcacccgctggtacagagctcctgagctgctcctctgctgcgacaactacggcacatccatagacgtctggtctgttgggtgcatctttgctgagctccttggccgcaagccaatatttccaggaactgaatgcctgaatcaactcaagctcatagtgaacgtcctcggcaccatgagtgaggctgacctagagttcatcgacaacccaaaggctcggagatacatcaagtcccttccctatacccctggtgttcccctcgtaagtatgtacccacatgcgcaccctcttgccattgatctgttgcagaagatgctcatcttcgaccccaccaaaaggatcagtgtcaccgaggctctcgagcacccttacatgtcccctctgtatgatccaagcgcaaatcccccagcccaagtgcccatcgatctggacatagacgaaaacatcagctcagagatgatccgggaaatgatgtggcaggagatgcttcactaccaccctgaagttgccacagcaataagcatgtcatgagagattccacagcccccaggacatcagcgggggctcacctcttctttttttgtctttgataaaagcctactgcgagtagccgattattgcggcacctagctgttatagtacacttaatgtctgcttggaaccaattatggcgcctagctgttgtagtacccttaatgtctgcttggacacttccgcttgtgtaaatacgcgcccaataagagcggcgtatggatagatgctgtcactatggaccattacttgttgtatgcactgtatatctgtggactgttgtggtgttgtattagttcatgaaccatgaagctttgaagtaaaaatcccatgcatgttaagtttgtatgcttccctacctcttcttttgttaactctgttttctccaggagacacatcgtacatttgtaaaaaaaaaaacaagaaaaaa

SEQ ID NO: 54025 - DNA, 1567 bp, Zea Mays
acggttatttcgtatcagcaatagcatacgccccacgtccccacgcggccacgccttctttcctctctgcccccaccacgaaactccacgacgacgcgtccgcgcaccaggcaggcacgaccaccaccgtggcaccgtccaccggagccgagcaacgcgaggagttgagccgatggaggtggcgtcgggggatgaggatctggaatcgctgctccagaacttccatcgcgtgtcccaggggtacaaagatgcacttatgcaggtccaggttttaagagtaaattgcagcactgagttcaaaaggcgggaagctcttgaatcacatattacagatcttaagaaagataatgagcggttaagaaggcaatacacagaaactttattcaaggtcaccaaccaggtgaaattccgcgcagaagctcaaagcctgaaggaagagctggacaaggcaaatagtagattgttatccatggaagaggaacacaagagggaaactgagcaacttaagcacagcagtgaaatgaacatcaatgccctggagaacaagctcagctaccgactttcactgcaatcagccacgcccttgtacagcaagcaagagatgaagctgcaatgaagcaactgaagttggagctgagtgcccataaatctcacatcgacatgttaggtagcaggttggagcaggttactaatgacgtgcattcgcagtataaaaatgagatccaggatttgagggatgtggtttctgttgaacaagaggagaaaaaggacattcacaggaagcttcagaatgtggaaaacgagtgtatgttcgagctgaattggtgaactgaaaaaaaaaagaagatgagtttctgcaaacagcagacgtcatgaaccaattcaaacaggaaaacaaaaacatgattcgtatccccaacatgcttattaagtagcgttccatgggcttgcctttcagttctgaaaagggaacacaaaatatgaaccaccaaccccttgtctgatcttcagaaagtagcaaaattttccttatcagtgcattgcttcttggtggccttaacatgttctctaatgatgcagtgaggatcacgaggatgaagcaggcggagcagcaaagggattctgtctcggtccagcacgtggagacgctgaagcagaaggtcatgaggctccggaaggagaacgagtccctgaagaggaggctggcgagctctgaagtctgaactggagtgcacatgaaaactgcaactgctttccttcacgccgtagttttatctcatactgtaggatgtagaaaaatccactgctccaaaaacacatatcacttccagatgctttaaaactagcaatgataggtatgttttcactgaaagttattatcaccaatcgacacactcataaccttttcatatgaaattatataaagataaactctatgtccaagatatagagttcaaagaactttttagttgacaacattttcatataagacaatttggatgttcgaatattcaatataaagatcacatgcctattaaactatcttgggtaaaaaatataatcaaca

SEQ ID NO: 54026 - DNA, 633 bp, Zea Mays
atttgctcagagaacagcctgaagaagtgaagatctcaatgaactcaacgcaatgttctcaaagcctctgaaagagcttttgtcaactgatgaaggagaggtagacgatgttgctcttatttcaatggacagcaaaggtatcgatatccgtgtccgacaaggtgcacagttcaacatacagagggtgccctttgaggtggatcacagcgtcgaaacactggatgaagccactgaagcgctcaggaggataatcagcaagtctaggtggcacacaaagagctcagtcataggacgcccttgaaagctgaagctggaggctctatagaacagtttgtacagtgcggcagcagtctctactatggtatgtgccaataagaggaactccgttccagagtttcgtctactgccaagggcctcgtgtttgtgggtgggttgaataaacacgcaatttgagatgacgctgttttgaccatgaatttagattgaacgcacaacggcaaaaaggattttatgtgaagttgtcgatgggttgaaaaagatgtgaccatctctgacggtctgacctgcttcattcatgaggaattgaggataaagcacatttgaacatgcgcatgccattttgtttttaccaaa

SEQ ID NO: 54027 - DNA, 2191 bp, Zea Mays
gtttattttcacttagaaaaatagaaatcacttggtgaaataaggttccaaactagaacttaaaaaaatagagttctaaaactagccctgaccctgattattgaatgaccattgtaccggtaaccatttataatcgtacacccaaaagaatcagacagatacccgttcacccctcgctctcgctgccacttctcccgttcggcctctttttccttccaccaatggaagctctcacagcccgctcctccgtactctcgccgccggggattgccggagacacctcgccctcccttcccctgcccctccgccgagcctccgccgcgtttcttgggcctcgcaggagcccctccgccctcgccatctccacgcgctggctgcgcgctccgcctcgacgcggcggccgcctgctcgcgggggaaggggaagaagtgccccccgaccccgccgatgacgcggctggccgggcggaagattttctagtactcgagaataatgtaactctacgccaaagcaatgacatggataccattaaacatgatgatgctggcacttctggaattggtgggagtaacactggtggctctaggactggcctattcagaacacctatttcaggtggtgtgcacagtgcaactgctgttcatgatttaccaccaccagctttggctgttcgcaacctcatggaacaggcaaggtttgctcatctgtgcactgtaatgtctcggatgcatcaccgccgtgagggatacccattcggttccctagtagattttgcacctgacccatttggccacccgatcttctcattatccccactagctatccacacaagaaatttgttggcagacccaagatgcacccttgttgtacaggttcctggatggagtgggctatcaaatgcacgagtaactatctttggcgatgtcattccgttgcccactgaacaacaggtttgcactaaaatcactactgatgttatctcttttcctgaataccatctctcacaatgccatgtcacttaattcagtaaattttgtgtttgatatttacactatgaagctatttctggacatgtgtgctatattgccattatttcgttcatatctgaactatgtactgcagaaagctaacccctgctggcttcagcaggctatatgatggtcatacatggaatgaacaaaataaactcaaaatcaagccacctatttgaacttgccttcagcttaagacatgccaaagttgaagtcacagttttttttcctacttatggttactaatccttatagctaccaatcaataggagtcaccctaactgaaaacctgccaaaaatgggggtaaaagactcatgaacatgagttaagcatctgggagttggagttttgtttcctatgaggaatgggctcatcagcagtatgtttcaaagcaccagcagtgggcatcccaacagtggggtaacttttactattacagaatgcacacaataagtgacatatatttcattggaggttttggtactgttgcttgggtagatgtgaacgaatatgaggctctgcaacctgacaagattgctatggatggaggggaacaaaatctgaaggaactcaacgcaatgttctcaaagcctctgaaagagcttttgtcaactgatgaaggagaggtagacgatgttgctcttatttcaatggacagcaaaggtatcgatatccgtgtccgacaaggtgcacagttcaacatacagagggtgccctttgaggtggatcacagcgtcgaaacactggatgaagccactgaagcgctcaggaggataatcagcaagtctaggtggcacacaaagagctcagtcataggacgcccttgaaagctgaagctggaggctctatagaacagtttgtacagtgcggcagcagtctctactatggtatgtgccaataagaggaactccgttccagagtttcgtctactgccaagggcctcgtgtttgtgggtgggttgaataaacacgcaatttgagatgacgctgttttgaccatgaatttagattgaacgcacaacggcaaaaaggattttatgtgaagttgtcgatgggttgaaaaagatgtgaccatctctgacggtctgacctgcttcattcatgaggaattgaggataaagcacatttgaacatgcgcatgccattttgtttttaccaaa

SEQ ID NO: 54028 - DNA, 9040 bp, Zea Mays
ccctcttcttcctcctcgtccctcccaaatccccgaacccgagcgcgcgactccctcccgcctcccagatcttccagaacccgctacgattcgggcaatccgccggcccgcgccctagtaggtctccgcgggcgggattggttgatgcctccccgcctcgcgtgaccgctgcccgagggctggaccggagatctccgcatggatcacaggggcggcggcggcggtggcggaaacaagaaccgcaccgatctcctcgctgcagggcggaagaagctgcagcagttccggaagaagaaggggaagcggggtcccggcaataaggccgacgccgatgctgacgcggaggccggggagggggcgcccaaggcggcggaggagtctgtgcccgagccgaaatcgcctgttgggttgaagctcctcgccggggagggcggcggcgggagcactccatttgaggaagcggagaggtctcaggcggagcagtgcaacggtgaggggcctggtaccgcggagtccagctctgtggagagttccaatgcggtgcaagaacaggagacggtgcaagagcaggagacggatgatgtctccgatgcacatcatgtcggtcctagtgagcaggggatttcggagcatcctgaaagccagacagctggtggcagggatctatcacttcaggctaccagtggagacagcattggtgatgataatgtaggacgagctcagctgggtgatgtggatagcatggagctgaatgcttcttctgaaggtaatggagcagatggtgattgcaatcaactaggggaacaccagcaggtggaaatggatgctgttgaaaggccaacaagttccagtttcgaagaattcaccgagttgccaattcattctcaaggcattgaagccgataatatccacggtgaaggggctcaggaaatggtgatggatgtttctgggaggccattagatggagacatacagcatgacatcgagcccacagcttctgctgaaatagatgccgagactgcacttgaagagtcaactgttgcagcttcaattgtgattcctgagagtactgcaagaggtactgagtacgaaagagacactgggtatgaaaccgatggagtagacaaagaggctctcctagaagatccaagcatggtgcatgtaagtgatgaagctgtcactatagatgatttgagtgttcaggccaagccaacagcatcagcggatatgccactttgtgagcagaagggggatccagctttatctagaagtgcggtattgcaaggcattatgccacttcacttcgaggatatacaaaatcatatgttctctgcaactctgtcaagggattttctccagttgcagctagatgaggctgctggcctttattcagattttacacaacagtcttctgacaataccacacagctccgggtactgctaaaagaaactgaagaaagcaaactagcagttgacagagagcttcatcaatgtagacatgagctctccaaggtgaacatagaaaaggggcaacttgaactgaccatggcttccttgaaagaagaaatcaacactagcaacacgaggtgcacatatttggagagtgagctacattcctccaaggagagcacagaacaaatccacagtgaactagctaacagcagattgttactggaagctctgcaaaaagagaacatggagcttactgcaagccttgcttttgagaaagaagccaaaaaagaagttgaagaacagcgggaccatctatcttctgataacaggaagcttttatcggagttgtcaggtcttgagcttagcttagcttctgtgaaagaggaaatggatgctagcagtagcagatgtaatgtttttgagtgtgagctgcgttcctccaatgagaatatgaatcatactttgacagagttggcaaattgccaggctttattggaaacattacagaaagataatttggagctgtctgcaaattctgcctccgaaagagaagcaaaaatgaaactccaagaagacaatttgtatctatgtaatgaaaagggcaagctttcttcaaatttacgtgaactaaatgacaagttggaagtttcgtatgccaagcataagcagcttgagtcacatgtcaaagatacagaaacatactttggacaacttaccgagcagctaattgaggaaaatctgtacacaagtattagcatcgatatttaccaatctacaaccaaagacttagacactaagtacaatattgtgctgggacaattccagaatattatgcgtcaagaacttcatttggactcgtctgaagtcactactgagaatgctgaaagagccattatgacccctagacatgatagccatggtaataatcagtgtttgcttaatctggtaaatgcgaatgactcatgtaactcaactgctttgctgtcgctgaagggccatctagaggtggcaaaaagtgatttgcataaccttgaaaagttgctagagaggatctcctctaggtctgatggacgtgttctggtatcaaaactcattaaatcctttgagtcaaagggaagtgacgatgatactggactgtctgagggggagcatgataatttacaaaagtcaactcgggagatgctatcatgcctaggggagaagtttatagcaatgagctcagatattacaaaaactgaagaatatttggctgaactgtgtaacaaaattgaactttacgtcaagtctactgtgcagcatgatagagatagacaatgtactgttgttcttgaggccaaaatggatgaacttgctggcaagctgagcaactacaaggagacaattgacaatctgcacaatcaggttgctattgtgcagcaggatgcaaacagtaatgctggaaagctcattgatcaagcagaactgttgcagaaggatgcggtagaaaggatttccattcttgagaatgagagaatgtctttatcagatttactcagtgaagtaacaaacaagctcacctctttgggagatgctgtatttcctagtggttccagtgaaattgaaggtctcaatttctgcactttgagctgtgtggaccttgttgctagatcatttcaaagtcttcaggagaaattagaggctgctcaaatagataatgctcagctcaatagttctctggtggagctcaggaaggcaattggtgttgctcaagagaggagtgaacatgcagatggaattgtcaagaaactgtatgattccctacaggaacttctatgtgattcacttggaagttcaaatgaatttggggccagatatagtgttgaggaaccaattgaaagtcaatatggaagactcattgcgcatttaaagaatttgttgcatgaccaccattccgcgctgtcaactaatgctgaacttgagttgagtctgttaagtaaatgtgaagaagttgaggagctcaacatgagatgcagttctctattaaaaaaattggatgaagtttgtattctaaatgaggagcttaagtcagcttcttcaagtaaaaacgtcacactggataaactacacagtagatgccttactgtagcagaaatgttggcttcatgctcagcaaatcattcctcgacagttcagttgatatctgatattggtgaaggatctagcaaggaagatcatattcttaccacccttctcccatgcattgaggcggacgtggcttcatgcatcgagaaatttgaaaatgcagctgaagaaatccgtttgtctaagatatgcttgcaagaaatcagcatatttgaccagatttcatttgaaaaatggtcttaccccttgcccacattgattaaagaggaagttttaccaaagatatgtgatttgcaagacagattcgaccagctcaatgcactaaacattcagctggaaactgaagttgcagtcctcaaggatggcatgaaagagctggatgaagatcttggaacttcgcgatctgagcttcagaaaaaggtttctgaacttgaacagttagatcagaaattttcatctgtgaaggaaaaacttagtattgctgttgcaaaaggtaaaggtttgatagtgcagcgtgacagccttaagcagtctttgctggagaagtctggtgagatcgagaaactcacacaagaactgcagttaaaggaaacattgctgaaagagttggaagccaaactcaaatcctatacagaagcagatcgaattgaagccttggaatcggagctgtcatacataaggaattcagctacagctctaagggattcatttcttctaaaagactctgttcttcagagaattgaagaggtcttagaagaactagatttgccagagcaatttcattctcgagatattgttgaaaaaatagaactgctgtcaaagatggccattggcactcctttcactctacctgatggtgataagggatcctctgttgatgggcattctgagtctggtgtggctatgaatgtcatagacgatgagcagaactcaaattcaaattcagtatctgatgaagtaaagagcaaatatgaggaactgaataggagattctgtgagctggctgaacagaacaatatgctggaacaatctctagtggagaggaacagtcttatacagaaatgggaagaagtccttggccaaattagcatccccccacagttcaggatgttggaagcagaagataagttagcatggttaggaaacagattcttggaggtggaacaggagagagattcattacagttgaagattgagcatcttgaggattcctcagaaatgcttattgctgatctagaagagtcacataaaaggatatctgaactcagtgcagaggtggttgctataaaggctgagaaggatttcttttcacaaagcctagagaaactgagatttgagttccttgggctctctgagaaagttgttcaagatgagtttgttagagataaattgcgaatggatctatctgaactgcgggataagttcgctgaaaaaaccgaggagagcaggcactaccatgaaatggacaccgaggtccacaaactgctgaatttggtgcaaaacacattgcaggatagcactaactctgaaatttcatctggaggcatttctgctgtgttgtgcttgggcaaaatgctgaagaaacttttagatgactatggcactcttctgtacaagtcgactgaaggcaattttgccgagagagacattcagttagaggatatcaagccatctaaggatgcctctaaatcggacactggtgcatacgagaaagagatggaactaaattctttaaataacgagttagatcatgctcacaacaatctggccttagcgcaacaggagtgtgatgaagctgtggagaaggcacaatcactaatgatggaaattgagaccttacatgctcaaataagtaaattgcaggaaagtgatgctgaacaaatgcaaaagaaagagatggaactaaattctttaaataacgagttagatcatgctcgtaacaatctggccttagtggagcaggagcgtgatgaagctgtggagaaggcacaatcactaatgatggaaattgagaccttacatgctcaaataagtaaattgcaggaaagtgatgctgaacagatgcaaaaatatcagtcgcttgtccttgaactagaaagtgtgggtaagcaacgggacaatctacaggagcggttaaatcaggaggagcaaaagtgtgcctcattgagggagaaactaaatgttgctgtcagaaaagggaagggtctagtgcaacacagagacagcttgaagcaaactatggaagagatgaatgtagtgatagagaaacttaaaagtgaaagaaaacagcacatagaatcacttgagaccgagaaatcatcgttaatggatcgattggctgagaatgaaaagagcttgcatgaaacaaaccagtacttgagtggactattaaatgctttaaatagagtggatgttgctcgggaatttgatatggatccaatcaccaaggttgaaaagatggctaaatttttccttgacctacagtcaacagtggcttcatcgcaaaacgaagtgatgaaatcaaaacgagcaacagagctgcttcttgctgagttaaatgaagctcatgaaagggctgacaacctgcaggaggaattggtcaaggcagaagctgcactttctgaatcttctaaacaatacattgttacagaatctgcaagagctgatgctgttcgtcagcttgaacttattatgcatgcacagtcacaaacaaggaggaggcaagcagatcatttgctggagttaaactccaccagcagtcaactaagagaagtctgctttgaactttcacactgtcttgttaatacattcagtaaggatgtggaccttatctgctatgtggtgaacttcatgaggtcttctggtaaattgatggatgacacaaatacgatggacataccgattgcctctaaacatgttttgtccaaccgcacaaacaacaagaaggctcatattccaaatgctcctttggaaattaagacggatgatacggatgacagtcagtttttgcatcatcttgctattgcatgccatgctttatctgattgtgttaaggactgtaatgatctcaaaagaaacattgatgagcatgacttttcagttgaacagaaagcaaccgagctatttgatgttatgtccaccttaaagaataggttcacttctcagcataatgagttggaatctttgagagcaaaatttgttgaactacagtcagagatggaagaaagagacaaggagattatatttgcacaaaggaatatgagcttgctatatgaagcatgcgcaagttcagttgctgagattgaaggaattagtgatatatatcctggtaaacacagctatgctgttgaacattctgcagatgaatgtataaaatcaatcgttgaacagttagttatggctgtaaaaacttctcagaacagtaacgaaggtagcacaaaggagctgaaggctattgttcttgagttgcagcaggagcttcaagctaaagatgtccaaattagcacaatcagttctgatctatcatatcagttaagggtggctgaatcttctgcaaagcagttctcagttgatcttgaagatgcaagaatggagctccaaaatttggagaaacaagttgatgtgttgcagaatcagaagaaggatttagagactcaattaaatgagcttaaaaatatggaatcaatggcaagtgaacaacatggaagaattgagaaattgactgatgaattaagcagaaaagatcaagaaattgaaggtttggtgcaagcactcgatgaagaagaaaaagagcttgaaatcttggagaataaaagccttcagttggagcaaatgctgcaagagaaagaatttgccttgaagacctcagaagtttctaggaccaaagctttggcaaaacttgcaacgactgttgacaaatttgatgagctgcatagcttgtctgagaaccttcttgctgaagtggaaaaccttcagttgcaattgcaagaaagagattctgagatctcatttctgcgaaaagaagttacaaaaagcactaatgaactgctaaccactgaagagagcaacaaaaattattcatctcagctaaatggtttcatgaagtggttagaaagagaactgttgcagttcggcttccattctgagagtgccaatgattatgattacactcaatttcctgtctatatggatatgttggacaaaaaaataggatctctgatagccgaatcagatgatttaagggttacagttcaaagcaaagattctttactacaggttgagagggccaaaattgaggagttgatgcgtaaatcagatggtctagaagcttcattgagccaaaaggattcccagatagggttacttcgccgggacagagcatccaatcagcagagcagatctataaatttgcctggcacttcagagattgagcaaatgaatgacaaagtaagcccagctgcagttgtcactcagattcgaggcgcacgaaaagtcatcaatgaccaagttgctattgatgtagagatggagaaggacaagccttttgatgatgaagatgatgacaaagggtctcaggcgatagattgctcatgaggcaaccgaccttaagactcggcgtcttgatatattggattgcactgcatgctttgcttgctagttttatttgaactctgtaaagccatctcctggcgagtgactgtacagtactctgtgtctatagcaagttatatctaaacagaagcagtttgcactgataccgtgattcctttcgaaaatgttaccgaatacttgagccgtattggcagctgcagaaatcttcatgatgcattttcacccttcatcctggtgcaaatcctgtctagcttagtttgtgttcaattgatacaaatggatggaagagaactgaaggaagcagcagcaaagaaccccctgtacatacatttttgtttgctctattctttgcttttagaaaaaagatggagggcattctacatgctagcgactacttactacactatatgatacaggattacagggaagtgacatgtagttttggaagttagggttttgggatggtagcaggtcatcccctcccttgagttggccccctcaatcccatcatgccttctaatctttttcgtttacatgtataacacagtgattatatcatttattgtaatccacatagtgtgcaatgggggagcttgcacattttattaacgtcaagtgaagcctgagtgctgaaagttcatgtcaggtctgatttggggagtgcgttgagccctggcgtatgctgtgaggcttcagcggttgttttgctactgttgccgccaaaaatcaaatgacgaaatattcttcaaaatttgttgggttatataatctggacagattataatctccaacaaacaccatcttaataaacacccccttaatggctaacactaaataaacaacagttactgctcac

SEQ ID NO: 54029 - DNA, 9056 bp, Zea Mays
gtcgattcctccctcttcttcctcctcgtccctcccaaatccccgaacccgagcgcgcgactccctcccgcctcccagatcttccagaacccgctacgattcgggcaatccgccggcccgcgccctagtaggtctccgcgggcgggattggttgatgcctccccgcctcgcgtgaccgctgcccgagggctggaccggagatctccgcatggatcacaggggcggcggcggcggtggcggaaacaagaaccgcaccgatctcctcgctgcagggcggaagaagctgcagcagttccggaagaagaaggggaagcggggtcccggcaataaggccgacgccgatgctgacgcggaggccggggagggggcgcccaaggcggcggaggagtctgtgcccgagccgaaatcgcctgttgggttgaagctcctcgccggggagggcggcggcgggagcactccatttgaggaagcggagaggtctcaggcggagcagtgcaacggtgaggggcctggtaccgcggagtccagctctgtggagagttccaatgcggtgcaagaacaggagacggtgcaagagcaggagacggatgatgtctccgatgcacatcatgtcggtcctagtgagcaggggatttcggagcatcctgaaagccagacagctggtggcagggatctatcacttcaggctaccagtggagacagcattggtgatgataatgtaggacgagctcagctgggtgatgtggatagcatggagctgaatgcttcttctgaaggtaatggagcagatggtgattgcaatcaactaggggaacaccagcaggtggaaatggatgctgttgaaaggccaacaagttccagtttcgaagaattcaccgagttgccaattcattctcaaggcattgaagccgataatatccacggtgaaggggctcaggaaatggtgatggatgtttctgggaggccattagatggagacatacagcatgacatcgagcccacagcttctgctgaaatagatgccgagactgcacttgaagagtcaactgttgcagcttcaattgtgattcctgagagtactgcaagaggtactgagtacgaaagagacactgggtatgaaaccgatggagtagacaaagaggctctcctagaagatccaagcatggtgcatgtaagtgatgaagctgtcactatagatgatttgagtgttcaggccaagccaacagcatcagcggatatgccactttgtgagcagaagggggatccagctttatctagaagtgcggtattgcaaggcattatgccacttcacttcgaggatatacaaaatcatatgttctctgcaactctgtcaagggattttctccagttgcagctagatgaggctgctggcctttattcagattttacacaacagtcttctgacaataccacacagctccgggtactgctaaaagaaactgaagaaagcaaactagcagttgacagagagcttcatcaatgtagacatgagctctccaaggtgaacatagaaaaggggcaacttgaactgaccatggcttccttgaaagaagaaatcaacactagcaacacgaggtgcacatatttggagagtgagctacattcctccaaggagagcacagaacaaatccacagtgaactagctaacagcagattgttactggaagctctgcaaaaagagaacatggagcttactgcaagccttgcttttgagaaagaagccaaaaaagaagttgaagaacagcgggaccatctatcttctgataacaggaagcttttatcggagttgtcaggtcttgagcttagcttagcttctgtgaaagaggaaatggatgctagcagtagcagatgtaatgtttttgagtgtgagctgcgttcctccaatgagaatatgaatcatactttgacagagttggcaaattgccaggctttattggaaacattacagaaagataatttggagctgtctgcaaattctgcctccgaaagagaagcaaaaatgaaactccaagaagacaatttgtatctatgtaatgaaaagggcaagctttcttcaaatttacgtgaactaaatgacaagttggaagtttcgtatgccaagcataagcagcttgagtcacatgtcaaagatacagaaacatactttggacaacttaccgagcagctaattgaggaaaatctgtacacaagtattagcatcgatatttaccaatctacaaccaaagacttagacactaagtacaatattgtgctgggacaattccagaatattatgcgtcaagaacttcatttggactcgtctgaagtcactactgagaatgctgaaagagccattatgacccctagacatgatagccatggtaataatcagtgtttgcttaatctggtaaatgcgaatgactcatgtaactcaactgctttgctgtcgctgaagggccatctagaggtggcaaaaagtgatttgcataaccttgaaaagttgctagagaggatctcctctaggtctgatggacgtgttctggtatcaaaactcattaaatcctttgagtcaaagggaagtgacgatgatactggactgtctgagggggagcatgataatttacaaaagtcaactcgggagatgctatcatgcctaggggagaagtttatagcaatgagctcagatattacaaaaactgaagaatatttggctgaactgtgtaacaaaattgaactttacgtcaagtctactgtgcagcatgatagagatagacaatgtactgttgttcttgaggccaaaatggatgaacttgctggcaagctgagcaactacaaggagacaattgacaatctgcacaatcaggttgctattgtgcagcaggatgcaaacagtaatgctggaaagctcattgatcaagcagaactgttgcagaaggatgcggtagaaaggatttccattcttgagaatgagagaatgtctttatcagatttactcagtgaagtaacaaacaagctcacctctttgggagatgctgtatttcctagtggttccagtgaaattgaaggtctcaatttctgcactttgagctgtgtggaccttgttgctagatcatttcaaagtcttcaggagaaattagaggctgctcaaatagataatgctcagctcaatagttctctggtggagctcaggaaggcaattggtgttgctcaagagaggagtgaacatgcagatggaattgtcaagaaactgtatgattccctacaggaacttctatgtgattcacttggaagttcaaatgaatttggggccagatatagtgttgaggaaccaattgaaagtcaatatggaagactcattgcgcatttaaagaatttgttgcatgaccaccattccgcgctgtcaactaatgctgaacttgagttgagtctgttaagtaaatgtgaagaagttgaggagctcaacatgagatgcagttctctattaaaaaaattggatgaagtttgtattctaaatgaggagcttaagtcagcttcttcaagtaaaaacgtcacactggataaactacacagtagatgccttactgtagcagaaatgttggcttcatgctcagcaaatcattcctcgacagttcagttgatatctgatattggtgaaggatctagcaaggaagatcatattcttaccacccttctcccatgcattgaggcggacgtggcttcatgcatcgagaaatttgaaaatgcagctgaagaaatccgtttgtctaagatatgcttgcaagaaatcagcatatttgaccagatttcatttgaaaaatggtcttaccccttgcccacattgattaaagaggaagttttaccaaagatatgtgatttgcaagacagattcgaccagctcaatgcactaaacattcagctggaaactgaagttgcagtcctcaaggatggcatgaaagagctggatgaagatcttggaacttcgcgatctgagcttcagaaaaaggtttctgaacttgaacagttagatcagaaattttcatctgtgaaggaaaaacttagtattgctgttgcaaaaggtaaaggtttgatagtgcagcgtgacagccttaagcagtctttgctggagaagtctggtgagatcgagaaactcacacaagaactgcagttaaaggaaacattgctgaaagagttggaagccaaactcaaatcctatacagaagcagatcgaattgaagccttggaatcggagctgtcatacataaggaattcagctacagctctaagggattcatttcttctaaaagactctgttcttcagagaattgaagaggtcttagaagaactagatttgccagagcaatttcattctcgagatattgttgaaaaaatagaactgctgtcaaagatggccattggcactcctttcactctacctgatggtgataagggatcctctgttgatgggcattctgagtctggtgtggctatgaatgtcatagacgatgagcagaactcaaattcaaattcagtatctgatgaagtaaagagcaaatatgaggaactgaataggagattctgtgagctggctgaacagaacaatatgctggaacaatctctagtggagaggaacagtcttatacagaaatgggaagaagtccttggccaaattagcatccccccacagttcaggatgttggaagcagaagataagttagcatggttaggaaacagattcttggaggtggaacaggagagagattcattacagttgaagattgagcatcttgaggattcctcagaaatgcttattgctgatctagaagagtcacataaaaggatatctgaactcagtgcagaggtggttgctataaaggctgagaaggatttcttttcacaaagcctagagaaactgagatttgagttccttgggctctctgagaaagttgttcaagatgagtttgttagagataaattgcgaatggatctatctgaactgcgggataagttcgctgaaaaaaccgaggagagcaggcactaccatgaaatggacaccgaggtccacaaactgctgaatttggtgcaaaacacattgcaggatagcactaactctgaaatttcatctggaggcatttctgctgtgttgtgcttgggcaaaatgctgaagaaacttttagatgactatggcactcttctgtacaagtcgactgaaggcaattttgccgagagagacattcagttagaggatatcaagccatctaaggatgcctctaaatcggacactggtgcatacgagaaagagatggaactaaattctttaaataacgagttagatcatgctcacaacaatctggccttagcgcaacaggagtgtgatgaagctgtggagaaggcacaatcactaatgatggaaattgagaccttacatgctcaaataagtaaattgcaggaaagtgatgctgaacaaatgcaaaagaaagagatggaactaaattctttaaataacgagttagatcatgctcgtaacaatctggccttagtggagcaggagcgtgatgaagctgtggagaaggcacaatcactaatgatggaaattgagaccttacatgctcaaataagtaaattgcaggaaagtgatgctgaacagatgcaaaaatatcagtcgcttgtccttgaactagaaagtgtgggtaagcaacgggacaatctacaggagcggttaaatcaggaggagcaaaagtgtgcctcattgagggagaaactaaatgttgctgtcagaaaagggaagggtctagtgcaacacagagacagcttgaagcaaactatggaagagatgaatgtagtgatagagaaacttaaaagtgaaagaaaacagcacatagaatcacttgagaccgagaaatcatcgttaatggatcgattggctgagaatgaaaagagcttgcatgaaacaaaccagtacttgagtggactattaaatgctttaaatagagtggatgttgctcgggaatttgatatggatccaatcaccaaggttgaaaagatggctaaatttttccttgacctacagtcaacagtggcttcatcgcaaaacgaagtgatgaaatcaaaacgagcaacagagctgcttcttgctgagttaaatgaagctcatgaaagggctgacaacctgcaggaggaattggtcaaggcagaagctgcactttctgaatcttctaaacaatacattgttacagaatctgcaagagctgatgctgttcgtcagcttgaacttattatgcatgcacagtcacaaacaaggaggaggcaagcagatcatttgctggagttaaactccaccagcagtcaactaagagaagtctgctttgaactttcacactgtcttgttaatacattcagtaaggatgtggaccttatctgctatgtggtgaacttcatgaggtcttctggtaaattgatggatgacacaaatacgatggacataccgattgcctctaaacatgttttgtccaaccgcacaaacaacaagaaggctcatattccaaatgctcctttggaaattaagacggatgatacggatgacagtcagtttttgcatcatcttgctattgcatgccatgctttatctgattgtgttaaggactgtaatgatctcaaaagaaacattgatgagcatgacttttcagttgaacagaaagcaaccgagctatttgatgttatgtccaccttaaagaataggttcacttctcagcataatgagttggaatctttgagagcaaaatttgttgaactacagtcagagatggaagaaagagacaaggagattatatttgcacaaaggaatatgagcttgctatatgaagcatgcgcaagttcagttgctgagattgaaggaattagtgatatatatcctggtaaacacagctatgctgttgaacattctgcagatgaatgtataaaatcaatcgttgaacagttagttatggctgtaaaaacttctcagaacagtaacgaaggtagcacaaaggagctgaaggctattgttcttgagttgcagcaggagcttcaagctaaagatgtccaaattagcacaatcagttctgatctatcatatcagttaagggtggctgaatcttctgcaaagcagttctcagttgatcttgaagatgcaagaatggagctccaaaatttggagaaacaagttgatgtgttgcagaatcagaagaaggatttagagactcaattaaatgagcttaaaaatatggaatcaatggcaagtgaacaacatggaagaattgagaaattgactgatgaattaagcagaaaagatcaagaaattgaaggtttggtgcaagcactcgatgaagaagaaaaagagcttgaaatcttggagaataaaagccttcagttggagcaaatgctgcaagagaaagaatttgccttgaagacctcagaagtttctaggaccaaagctttggcaaaacttgcaacgactgttgacaaatttgatgagctgcatagcttgtctgagaaccttcttgctgaagtggaaaaccttcagttgcaattgcaagaaagagattctgagatctcatttctgcgaaaagaagttacaaaaagcactaatgaactgctaaccactgaagagagcaacaaaaattattcatctcagctaaatggtttcatgaagtggttagaaagagaactgttgcagttcggcttccattctgagagtgccaatgattatgattacactcaatttcctgtctatatggatatgttggacaaaaaaataggatctctgatagccgaatcagatgatttaagggttacagttcaaagcaaagattctttactacaggttgagagggccaaaattgaggagttgatgcgtaaatcagatggtctagaagcttcattgagccaaaaggattcccagatagggttacttcgccgggacagagcatccaatcagcagagcagatctataaatttgcctggcacttcagagattgagcaaatgaatgacaaagtaagcccagctgcagttgtcactcagattcgaggcgcacgaaaagtcatcaatgaccaagttgctattgatgtagagatggagaaggacaagccttttgatgatgaagatgatgacaaagggtctcaggcgatagattgctcatgaggcaaccgaccttaagactcggcgtcttgatatattggattgcactgcatgctttgcttgctagttttatttgaactctgtaaagatgtagccatctcctggcgagtgactgtacagtactctgtgtctatagcaagttatatctaaacagaagcagtttgcactgataccgtgattcctttcgaaaatgttaccgaatacttgagccgtattggcagctgcagaaatcttcatgatgcattttcacccttcatcctggtgcaaatcctgtctagcttagtttgtgttcaattgatacaaatggatggaagagaactgaaggaagcagcagcaaagaaccccctgtacatacatttttgtttgctctattctttgcttttagaaaaaagatggagggcattctacatgctagcgactacttactacactatatgatacaggattacagggaagtgacatgtagttttggaagttagggttttgggatggtagcaggtcatcccctcccttgagttggccccctcaatcccatcatgccttctaatctttttcgtttacatgtataacacagtgattatatcatttattgtaatccacatagtgtgcaatgggggagcttgcacattttattaacgtcaagtgaagcctgagtgctgaaagttcatgtcaggtctgatttggggagtgcgttgagccctggcgtatgctgtgaggcttcagcggttgttttgctactgttgccgccaaaaatcaaatgacgaaatattcttcaaaatttgttgggttatataatctggacagattataatctccaacaaacaccatcttaataaacacccccttaatggctaacactaaataaacaacagttactgctcac

SEQ ID NO: 54030 - DNA, 9200 bp, Zea Mays
cagccacacaccaacccgacacggcgcgggcgcgggcgccggtccaaacccgaatctctcctgtcgattcctccctcttcttcctcctcgtccctcccaaatccccgaacccgagcgcgcgactccctcccgcctcccagatcttccagaacccgctacgattcgggcaatccgccggcccgcgccctagtaggtctccgcgggcgggattggttgatgcctccccgcctcgcgtgaccgctgcccgagggctggaccggagatctccgcatggatcacaggggcggcggcggcggtggcggaaacaagaaccgcaccgatctcctcgctgcagggcggaagaagctgcagcagttccggaagaagaaggggaagcggggtcccggcaataaggccgacgccgatgctgacgcggaggccggggagggggcgcccaaggcggcggaggagtctgtgcccgagccgaaatcgcctgttgggttgaagctcctcgccggggagggcggcggcgggagcactccatttgaggaagcggagaggtctcaggcggagcagtgcaacggtgaggggcctggtaccgcggagtccagctctgtggagagttccaatgcggtgcaagaacaggagacggtgcaagagcaggagacggatgatgtctccgatgcacatcatgtcggtcctagtgagcaggggatttcggagcatcctgaaagccagacagctggtggcagggatctatcacttcaggctaccagtggagacagcattggtgatgataatgtaggacgagctcagctgggtgatgtggatagcatggagctgaatgcttcttctgaaggtaatggagcagatggtgattgcaatcaactaggggaacaccagcaggtggaaatggatgctgttgaaaggccaacaagttccagtttcgaagaattcaccgagttgccaattcattctcaaggcattgaagccgataatatccacggtgaaggggctcaggaaatggtgatggatgtttctgggaggccattagatggagacatacagcatgacatcgagcccacagcttctgctgaaatagatgccgagactgcacttgaagagtcaactgttgcagcttcaattgtgattcctgagagtactgcaagaggtactgagtacgaaagagacactgggtatgaaaccgatggagtagacaaagaggctctcctagaagatccaagcatggtgcatgtaagtgatgaagctgtcactatagatgatttgagtgttcaggccaagccaacagcatcagcggatatgccactttgtgagcagaagggggatccagctttatctagaagtgcggtattgcaaggcattatgccacttcacttcgaggatatacaaaatcatatgttctctgcaactctgtcaagggattttctccagttgcagctagatgaggctgctggcctttattcagattttacacaacagtcttctgacaataccacacagctccgggtactgctaaaagaaactgaagaaagcaaactagcagttgacagagagcttcatcaatgtagacatgagctctccaaggtgaacatagaaaaggggcaacttgaactgaccatggcttccttgaaagaagaaatcaacactagcaacacgaggtgcacatatttggagagtgagctacattcctccaaggagagcacagaacaaatccacagtgaactagctaacagcagattgttactggaagctctgcaaaaagagaacatggagcttactgcaagccttgcttttgagaaagaagccaaaaaagaagttgaagaacagcgggaccatctatcttctgataacaggaagcttttatcggagttgtcaggtcttgagcttagcttagcttctgtgaaagaggaaatggatgctagcagtagcagatgtaatgtttttgagtgtgagctgcgttcctccaatgagaatatgaatcatactttgacagagttggcaaattgccaggctttattggaaacattacagaaagataatttggagctgtctgcaaattctgcctccgaaagagaagcaaaaatgaaactccaagaagacaatttgtatctatgtaatgaaaagggcaagctttcttcaaatttacgtgaactaaatgacaagttggaagtttcgtatgccaagcataagcagcttgagtcacatgtcaaagatacagaaacatactttggacaacttaccgagcagctaattgaggaaaatctgtacacaagtattagcatcgatatttaccaatctacaaccaaagacttagacactaagtacaatattgtgctgggacaattccagaatattatgcgtcaagaacttcatttggactcgtctgaagtcactactgagaatgctgaaagagccattatgacccctagacatgatagccatggtaataatcagtgtttgcttaatctggtaaatgcgaatgactcatgtaactcaactgctttgctgtcgctgaagggccatctagaggtggcaaaaagtgatttgcataaccttgaaaagttgctagagaggatctcctctaggtctgatggacgtgttctggtatcaaaactcattaaatcctttgagtcaaagggaagtgacgatgatactggactgtctgagggggagcatgataatttacaaaagtcaactcgggagatgctatcatgcctaggggagaagtttatagcaatgagctcagatattacaaaaactgaagaatatttggctgaactgtgtaacaaaattgaactttacgtcaagtctactgtgcagcatgatagagatagacaatgtactgttgttcttgaggccaaaatggatgaacttgctggcaagctgagcaactacaaggagacaattgacaatctgcacaatcaggttgctattgtgcagcaggatgcaaacagtaatgctggaaagctcattgatcaagcagaactgttgcagaaggatgcggtagaaaggatttccattcttgagaatgagagaatgtctttatcagatttactcagtgaagtaacaaacaagctcacctctttgggagatgctgtatttcctagtggttccagtgaaattgaaggtctcaatttctgcactttgagctgtgtggaccttgttgctagatcatttcaaagtcttcaggagaaattagaggctgctcaaatagataatgctcagctcaatagttctctggtggagctcaggaaggcaattggtgttgctcaagagaggagtgaacatgcagatggaattgtcaagaaactgtatgattccctacaggaacttctatgtgattcacttggaagttcaaatgaatttggggccagatatagtgttgaggaaccaattgaaagtcaatatggaagactcattgcgcatttaaagaatttgttgcatgaccaccattccgcgctgtcaactaatgctgaacttgagttgagtctgttaagtaaatgtgaagaagttgaggagctcaacatgagatgcagttctctattaaaaaaattggatgaagtttgtattctaaatgaggagcttaagtcagcttcttcaagtaaaaacgtcacactggataaactacacagtagatgccttactgtagcagaaatgttggcttcatgctcagcaaatcattcctcgacagttcagttgatatctgatattggtgaaggatctagcaaggaagatcatattcttaccacccttctcccatgcattgaggcggacgtggcttcatgcatcgagaaatttgaaaatgcagctgaagaaatccgtttgtctaagatatgcttgcaagaaatcagcatatttgaccagatttcatttgaaaaatggtcttaccccttgcccacattgattaaagaggaagttttaccaaagatatgtgatttgcaagacagattcgaccagctcaatgcactaaacattcagctggaaactgaagttgcagtcctcaaggatggcatgaaagagctggatgaagatcttggaacttcgcgatctgagcttcagaaaaaggtttctgaacttgaacagttagatcagaaattttcatctgtgaaggaaaaacttagtattgctgttgcaaaaggtaaaggtttgatagtgcagcgtgacagccttaagcagtctttgctggagaagtctggtgagatcgagaaactcacacaagaactgcagttaaaggaaacattgctgaaagagttggaagccaaactcaaatcctatacagaagcagatcgaattgaagccttggaatcggagctgtcatacataaggaattcagctacagctctaagggattcatttcttctaaaagactctgttcttcagagaattgaagaggtcttagaagaactagatttgccagagcaatttcattctcgagatattgttgaaaaaatagaactgctgtcaaagatggccattggcactcctttcactctacctgatggtgataagggatcctctgttgatgggcattctgagtctggtgtggctatgaatgtcatagacgatgagcagaactcaaattcaaattcagtatctgatgaagtaaagagcaaatatgaggaactgaataggagattctgtgagctggctgaacagaacaatatgctggaacaatctctagtggagaggaacagtcttatacagaaatgggaagaagtccttggccaaattagcatccccccacagttcaggatgttggaagcagaagataagttagcatggttaggaaacagattcttggaggtggaacaggagagagattcattacagttgaagattgagcatcttgaggattcctcagaaatgcttattgctgatctagaagagtcacataaaaggatatctgaactcagtgcagaggtggttgctataaaggctgagaaggatttcttttcacaaagcctagagaaactgagatttgagttccttgggctctctgagaaagttgttcaagatgagtttgttagagataaattgcgaatggatctatctgaactgcgggataagttcgctgaaaaaaccgaggagagcaggcactaccatgaaatggacaccgaggtccacaaactgctgaatttggtgcaaaacacattgcaggatagcactaactctgaaatttcatctggaggcatttctgctgtgttgtgcttgggcaaaatgctgaagaaacttttagatgactatggcactcttctgtacaagtcgactgaaggcaattttgccgagagagacattcagttagaggatatcaagccatctaaggatgcctctaaatcggacactggtgcatacgagaaagagatggaactaaattctttaaataacgagttagatcatgctcacaacaatctggccttagcgcaacaggagtgtgatgaagctgtggagaaggcacaatcactaatgatggaaattgagaccttacatgctcaaataagtaaattgcaggaaagtgatgctgaacaaatgcaaaagaaagagatggaactaaattctttaaataacgagttagatcatgctcgtaacaatctggccttagtggagcaggagcgtgatgaagctgtggagaaggcacaatcactaatgatggaaattgagaccttacatgctcaaataagtaaattgcaggaaagtgatgctgaacagatgcaaaaatatcagtcgcttgtccttgaactagaaagtgtgggtaagcaacgggacaatctacaggagcggttaaatcaggaggagcaaaagtgtgcctcattgagggagaaactaaatgttgctgtcagaaaagggaagggtctagtgcaacacagagacagcttgaagcaaactatggaagagatgaatgtagtgatagagaaacttaaaagtgaaagaaaacagcacatagaatcacttgagaccgagaaatcatcgttaatggatcgattggctgagaatgaaaagagcttgcatgaaacaaaccagtacttgagtggactattaaatgctttaaatagagtggatgttgctcgggaatttgatatggatccaatcaccaaggttgaaaagatggctaaatttttccttgacctacagtcaacagtggcttcatcgcaaaacgaagtgatgaaatcaaaacgagcaacagagctgcttcttgctgagttaaatgaagctcatgaaagggctgacaacctgcaggaggaattggtcaaggcagaagctgcactttctgaatcttctaaacaatacattgttacagaatctgcaagagctgatgctgttcgtcagcttgaacttattatgcatgcacagtcacaaacaaggaggaggcaagcagatcatttgctggagttaaactccaccagcagtcaactaagagaagtctgctttgaactttcacactgtcttgttaatacattcagtaaggatgtggaccttatctgctatgtggtgaacttcatgaggtcttctggtaaattgatggatgacacaaatacgatggacataccgattgcctctaaacatgttttgtccaaccgcacaaacaacaagaaggctcatattccaaatgctcctttggaaattaagacggatgatacggatgacagtcagtttttgcatcatcttgctattgcatgccatgctttatctgattgtgttaaggactgtaatgatctcaaaagaaacattgatgagcatgacttttcagttgaacagaaagcaaccgagctatttgatgttatgtccaccttaaagaataggttcacttctcagcataatgagttggaatctttgagagcaaaatttgttgaactacagtcagagatggaagaaagagacaaggagattatatttgcacaaaggaatatgagcttgctatatgaagcatgcgcaagttcagttgctgagattgaaggaattagtgatatatatcctggtaaacacagctatgctgttgaacattctgcagatgaatgtataaaatcaatcgttgaacagttagttatggctgtaaaaacttctcagaacagtaacgaaggtagcacaaaggagctgaaggctattgttcttgagttgcagcaggagcttcaagctaaagatgtccaaattagcacaatcagttctgatctatcatatcagttaagggtggctgaatcttctgcaaagcagttctcagttgatcttgaagatgcaagaatggagctccaaaatttggagaaacaagttgatgtgttgcagaatcagaagaaggatttagagactcaattaaatgagcttaaaaatatggaatcaatggcaagtgaacaacatggaagaattgagaaattgactgatgaattaagcagaaaagatcaagaaattgaaggtttggtgcaagcactcgatgaagaagaaaaagagcttgaaatcttggagaataaaagccttcagttggagcaaatgctgcaagagaaagaatttgccttgaagacctcagaagtttctaggaccaaagctttggcaaaacttgcaacgactgttgacaaatttgatgagctgcatagcttgtctgagaaccttcttgctgaagtggaaaaccttcagttgcaattgcaagaaagagattctgagatctcatttctgcgaaaagaagttacaaaaagcactaatgaactgctaaccactgaagagagcaacaaaaattattcatctcagctaaatggtttcatgaagtggttagaaagagaactgttgcagttcggcttccattctgagagtgccaatgattatgattacactcaatttcctgtctatatggatatgttggacaaaaaaataggatctctgatagccgaatcagatgatttaagggttacagttcaaagcaaagattctttactacaggttgagagggccaaaattgaggagttgatgcgtaaatcagatggtctagaagcttcattgagccaaaaggattcccagatagggttacttcgccgggacagagcatccaatcagcagagcagatctataaatttgcctggcacttcagagattgagcaaatgaatgacaaagtaagcccagctgcagttgtcactcagattcgaggcgcacgaaaagtcatcaatgaccaagttgctattgatgtagagatggagaaggacaagccttttgatgatgaagatgatgacaaagcccatggtttcaagtcattgactatgtcacgctttgttcctaaattcactcgaccggtatcagacagaattgatgggatgtgggtctcaggcgatagattgctcatgaggcaaccgaccttaagactcggcgtcttgatatattggattgcactgcatgctttgcttgctagttttatttgaactctgtaaagatgtagccatctcctggcgagtgactgtacagtactctgtgtctatagcaagttatatctaaacagaagcagtttgcactgataccgtgattcctttcgaaaatgttaccgaatacttgagccgtattggcagctgcagaaatcttcatgatgcattttcacccttcatcctggtgcaaatcctgtctagcttagtttgtgttcaattgatacaaatggatggaagagaactgaaggaagcagcagcaaagaaccccctgtacatacatttttgtttgctctattctttgcttttagaaaaaagatggagggcattctacatgctagcgactacttactacactatatgatacaggattacagggaagtgacatgtagttttggaagttagggttttgggatggtagcaggtcatcccctcccttgagttggccccctcaatcccatcatgccttctaatctttttcgtttacatgtataacacagtgattatatcatttattgtaatccacatagtgtgcaatgggggagcttgcacattttattaacgtcaagtgaagcctgagtgctgaaagttcatgtcaggtctgatttggggagtgcgttgagccctggcgtatgctgtgaggcttcagcggttgttttgctactgttgccgccaaaaatcaaatgacgaaatattcttcaaaatttgttgggttatataatctggacagattataatctccaacaaacaccatcttaataaacacccccttaatggctaacactaaataaacaacagttactgctcac

SEQ ID NO: 54031 - DNA, 8651 bp, Zea Mays
ctcttcttcctcctcgtccctcccaaatccccgaacccgagcgcgcgactccctcccgcctcccagatcttccagaacccgctacgattcgggcaatccgccggcccgcgccctagtaggtctccgcgggcgggattggttgatgcctccccgcctcgcgtgaccgctgcccgagggctggaccggagatctccgcatggatcacaggggcggcggcggcggtggcggaaacaagaaccgcaccgatctcctcgctgcagggcggaagaagctgcagcagttccggaagaagaaggggaagcggggtcccggcaataaggccgacgccgatgctgacgcggaggccggggagggggcgcccaaggcggcggaggagtctgtgcccgagccgaaatcgcctgttgggttgaagctcctcgccggggagggcggcggcgggagcactccatttgaggaagcggagaggtctcaggcggagcagtgcaacggtgaggggcctggtaccgcggagtccagctctgtggagagttccaatgcggtgcaagaacaggagacggtgcaagagcaggagacggatgatgtctccgatgcacatcatgtcggtcctagtgagcaggggatttcggagcatcctgaaagccagacagctggtggcagggatctatcacttcaggctaccagtggagacagcattggtgatgataatgtaggacgagctcagctgggtgatgtggatagcatggagctgaatgcttcttctgaaggtaatggagcagatggtgattgcaatcaactaggggaacaccagcaggtggaaatggatgctgttgaaaggccaacaagttccagtttcgaagaattcaccgagttgccaattcattctcaaggcattgaagccgataatatccacggtgaaggggctcaggaaatggtgatggatgtttctgggaggccattagatggagacatacagcatgacatcgagcccacagcttctgctgaaatagatgccgagactgcacttgaagagtcaactgttgcagcttcaattgtgattcctgagagtactgcaagaggtactgagtacgaaagagacactgggtatgaaaccgatggagtagacaaagaggctctcctagaagatccaagcatggtgcatgtaagtgatgaagctgtcactatagatgatttgagtgttcaggccaagccaacagcatcagcggatatgccactttgtgagcagaagggggatccagctttatctagaagtgcggtattgcaaggcattatgccacttcacttcgaggatatacaaaatcatatgttctctgcaactctgtcaagggattttctccagttgcagctagatgaggctgctggcctttattcagattttacacaacagtcttctgacaataccacacagctccgggtactgctaaaagaaactgaagaaagcaaactagcagttgacagagagcttcatcaatgtagacatgagctctccaaggtgaacatagaaaaggggcaacttgaactgaccatggcttccttgaaagaagaaatcaacactagcaacacgaggtgcacatatttggagagtgagctacattcctccaaggagagcacagaacaaatccacagtgaactagctaacagcagattgttactggaagctctgcaaaaagagaacatggagcttactgcaagccttgcttttgagaaagaagccaaaaaagaagttgaagaacagcgggaccatctatcttctgataacaggaagcttttatcggagttgtcaggtcttgagcttagcttagcttctgtgaaagaggaaatggatgctagcagtagcagatgtaatgtttttgagtgtgagctgcgttcctccaatgagaatatgaatcatactttgacagagttggcaaattgccaggctttattggaaacattacagaaagataatttggagctgtctgcaaattctgcctccgaaagagaagcaaaaatgaaactccaagaagacaatttgtatctatgtaatgaaaagggcaagctttcttcaaatttacgtgaactaaatgacaagttggaagtttcgtatgccaagcataagcagcttgagtcacatgtcaaagatacagaaacatactttggacaacttaccgagcagctaattgaggaaaatctgtacacaagtattagcatcgatatttaccaatctacaaccaaagacttagacactaagtacaatattgtgctgggacaattccagaatattatgcgtcaagaacttcatttggactcgtctgaagtcactactgagaatgctgaaagagccattatgacccctagacatgatagccatggtaataatcagtgtttgcttaatctggtaaatgcgaatgactcatgtaactcaactgctttgctgtcgctgaagggccatctagaggtggcaaaaagtgatttgcataaccttgaaaagttgctagagaggatctcctctaggtctgatggacgtgttctggtatcaaaactcattaaatcctttgagtcaaagggaagtgacgatgatactggactgtctgagggggagcatgataatttacaaaagtcaactcgggagatgctatcatgcctaggggagaagtttatagcaatgagctcagatattacaaaaactgaagaatatttggctgaactgtgtaacaaaattgaactttacgtcaagtctactgtgcagcatgatagagatagacaatgtactgttgttcttgaggccaaaatggatgaacttgctggcaagctgagcaactacaaggagacaattgacaatctgcacaatcaggttgctattgtgcagcaggatgcaaacagtaatgctggaaagctcattgatcaagcagaactgttgcagaaggatgcggtagaaaggatttccattcttgagaatgagagaatgtctttatcagatttactcagtgaagtaacaaacaagctcacctctttgggagatgctgtatttcctagtggttccagtgaaattgaaggtctcaatttctgcactttgagctgtgtggaccttgttgctagatcatttcaaagtcttcaggagaaattagaggctgctcaaatagataatgctcagctcaatagttctctggtggagctcaggaaggcaattggtgttgctcaagagaggagtgaacatgcagatggaattgtcaagaaactgtatgattccctacaggaacttctatgtgattcacttggaagttcaaatgaatttggggccagatatagtgttgaggaaccaattgaaagtcaatatggaagactcattgcgcatttaaagaatttgttgcatgaccaccattccgcgctgtcaactaatgctgaacttgagttgagtctgttaagtaaatgtgaagaagttgaggagctcaacatgagatgcagttctctattaaaaaaattggatgaagtttgtattctaaatgaggagcttaagtcagcttcttcaagtaaaaacgtcacactggataaactacacagtagatgccttactgtagcagaaatgttggcttcatgctcagcaaatcattcctcgacagttcagttgatatctgatattggtgaaggatctagcaaggaagatcatattcttaccacccttctcccatgcattgaggcggacgtggcttcatgcatcgagaaatttgaaaatgcagctgaagaaatccgtttgtctaagatatgcttgcaagaaatcagcatatttgaccagatttcatttgaaaaatggtcttaccccttgcccacattgattaaagaggaagttttaccaaagatatgtgatttgcaagacagattcgaccagctcaatgcactaaacattcagctggaaactgaagttgcagtcctcaaggatggcatgaaagagctggatgaagatcttggaacttcgcgatctgagcttcagaaaaaggtttctgaacttgaacagttagatcagaaattttcatctgtgaaggaaaaacttagtattgctgttgcaaaaggtaaaggtttgatagtgcagcgtgacagccttaagcagtctttgctggagaagtctggtgagatcgagaaactcacacaagaactgcagttaaaggaaacattgctgaaagagttggaagccaaactcaaatcctatacagaagcagatcgaattgaagccttggaatcggagctgtcatacataaggaattcagctacagctctaagggattcatttcttctaaaagactctgttcttcagagaattgaagaggtcttagaagaactagatttgccagagcaatttcattctcgagatattgttgaaaaaatagaactgctgtcaaagatggccattggcactcctttcactctacctgatggtgataagggatcctctgttgatgggcattctgagtctggtgtggctatgaatgtcatagacgatgagcagaactcaaattcaaattcagtatctgatgaagtaaagagcaaatatgaggaactgaataggagattctgtgagctggctgaacagaacaatatgctggaacaatctctagtggagaggaacagtcttatacagaaatgggaagaagtccttggccaaattagcatccccccacagttcaggatgttggaagcagaagataagttagcatggttaggaaacagattcttggaggtggaacaggagagagattcattacagttgaagattgagcatcttgaggattcctcagaaatgcttattgctgatctagaagagtcacataaaaggatatctgaactcagtgcagaggtggttgctataaaggctgagaaggatttcttttcacaaagcctagagaaactgagatttgagttccttgggctctctgagaaagttgttcaagatgagtttgttagagataaattgcgaatggatctatctgaactgcgggataagttcgctgaaaaaaccgaggagagcaggcactaccatgaaatggacaccgaggtccacaaactgctgaatttggtgcaaaacacattgcaggatagcactaactctgaaatttcatctggaggcatttctgctgtgttgtgcttgggcaaaatgctgaagaaacttttagatgactatggcactcttctgtacaagtcgactgaaggcaattttgccgagagagacattcagttagaggatatcaagccatctaaggatgcctctaaatcggacactggtgcatacgagaaagagatggaactaaattctttaaataacgagttagatcatgctcacaacaatctggccttagcgcaacaggagtgtgatgaagctgtggagaaggcacaatcactaatgatggaaattgagaccttacatgctcaaataagtaaattgcaggaaagtgatgctgaacaaatgcaaaagaaagagatggaactaaattctttaaataacgagttagatcatgctcgtaacaatctggccttagtggagcaggagcgtgatgaagctgtggagaaggcacaatcactaatgatggaaattgagaccttacatgctcaaataagtaaattgcaggaaagtgatgctgaacagatgcaaaaatatcagtcgcttgtccttgaactagaaagtgtgggtaagcaacgggacaatctacaggagcggttaaatcaggaggagcaaaagtgtgcctcattgagggagaaactaaatgttgctgtcagaaaagggaagggtctagtgcaacacagagacagcttgaagcaaactatggaagagatgaatgtagtgatagagaaacttaaaagtgaaagaaaacagcacatagaatcacttgagaccgagaaatcatcgttaatggatcgattggctgagaatgaaaagagcttgcatgaaacaaaccagtacttgagtggactattaaatgctttaaatagagtggatgttgctcgggaatttgatatggatccaatcaccaaggttgaaaagatggctaaatttttccttgacctacagtcaacagtggcttcatcgcaaaacgaagtgatgaaatcaaaacgagcaacagagctgcttcttgctgagttaaatgaagctcatgaaagggctgacaacctgcaggaggaattggtcaaggcagaagctgcactttctgaatcttctaaacaatacattgttacagaatctgcaagagctgatgctgttcgtcagcttgaacttattatgcatgcacagtcacaaacaaggaggaggcaagcagatcatttgctggagttaaactccaccagcagtcaactaagagaagtctgctttgaactttcacactgtcttgttaatacattcagtaaggatgtggaccttatctgctatgtggtgaacttcatgaggtcttctggtaaattgatggatgacacaaatacgatggacataccgattgcctctaaacatgttttgtccaaccgcacaaacaacaaggctcatattccaaatgctcctttggaaattaagacggatgatacggatgacagtcagtttttgcatcatcttgctattgcatgccatgctttatctgattgtgttaaggactgtaatgatctcaaaagaaacattgatgagcatgacttttcagttgaacagaaagcaaccgagctatttgatgttatgtccaccttaaagaataggttcacttctcagcataatgagttggaatctttgagagcaaaatttgttgaactacagtcagagatggaagaaagagacaaggagattatatttgcacaaaggaatatgagcttgctatatgaagcatgcgcaagttcagttgctgagattgaaggaattagtgatatatatcctggtaaacacagctatgctgttgaacattctgcagatgaatgtataaaatcaatcgttgaacagttagttatggctgtaaaaacttctcagaacagtaacgaaggtagcacaaaggagctgaaggctattgttcttgagttgcagcaggagcttcaagctaaagatgtccaaattagcacaatcagttctgatctatcatatcagttaagggtggctgaatcttctgcaaagcagttctcagttgatcttgaagatgcaagaatggagctccaaaatttggagaaacaagttgatgtgttgcagaatcagaagaaggatttagagactcaattaaatgagcttaaaaatatggaatcaatggcaagtgaacaacatggaagaattgagaaattgactgatgaattaagcagaaaagatcaagaaattgaaggtttggtgcaagcactcgatgaagaagaaaaagagcttgaaatcttggagaataaaagccttcagttggagcaaatgctgcaagagaaagaatttgccttgaagacctcagaagtttctaggaccaaagctttggcaaaacttgcaacgactgttgacaaatttgatgagctgcatagcttgtctgagaaccttcttgctgaagtggaaaaccttcagttgcaattgcaagaaagagattctgagatctcatttctgcgaaaagaagttacaaaaagcactaatgaactgctaaccactgaagagagcaacaaaaattattcatctcagctaaatggtttcatgaagtggttagaaagagaactgttgcagttcggcttccattctgagagtgccaatgattatgattacactcaatttcctgtctatatggatatgttggacaaaaaaataggatctctgatagccgaatcagatgatttaagggttacagttcaaagcaaagattctttactacaggttgagagggccaaaattgaggagttgatgcgtaaatcagatggtctagaagcttcattgagccaaaaggattcccagatagggttacttcgccgggacagagcatccaatcagcagagcagatctataaatttgcctggcacttcagagattgagcaaatgaatgacaaagtaagcccagctgcagttgtcactcagattcgaggcgcacgaaaagtcatcaatgaccaagttgctattgatgtagagatggagaaggacaagccttttgatgatgaagatgatgacaaagcccatggtttcaagtcattgactatgtcacgctttgttcctaaattcactcgaccggtatcagacagaattgatgggatgtgggtctcaggcgatagattgctcatgaggcaaccgaccttaagactcggcgtcttgatatattggattgcactgcatgctttgcttgctagttttatttgaactctgtaaagttgtagcgatgttctgggcgagtgactgtacagtactcttgtgtctatagcaagttatctaaacagaagcagattgcactaataccgtgattccttttgaaaatgttaccgaatactttagccgtattggcagctgcgagacatcttcaggatgcatttcacccatcatcctggtgcttgatcctgtctagcttagtttgtgttcaattgatacaaatggtggaagagaactgaaggaagcagcagcaaagaaccccctgtacatacatttttgtttgctctattctttgcttttagaaaaagatgggagggattctacatgc

SEQ ID NO: 54032 - DNA, 8630 bp, Zea Mays
caccaacccgacacggcgcgggcgcgggcgccggtccaaacccgaatctctcctgtcgattcctccctcttcttcctcctcgtccctcccaaatccccgaacccgagcgcgcgactccctcccgcctcccagatcttccagaacccgctacgattcgggcaatccgccggcccgcgccctagtaggtctccgcgggcgggattggttgatgcctccccgcctcgcgtgaccgctgcccgagggctggaccggagatctccgcatggatcacaggggcggcggcggcggtggcggaaacaagaaccgcaccgatctcctcgctgcagggcggaagaagctgcagcagttccggaagaagaaggggaagcggggtcccggcaataaggccgacgccgatgctgacgcggaggccggggagggggcgcccaaggcggcggaggagtctgtgcccgagccgaaatcgcctgttgggttgaagctcctcgccggggagggcggcggcgggagcactccatttgaggaagcggagaggtctcaggcggagcagtgcaacggtgaggggcctggtaccgcggagtccagctctgtggagagttccaatgcggtgcaagaacaggagacggtgcaagagcaggagacggatgatgtctccgatgcacatcatgtcggtcctagtgagcaggggatttcggagcatcctgaaagccagacagctggtggcagggatctatcacttcaggctaccagtggagacagcattggtgatgataatgtaggacgagctcagctgggtgatgtggatagcatggagctgaatgcttcttctgaaggtaatggagcagatggtgattgcaatcaactaggggaacaccagcaggtggaaatggatgctgttgaaaggccaacaagttccagtttcgaagaattcaccgagttgccaattcattctcaaggcattgaagccgataatatccacggtgaaggggctcaggaaatggtgatggatgtttctgggaggccattagatggagacatacagcatgacatcgagcccacagcttctgctgaaatagatgccgagactgcacttgaagagtcaactgttgcagcttcaattgtgattcctgagagtactgcaagaggtactgagtacgaaagagacactgggtatgaaaccgatggagtagacaaagaggctctcctagaagatccaagcatggtgcatgtaagtgatgaagctgtcactatagatgatttgagtgttcaggccaagccaacagcatcagcggatatgccactttgtgagcagaagggggatccagctttatctagaagtgcggtattgcaaggcattatgccacttcacttcgaggatatacaaaatcatatgttctctgcaactctgtcaagggattttctccagttgcagctagatgaggctgctggcctttattcagattttacacaacagtcttctgacaataccacacagctccgggtactgctaaaagaaactgaagaaagcaaactagcagttgacagagagcttcatcaatgtagacatgagctctccaaggtgaacatagaaaaggggcaacttgaactgaccatggcttccttgaaagaagaaatcaacactagcaacacgaggtgcacatatttggagagtgagctacattcctccaaggagagcacagaacaaatccacagtgaactagctaacagcagattgttactggaagctctgcaaaaagagaacatggagcttactgcaagccttgcttttgagaaagaagccaaaaaagaagttgaagaacagcgggaccatctatcttctgataacaggaagcttttatcggagttgtcaggtcttgagcttagcttagcttctgtgaaagaggaaatggatgctagcagtagcagatgtaatgtttttgagtgtgagctgcgttcctccaatgagaatatgaatcatactttgacagagttggcaaattgccaggctttattggaaacattacagaaagataatttggagctgtctgcaaattctgcctccgaaagagaagcaaaaatgaaactccaagaagacaatttgtatctatgtaatgaaaagggcaagctttcttcaaatttacgtgaactaaatgacaagttggaagtttcgtatgccaagcataagcagcttgagtcacatgtcaaagatacagaaacatactttggacaacttaccgagcagctaattgaggaaaatctgtacacaagtattagcatcgatatttaccaatctacaaccaaagacttagacactaagtacaatattgtgctgggacaattccagaatattatgcgtcaagaacttcatttggactcgtctgaagtcactactgagaatgctgaaagagccattatgacccctagacatgatagccatggtaataatcagtgtttgcttaatctggtaaatgcgaatgactcatgtaactcaactgctttgctgtcgctgaagggccatctagaggtggcaaaaagtgatttgcataaccttgaaaagttgctagagaggatctcctctaggtctgatggacgtgttctggtatcaaaactcattaaatcctttgagtcaaagggaagtgacgatgatactggactgtctgagggggagcatgataatttacaaaagtcaactcgggagatgctatcatgcctaggggagaagtttatagcaatgagctcagatattacaaaaactgaagaatatttggctgaactgtgtaacaaaattgaactttacgtcaagtctactgtgcagcatgatagagatagacaatgtactgttgttcttgaggccaaaatggatgaacttgctggcaagctgagcaactacaaggagacaattgacaatctgcacaatcaggttgctattgtgcagcaggatgcaaacagtaatgctggaaagctcattgatcaagcagaactgttgcagaaggatgcggtagaaaggatttccattcttgagaatgagagaatgtctttatcagatttactcagtgaagtaacaaacaagctcacctctttgggagatgctgtatttcctagtggttccagtgaaattgaaggtctcaatttctgcactttgagctgtgtggaccttgttgctagatcatttcaaagtcttcaggagaaattagaggctgctcaaatagataatgctcagctcaatagttctctggtggagctcaggaaggcaattggtgttgctcaagagaggagtgaacatgcagatggaattgtcaagaaactgtatgattccctacaggaacttctatgtgattcacttggaagttcaaatgaatttggggccagatatagtgttgaggaaccaattgaaagtcaatatggaagactcattgcgcatttaaagaatttgttgcatgaccaccattccgcgctgtcaactaatgctgaacttgagttgagtctgttaagtaaatgtgaagaagttgaggagctcaacatgagatgcagttctctattaaaaaaattggatgaagtttgtattctaaatgaggagcttaagtcagcttcttcaagtaaaaacgtcacactggataaactacacagtagatgccttactgtagcagaaatgttggcttcatgctcagcaaatcattcctcgacagttcagttgatatctgatattggtgaaggatctagcaaggaagatcatattcttaccacccttctcccatgcattgaggcggacgtggcttcatgcatcgagaaatttgaaaatgcagctgaagaaatccgtttgtctaagatatgcttgcaagaaatcagcatatttgaccagatttcatttgaaaaatggtcttaccccttgcccacattgattaaagaggaagttttaccaaagatatgtgatttgcaagacagattcgaccagctcaatgcactaaacattcagctggaaactgaagttgcagtcctcaaggatggcatgaaagagctggatgaagatcttggaacttcgcgatctgagcttcagaaaaaggtttctgaacttgaacagttagatcagaaattttcatctgtgaaggaaaaacttagtattgctgttgcaaaaggtaaaggtttgatagtgcagcgtgacagccttaagcagtctttgctggagaagtctggtgagatcgagaaactcacacaagaactgcagttaaaggaaacattgctgaaagagttggaagccaaactcaaatcctatacagaagcagatcgaattgaagccttggaatcggagctgtcatacataaggaattcagctacagctctaagggattcatttcttctaaaagactctgttcttcagagaattgaagaggtcttagaagaactagatttgccagagcaatttcattctcgagatattgttgaaaaaatagaactgctgtcaaagatggccattggcactcctttcactctacctgatggtgataagggatcctctgttgatgggcattctgagtctggtgtggctatgaatgtcatagacgatgagcagaactcaaattcaaattcagtatctgatgaagtaaagagcaaatatgaggaactgaataggagattctgtgagctggctgaacagaacaatatgctggaacaatctctagtggagaggaacagtcttatacagaaatgggaagaagtccttggccaaattagcatccccccacagttcaggatgttggaagcagaagataagttagcatggttaggaaacagattcttggaggtggaacaggagagagattcattacagttgaagattgagcatcttgaggattcctcagaaatgcttattgctgatctagaagagtcacataaaaggatatctgaactcagtgcagaggtggttgctataaaggctgagaaggatttcttttcacaaagcctagagaaactgagatttgagttccttgggctctctgagaaagttgttcaagatgagtttgttagagataaattgcgaatggatctatctgaactgcgggataagttcgctgaaaaaaccgaggagagcaggcactaccatgaaatggacaccgaggtccacaaactgctgaatttggtgcaaaacacattgcaggatagcactaactctgaaatttcatctggaggcatttctgctgtgttgtgcttgggcaaaatgctgaagaaacttttagatgactatggcactcttctgtacaagtcgactgaaggcaattttgccgagagagacattcagttagaggatatcaagccatctaaggatgcctctaaatcggacactggtgcatacgagaaagagatggaactaaattctttaaataacgagttagatcatgctcacaacaatctggccttagcgcaacaggagtgtgatgaagctgtggagaaggcacaatcactaatgatggaaattgagaccttacatgctcaaataagtaaattgcaggaaagtgatgctgaacaaatgcaaaagaaagagatggaactaaattctttaaataacgagttagatcatgctcgtaacaatctggccttagtggagcaggagcgtgatgaagctgtggagaaggcacaatcactaatgatggaaattgagaccttacatgctcaaataagtaaattgcaggaaagtgatgctgaacagatgcaaaaatatcagtcgcttgtccttgaactagaaagtgtgggtaagcaacgggacaatctacaggagcggttaaatcaggaggagcaaaagtgtgcctcattgagggagaaactaaatgttgctgtcagaaaagggaagggtctagtgcaacacagagacagcttgaagcaaactatggaagagatgaatgtagtgatagagaaacttaaaagtgaaagaaaacagcacatagaatcacttgagaccgagaaatcatcgttaatggatcgattggctgagaatgaaaagagcttgcatgaaacaaaccagtacttgagtggactattaaatgctttaaatagagtggatgttgctcgggaatttgatatggatccaatcaccaaggttgaaaagatggctaaatttttccttgacctacagtcaacagtggcttcatcgcaaaacgaagtgatgaaatcaaaacgagcaacagagctgcttcttgctgagttaaatgaagctcatgaaagggctgacaacctgcaggaggaattggtcaaggcagaagctgcactttctgaatcttctaaacaatacattgttacagaatctgcaagagctgatgctgttcgtcagcttgaacttattatgcatgcacagtcacaaacaaggaggaggcaagcagatcatttgctggagttaaactccaccagcagtcaactaagagaagtctgctttgaactttcacactgtcttgttaatacattcagtaaggatgtggaccttatctgctatgtggtgaacttcatgaggtcttctggtaaattgatggatgacacaaatacgatggacataccgattgcctctaaacatgttttgtccaaccgcacaaacaacaagaaggctcatattccaaatgctcctttggaaattaagacggatgatacggatgacagtcagtttttgcatcatcttgctattgcatgccatgctttatctgattgtgttaaggactgtaatgatctcaaaagaaacattgatgagcatgacttttcagttgaacagaaagcaaccgagctatttgatgttatgtccaccttaaagaataggttcacttctcagcataatgagttggaatctttgagagcaaaatttgttgaactacagtcagagatggaagaaagagacaaggagattatatttgcacaaaggaatatgagcttgctatatgaagcatgcgcaagttcagttgctgagattgaaggaattagtgatatatatcctggtaaacacagctatgctgttgaacattctgcagatgaatgtataaaatcaatcgttgaacagttagttatggctgtaaaaacttctcagaacagtaacgaaggtagcacaaaggagctgaaggctattgttcttgagttgcagcaggagcttcaagctaaagatgtccaaattagcacaatcagttctgatctatcatatcagttaagggtggctgaatcttctgcaaagcagttctcagttgatcttgaagatgcaagaatggagctccaaaatttggagaaacaagttgatgtgttgcagaatcagaagaaggatttagagactcaattaaatgagcttaaaaatatggaatcaatggcaagtgaacaacatggaagaattgagaaattgactgatgaattaagcagaaaagatcaagaaattgaaggtttggtgcaagcactcgatgaagaagaaaaagagcttgaaatcttggagaataaaagccttcagttggagcaaatgctgcaagagaaagaatttgccttgaagacctcagaagtttctaggaccaaagctttggcaaaacttgcaacgactgttgacaaatttgatgagctgcatagcttgtctgagaaccttcttgctgaagtggaaaaccttcagttgcaattgcaagaaagagattctgagatctcatttctgcgaaaagaagttacaaaaagcactaatgaactgctaaccactgaagagagcaacaaaaattattcatctcagctaaatggtttcatgaagtggttagaaagagaactgttgcagttcggcttccattctgagagtgccaatgattatgattacactcaatttcctgtctatatggatatgttggacaaaaaaataggatctctgatagccgaatcagatgatttaagggttacagttcaaagcaaagattctttactacaggttgagagggccaaaattgaggagttgatgcgtaaatcagatggtctagaagcttcattgagccaaaaggattcccagatagggttacttcgccgggacagagcatccaatcagcagagcagatctataaatttgcctggcacttcagagattgagcaaatgaatgacaaagtaagcccagctgcagttgtcactcagattcgaggcgcacgaaaagtcatcaatgaccaagttgctattgatgtagagatggagaaggacaagccttttgatgatgaagatgatgacaaaggcgatagattgctcatgaggcaaccgaccttaagactcggcgtcttgatatattggattgcactgcatgctttgcttgctagttttatttgaactctgtaaagttgtagcgatgttctgggcgagtgactgtacagtactcttgtgtctatagcaagttatctaaacagaagcagattgcactaataccgtgattccttttgaaaatgttaccgaatactttagccgtattggcagctgcgagacatcttcaggatgcatttcacccatcatcctggtgcttgatcctgtctagcttagtttgtgttcaattgatacaaatggtggaagagaactgaaggaagcagcagcaaagaaccccctgtacatacatttttgtttgctctattctttgcttttagaaaaagatgggagggattctacatgc

SEQ ID NO: 54033 - DNA, 8728 bp, Zea Mays
cagccacacaccaacccgacacggcgcgggcgcgggcgccggtccaaacccgaatctctcctgtcgattcctccctcttcttcctcctcgtccctcccaaatccccgaacccgagcgcgcgactccctcccgcctcccagatcttccagaacccgctacgattcgggcaatccgccggcccgcgccctagtaggtctccgcgggcgggattggttgatgcctccccgcctcgcgtgaccgctgcccgagggctggaccggagatctccgcatggatcacaggggcggcggcggcggtggcggaaacaagaaccgcaccgatctcctcgctgcagggcggaagaagctgcagcagttccggaagaagaaggggaagcggggtcccggcaataaggccgacgccgatgctgacgcggaggccggggagggggcgcccaaggcggcggaggagtctgtgcccgagccgaaatcgcctgttgggttgaagctcctcgccggggagggcggcggcgggagcactccatttgaggaagcggagaggtctcaggcggagcagtgcaacggtgaggggcctggtaccgcggagtccagctctgtggagagttccaatgcggtgcaagaacaggagacggtgcaagagcaggagacggatgatgtctccgatgcacatcatgtcggtcctagtgagcaggggatttcggagcatcctgaaagccagacagctggtggcagggatctatcacttcaggctaccagtggagacagcattggtgatgataatgtaggacgagctcagctgggtgatgtggatagcatggagctgaatgcttcttctgaaggtaatggagcagatggtgattgcaatcaactaggggaacaccagcaggtggaaatggatgctgttgaaaggccaacaagttccagtttcgaagaattcaccgagttgccaattcattctcaaggcattgaagccgataatatccacggtgaaggggctcaggaaatggtgatggatgtttctgggaggccattagatggagacatacagcatgacatcgagcccacagcttctgctgaaatagatgccgagactgcacttgaagagtcaactgttgcagcttcaattgtgattcctgagagtactgcaagaggtactgagtacgaaagagacactgggtatgaaaccgatggagtagacaaagaggctctcctagaagatccaagcatggtgcatgtaagtgatgaagctgtcactatagatgatttgagtgttcaggccaagccaacagcatcagcggatatgccactttgtgagcagaagggggatccagctttatctagaagtgcggtattgcaaggcattatgccacttcacttcgaggatatacaaaatcatatgttctctgcaactctgtcaagggattttctccagttgcagctagatgaggctgctggcctttattcagattttacacaacagtcttctgacaataccacacagctccgggtactgctaaaagaaactgaagaaagcaaactagcagttgacagagagcttcatcaatgtagacatgagctctccaaggtgaacatagaaaaggggcaacttgaactgaccatggcttccttgaaagaagaaatcaacactagcaacacgaggtgcacatatttggagagtgagctacattcctccaaggagagcacagaacaaatccacagtgaactagctaacagcagattgttactggaagctctgcaaaaagagaacatggagcttactgcaagccttgcttttgagaaagaagccaaaaaagaagttgaagaacagcgggaccatctatcttctgataacaggaagcttttatcggagttgtcaggtcttgagcttagcttagcttctgtgaaagaggaaatggatgctagcagtagcagatgtaatgtttttgagtgtgagctgcgttcctccaatgagaatatgaatcatactttgacagagttggcaaattgccaggctttattggaaacattacagaaagataatttggagctgtctgcaaattctgcctccgaaagagaagcaaaaatgaaactccaagaagacaatttgtatctatgtaatgaaaagggcaagctttcttcaaatttacgtgaactaaatgacaagttggaagtttcgtatgccaagcataagcagcttgagtcacatgtcaaagatacagaaacatactttggacaacttaccgagcagctaattgaggaaaatctgtacacaagtattagcatcgatatttaccaatctacaaccaaagacttagacactaagtacaatattgtgctgggacaattccagaatattatgcgtcaagaacttcatttggactcgtctgaagtcactactgagaatgctgaaagagccattatgacccctagacatgatagccatggtaataatcagtgtttgcttaatctggtaaatgcgaatgactcatgtaactcaactgctttgctgtcgctgaagggccatctagaggtggcaaaaagtgatttgcataaccttgaaaagttgctagagaggatctcctctaggtctgatggacgtgttctggtatcaaaactcattaaatcctttgagtcaaagggaagtgacgatgatactggactgtctgagggggagcatgataatttacaaaagtcaactcgggagatgctatcatgcctaggggagaagtttatagcaatgagctcagatattacaaaaactgaagaatatttggctgaactgtgtaacaaaattgaactttacgtcaagtctactgtgcagcatgatagagatagacaatgtactgttgttcttgaggccaaaatggatgaacttgctggcaagctgagcaactacaaggagacaattgacaatctgcacaatcaggttgctattgtgcagcaggatgcaaacagtaatgctggaaagctcattgatcaagcagaactgttgcagaaggatgcggtagaaaggatttccattcttgagaatgagagaatgtctttatcagatttactcagtgaagtaacaaacaagctcacctctttgggagatgctgtatttcctagtggttccagtgaaattgaaggtctcaatttctgcactttgagctgtgtggaccttgttgctagatcatttcaaagtcttcaggagaaattagaggctgctcaaatagataatgctcagctcaatagttctctggtggagctcaggaaggcaattggtgttgctcaagagaggagtgaacatgcagatggaattgtcaagaaactgtatgattccctacaggaacttctatgtgattcacttggaagttcaaatgaatttggggccagatatagtgttgaggaaccaattgaaagtcaatatggaagactcattgcgcatttaaagaatttgttgcatgaccaccattccgcgctgtcaactaatgctgaacttgagttgagtctgttaagtaaatgtgaagaagttgaggagctcaacatgagatgcagttctctattaaaaaaattggatgaagtttgtattctaaatgaggagcttaagtcagcttcttcaagtaaaaacgtcacactggataaactacacagtagatgccttactgtagcagaaatgttggcttcatgctcagcaaatcattcctcgacagttcagttgatatctgatattggtgaaggatctagcaaggaagatcatattcttaccacccttctcccatgcattgaggcggacgtggcttcatgcatcgagaaatttgaaaatgcagctgaagaaatccgtttgtctaagatatgcttgcaagaaatcagcatatttgaccagatttcatttgaaaaatggtcttaccccttgcccacattgattaaagaggaagttttaccaaagatatgtgatttgcaagacagattcgaccagctcaatgcactaaacattcagctggaaactgaagttgcagtcctcaaggatggcatgaaagagctggatgaagatcttggaacttcgcgatctgagcttcagaaaaaggtttctgaacttgaacagttagatcagaaattttcatctgtgaaggaaaaacttagtattgctgttgcaaaaggtaaaggtttgatagtgcagcgtgacagccttaagcagtctttgctggagaagtctggtgagatcgagaaactcacacaagaactgcagttaaaggaaacattgctgaaagagttggaagccaaactcaaatcctatacagaagcagatcgaattgaagccttggaatcggagctgtcatacataaggaattcagctacagctctaagggattcatttcttctaaaagactctgttcttcagagaattgaagaggtcttagaagaactagatttgccagagcaatttcattctcgagatattgttgaaaaaatagaactgctgtcaaagatggccattggcactcctttcactctacctgatggtgataagggatcctctgttgatgggcattctgagtctggtgtggctatgaatgtcatagacgatgagcagaactcaaattcaaattcagtatctgatgaagtaaagagcaaatatgaggaactgaataggagattctgtgagctggctgaacagaacaatatgctggaacaatctctagtggagaggaacagtcttatacagaaatgggaagaagtccttggccaaattagcatccccccacagttcaggatgttggaagcagaagataagttagcatggttaggaaacagattcttggaggtggaacaggagagagattcattacagttgaagattgagcatcttgaggattcctcagaaatgcttattgctgatctagaagagtcacataaaaggatatctgaactcagtgcagaggtggttgctataaaggctgagaaggatttcttttcacaaagcctagagaaactgagatttgagttccttgggctctctgagaaagttgttcaagatgagtttgttagagataaattgcgaatggatctatctgaactgcgggataagttcgctgaaaaaaccgaggagagcaggcactaccatgaaatggacaccgaggtccacaaactgctgaatttggtgcaaaacacattgcaggatagcactaactctgaaatttcatctggaggcatttctgctgtgttgtgcttgggcaaaatgctgaagaaacttttagatgactatggcactcttctgtacaagtcgactgaaggcaattttgccgagagagacattcagttagaggatatcaagccatctaaggatgcctctaaatcggacactggtgcatacgagaaagagatggaactaaattctttaaataacgagttagatcatgctcacaacaatctggccttagcgcaacaggagtgtgatgaagctgtggagaaggcacaatcactaatgatggaaattgagaccttacatgctcaaataagtaaattgcaggaaagtgatgctgaacaaatgcaaaagaaagagatggaactaaattctttaaataacgagttagatcatgctcgtaacaatctggccttagtggagcaggagcgtgatgaagctgtggagaaggcacaatcactaatgatggaaattgagaccttacatgctcaaataagtaaattgcaggaaagtgatgctgaacagatgcaaaaatatcagtcgcttgtccttgaactagaaagtgtgggtaagcaacgggacaatctacaggagcggttaaatcaggaggagcaaaagtgtgcctcattgagggagaaactaaatgttgctgtcagaaaagggaagggtctagtgcaacacagagacagcttgaagcaaactatggaagagatgaatgtagtgatagagaaacttaaaagtgaaagaaaacagcacatagaatcacttgagaccgagaaatcatcgttaatggatcgattggctgagaatgaaaagagcttgcatgaaacaaaccagtacttgagtggactattaaatgctttaaatagagtggatgttgctcgggaatttgatatggatccaatcaccaaggttgaaaagatggctaaatttttccttgacctacagtcaacagtggcttcatcgcaaaacgaagtgatgaaatcaaaacgagcaacagagctgcttcttgctgagttaaatgaagctcatgaaagggctgacaacctgcaggaggaattggtcaaggcagaagctgcactttctgaatcttctaaacaatacattgttacagaatctgcaagagctgatgctgttcgtcagcttgaacttattatgcatgcacagtcacaaacaaggaggaggcaagcagatcatttgctggagttaaactccaccagcagtcaactaagagaagtctgctttgaactttcacactgtcttgttaatacattcagtaaggatgtggaccttatctgctatgtggtgaacttcatgaggtcttctggtaaattgatggatgacacaaatacgatggacataccgattgcctctaaacatgttttgtccaaccgcacaaacaacaagaaggctcatattccaaatgctcctttggaaattaagacggatgatacggatgacagtcagtttttgcatcatcttgctattgcatgccatgctttatctgattgtgttaaggactgtaatgatctcaaaagaaacattgatgagcatgacttttcagttgaacagaaagcaaccgagctatttgatgttatgtccaccttaaagaataggttcacttctcagcataatgagttggaatctttgagagcaaaatttgttgaactacagtcagagatggaagaaagagacaaggagattatatttgcacaaaggaatatgagcttgctatatgaagcatgcgcaagttcagttgctgagattgaaggaattagtgatatatatcctggtaaacacagctatgctgttgaacattctgcagatgaatgtataaaatcaatcgttgaacagttagttatggctgtaaaaacttctcagaacagtaacgaaggtagcacaaaggagctgaaggctattgttcttgagttgcagcaggagcttcaagctaaagatgtccaaattagcacaatcagttctgatctatcatatcagttaagggtggctgaatcttctgcaaagcagttctcagttgatcttgaagatgcaagaatggagctccaaaatttggagaaacaagttgatgtgttgcagaatcagaagaaggatttagagactcaattaaatgagcttaaaaatatggaatcaatggcaagtgaacaacatggaagaattgagaaattgactgatgaattaagcagaaaagatcaagaaattgaaggtttggtgcaagcactcgatgaagaagaaaaagagcttgaaatcttggagaataaaagccttcagttggagcaaatgctgcaagagaaagaatttgccttgaagacctcagaagtttctaggaccaaagctttggcaaaacttgcaacgactgttgacaaatttgatgagctgcatagcttgtctgagaaccttcttgctgaagtggaaaaccttcagttgcaattgcaagaaagagattctgagatctcatttctgcgaaaagaagttacaaaaagcactaatgaactgctaaccactgaagagagcaacaaaaattattcatctcagctaaatggtttcatgaagtggttagaaagagaactgttgcagttcggcttccattctgagagtgccaatgattatgattacactcaatttcctgtctatatggatatgttggacaaaaaaataggatctctgatagccgaatcagatgatttaagggttacagttcaaagcaaagattctttactacaggttgagagggccaaaattgaggagttgatgcgtaaatcagatggtctagaagcttcattgagccaaaaggattcccagatagggttacttcgccgggacagagcatccaatcagcagagcagatctataaatttgcctggcacttcagagattgagcaaatgaatgacaaagtaagcccagctgcagttgtcactcagattcgaggcgcacgaaaagtcatcaatgaccaagttgctattgatgtagagatggagaaggacaagccttttgatgatgaagatgatgacaaagcccatggtttcaagtcattgactatgtcacgctttgttcctaaattcactcgaccggtatcagacagaattgatgggatgtgggtctcaggcgatagattgctcatgaggcaaccgaccttaagactcggcgtcttgatatattggattgcactgcatgctttgcttgctagttttatttgaactctgtaaagttgtagcgatgttctgggcgagtgactgtacagtactcttgtgtctatagcaagttatctaaacagaagcagattgcactaataccgtgattccttttgaaaatgttaccgaatactttagccgtattggcagctgcgagacatcttcaggatgcatttcacccatcatcctggtgcttgatcctgtctagcttagtttgtgttcaattgatacaaatggtggaagagaactgaaggaagcagcagcaaagaaccccctgtacatacatttttgtttgctctattctttgcttttagaaaaagatgggagggattctacatgc

SEQ ID NO: 54034 - DNA, 2929 bp, Zea Mays
atgaagctgagtgctgctgttctcttcttctccatcttgttgcagtactgcaccagcagcggccagccagatagccgaggtttcataagcatcgactgcggcatcccggagaactccacgtaccaggacctcacctccaccatactctacgtctccgaccgcggcttcgtcacctccggcgagaaccgcaacatctccgccggctacatcagcccgtccctcgcgcagcgctactacaccgtccgcgccttcgcgtccggcgttcggaactgctacaccctcccctccctggtcgccgggaacaagtacctcgtccgcgccgccttctactacgcggactacgacggcctgagcacgccgcccgtcttcgacctgtacctgggcgcgagcctctggcacgaggtcaggttcagggacgcggccgcgatcaactggatggacgtcgtggccgtggctcccaccgacttcctgcaggtctgcctggtgaacaagggcaccggcaccccgttcatctccggcctggacctcaggccgctgcggagcactctttacccggaggcgaacgctagccagtcccttgtcatggtcaacgccaaccggtgcaacgtgggacccacggacaagtctgtggttcgcccaaccaaagcacatttctctggcccaacaagcaggtacccgctggacccccacgaccggatctggctggcgtacggcgccgtcccggcctggaccgaggcgtccgccacgtccgtcgtccggaactacctcgccgacccctacgacgcgccgtccgccgtcatgcagagcgccgcgacgccatccgacggctcggtgctcagtttctcgtgggacacgtccgacgaccgctccgtggacgccagcagcgccacgtacctcctcgtcctctacttcgccgagctgcagcgcgtgtcggcgagcggcgagctgcggcggcagttcgacatcgccgtcgacggcaccgcgtggaacagggaaccttactctccgccgtacctcttcgccgactccttctccggcacggtgcaggggcaggcgaggcatagcgtctcgcttactgcgacgaggaacgcgacgctcccgcctcttctcaacgccatggaggtgtacttggtgaggccggtggatgaagctgcaaccgaccctggagatgctaaagccatgatcgcaatccaagaagcttatgttgtgagcaaaaactggatgggtgatccatgtgctccaaaggcttttgcatgggaaggactggactgtactactgatcctccaactggtactccaagaataacagcattccttttatttcctgaactcggacatgaaattaagctgacaaatagtaccactgaaacattcgagctatttcttacaagaactgttacatataccagggacttgtcacacaataacttgtctggctccattccagattgtcttggacagcttccattcctagtgttcctggatctctccagcaatgacctccgtggaccagttccttacactcttcttcaaaaatcccacaatgggactctatcgctaaggcttagtaacaacccaaatttgtctgggaacggatcgggtccaaagaagttgaatggggccgcacttctctccgcgataatcatcccaacagttgccgccactgccttgtctgttaccttcattgctctgctgctccgagcactcaaggaacaagctagaagacgggctgttgatccaactccgagagatgagacggcgttgcttgagaaccgagaattctcttacagagaactgaagcacatcacgaagaactttagcctggagattggcagaggctcaacatctgacgagggtacaccacaagaacctggtatccttgattggctactgtaaggacaaagaccatttcgcccttgtctacgagtacatgcctgaagggaacctgcaggatcatctgagactgagagacacttgcactcacagaccactcacttggcagcaacgccttcagatcgcccttgatgccgctcaaggtctggagtacctgcatgtggcatgcaaaccagcgctgatccacagagacgtgaagagcaggaacatcctcctgaccacgggccttggggctaagatcgccgactttggtctgaccaaggctttcagcgactcggagacacacatcaccactgaaccagctggaacaatgggctacttggatccagagtacgtctcaggccagtccccggtcgtcccggtggacgacagcgtgagcgtccacgtcggcgagtgggtgcagcagagcctcgaccggggcggcggcgtcgagagcgtcgtggatccgagcatgggacggtgcgagcgcggcgactacgacgtcaactccgtctggaaagtcgccgacctcgcgctgcgctgccggcgggaggcctccagggagcggcctacgatgacggacgtggtcgcgcagatcagggagagcgtggagctcgaggcggcccgccggagctcggcgtcgggtgctgctgctgctggtggtggtgggggtctgaggagttgtgccggcgagagggacgcgtttgaggtggtggaaggaagcgttggggagacggcgggggccgcgcctggtccggcgatgatctgagctgaagactctgaactaattaaggtacgagggtggtggtggacatgtgtttcaccgtgagaaacctgctcagcaagggaagatcggaacagtgggccttctttttcttctttttttactggtaatgcattattgttggagacatcgtcgacaggattttgctgatgaagcaaccaggcagctatcttgtctgccggtcacatatataatgtgaggaggttagctagtagtggtaggggaacaattcccttggccagggcgattgaataatacaagtctgaatatgaa

SEQ ID NO: 54035 - DNA, 3012 bp, Zea Mays
atgaagctgagtgctgctgttctcttcttctccatcttgttgcagtactgcaccagcagcggccagccagatagccgaggtttcataagcatcgactgcggcatcccggagaactccacgtaccaggacctcacctccaccatactctacgtctccgaccgcggcttcgtcacctccggcgagaaccgcaacatctccgccggctacatcagcccgtccctcgcgcagcgctactacaccgtccgcgccttcgcgtccggcgttcggaactgctacaccctcccctccctggtcgccgggaacaagtacctcgtccgcgccgccttctactacgcggactacgacggcctgagcacgccgcccgtcttcgacctgtacctgggcgcgagcctctggcacgaggtcaggttcagggacgcggccgcgatcaactggatggacgtcgtggccgtggctcccaccgacttcctgcaggtctgcctggtgaacaagggcaccggcaccccgttcatctccggcctggacctcaggccgctgcggagcactctttacccggaggcgaacgctagccagtcccttgtcatggtcaacgccaaccggtgcaacgtgggacccacggacaagtctgtggttcgcccaaccaaagcacatttctctggcccaacaagcaggtacccgctggacccccacgaccggatctggctggcgtacggcgccgtcccggcctggaccgaggcgtccgccacgtccgtcgtccggaactacctcgccgacccctacgacgcgccgtccgccgtcatgcagagcgccgcgacgccatccgacggctcggtgctcagtttctcgtgggacacgtccgacgaccgctccgtggacgccagcagcgccacgtacctcctcgtcctctacttcgccgagctgcagcgcgtgtcggcgagcggcgagctgcggcggcagttcgacatcgccgtcgacggcaccgcgtggaacagggaaccttactctccgccgtacctcttcgccgactccttctccggcacggtgcaggggcaggcgaggcatagcgtctcgcttactgcgacgaggaacgcgacgctcccgcctcttctcaacgccatggaggtgtacttggtgaggccggtggatgaagctgcaaccgaccctggagatgctaaagccatgatcgcaatccaagaagcttatgttgtgagcaaaaactggatgggtgatccatgtgctccaaaggcttttgcatgggaaggactggactgtactactgatcctccaactggtactccaagaataacagcattaaacttgtcttcaagtgggttgacaggtcccatcactacctattttggagatctgaaagcactccaatacctggacttgtcacacaataacttgtctggctccattccagattgtcttggacagcttccattcctagtgttcctggatctctccagcaatgacctccgtggaccagttccttacactcttcttcaaaaatcccacaatgggactctatcgctaaggcttagtaacaacccaaatttgtctgggaacggatcgggtccaaagaagttgaatggggccgcacttctctccgcgataatcatcccaacagttgccgccactgccttgtctgttaccttcattgctctgctgctccgagcactcaaggaacaagctagaagacgggctgttgatccaactccgagagatgagacggcgttgcttgagaaccgagaattctcttacagagaactgaagcacatcacgaagaactttagcctggagattggcagaggtgggtttggagctgtcttccttgggtacctggggaacggaaacccggtagctgtgaaaatccggtcggagtcgtcttcgcaagggggtaaagagtttctggctgaggctcaacatctgacgagggtacaccacaagaacctggtatccttgattggctactgtaaggacaaagaccatttcgcccttgtctacgagtacatgcctgaagggaacctgcaggatcatctgagactgagagacacttgcactcacagaccactcacttggcagcaacgccttcagatcgcccttgatgccgctcaaggtctggagtacctgcatgtggcatgcaaaccagcgctgatccacagagacgtgaagagcaggaacatcctcctgaccacgggccttggggctaagatcgccgactttggtctgaccaaggctttcagcgactcggagacacacatcaccactgaaccagctggaacaatgggctacttggatccagagtacgtctcaggccagtccccggtcgtcccggtggacgacagcgtgagcgtccacgtcggcgagtgggtgcagcagagcctcgaccggggcggcggcgtcgagagcgtcgtggatccgagcatgggacggtgcgagcgcggcgactacgacgtcaactccgtctggaaagtcgccgacctcgcgctgcgctgccggcgggaggcctccagggagcggcctacgatgacggacgtggtcgcgcagatcagggagagcgtggagctcgaggcggcccgccggagctcggcgtcgggtgctgctgctgctggtggtggtgggggtctgaggagttgtgccggcgagagggacgcgtttgaggtggtggaaggaagcgttggggagacggcgggggccgcgcctggtccggcgatgatctgagctgaagactctgaactaattaaggtacgagggtggtggtggacatgtgtttcaccgtgagaaacctgctcagcaagggaagatcggaacagtgggccttctttttcttctttttttactggtaatgcattattgttggagacatcgtcgacaggattttgctgatgaagcaaccaggcagctatcttgtctgccggtcacatatataatgtgaggaggttagctagtagtggtaggggaacaattcccttggccagggcgattgaataatacaagtctgaatatgaa

SEQ ID NO: 54036 - DNA, 2932 bp, Zea Mays
tctccccccacccaccccgacccttcctcctcccctcggcctctccggcgggcgggcaattcggccatggatcccccacgcggaggaacagtgattgatcctactaaatgtcgattgatgagtgtggatgaaaagcgagaacttgttcgtgatttatcaaagagcccagaaagcgctcctgacaggctccagtcatggacacggcgggaaattgtagagattctttgttctgatcttggaagggagaggaaatatactggtttatccaagcagagaatgctagattatctcttcagggtggtgtctcgaaaatcatctggtccagtggaacatgtacatgagaaagagaaagggaaagataaagagtcaattcttgagcccaatacaactaaccatcagtcccctgccaaacgaccgagaaagagtgacaatccatcacgattaccgattatcacaaacaactcagcagcatctgatgtaactgggccaactaataatctacgcttctgccaaaatttagcttgcagggctattctcagggacaatttttgcagacgctgttcatgctgcatttgttttagttacgatgataacaaggacccaagcctctggttgtcgtgtagttcagaccaacacttacaaaaggatacctgtggtttctcatgccatcttgaatgtgctctaaaggatgaaagaacgggtattctgcagagtggacaaggtgctggaagaaacagctggtgatagcaaaagatgctcgacgattggatgtattgtgtcatcggatttatctcagtcataggatccttgtctccacagagaagtacttggtattgcatgatattgttgatacggcattgaagaaactggaggctgaggtcggtcctttatctggagctccaaatatgggtcgtggaattgtcagtcgacttactgttggtgccgaagttcagaaactttgtgctcaagcagtagatgctgtggaatcattgttctcgggtgtatctcctgctagttcaaaaattcagcgtacgtgggccatgcatgatgcgaccaaactttgtaaagtttgaagctataacccaaacatccgtcatggtatttttggatttggttgattgtcctatgcttgcccaagaggcaacttcttttaatatctggcaccgagtggctgttactgaatcgtacccatcaaatccgactggcataatacttgcgccattgaaaaaattacttgtcacttggctcgcaccggctacaagctatatctttaaggttgtcgcgttcaagaactcaattgagttgggttcatgggaaattagaatgaagacaagctggcaaaaggatgatccaaggggttcaatgccaggtggtaccggactaggacaaaatagtgagagcccaaaggcaaacagtgatggccagtctgatccttcctcagagggtgtggactcaaacaataatactgcagtttatgctgatctaaacaagtctcctgaaagtgattttgagtactgtgaaaatcctgagatccttgattcaaataaagcttctcatcaccccagtgaacgtattaatgacttgcaaaatatacagatggctgcagatggggtaacagaagtcacagagctggaagaagcacctgggctctcagcctcagccttggatgaggaacccaatgcttgtgttcaaacagtgcttctcagggattcaaacccactagaacacaatcagagaactgtggttcctagatcacatgatacatctaatatactggctggacatgagttggtgattgttggacctcgatattctggttctgtgcctcccactgcaccaagaagtgtggaaaacagcaaagacaatggtggaagggcctccaaacccaaaccttgtgacatagttgttcaaaatggctcttcaaagcctgaaagggaaccaggcaattcgtcaaacaaaagagcaacggataaaatggacgactttggccacaaggatagtttctctgaagtgtcctatgaatactgtgtaagggtggtcaggtggctggagtgtgagggctatattgagacaaacttcaggatgaagtttcttacatggtttagcttacgtgccaccctgcaagagagaaagatagttagcgtatatgtggatactcttatcgaggaccctgtcagtctctctggccagctcgtcgacagcttctcggagaggatatatagcaaaaagcggccttccatgccttctggtttctgcatggatctgtggcattaaggaactgcagggtcttaccgttcgctttgtagggagcatattcggcccattcttttgttgcagatcgttgcattgattcttcattggaaatttagctgaagtatttgacttgcacatcttcattgaaactttccttggtgatgacagtaggttatgttatcgtcgggcaacttctttttcccttctgttttttttttcttcatttgctccataataggttacagtgctcccatgttaatcttagagcatcaatgtgctgcattgttcagtcagcttagtgccgtcatgaattttgtggcgtgtagcttgtctgaagaagaggatggttgccaggctggatcaggaatgcgcctgtgggacgaagcaggcttcgtgtggacgctgacgaatccaagctaaccatgtcttgtcggtaaaatggttgtgctgtatcttcggggggatttgcattttcttgctgactctttctgggaatgggaggaatgatgtttaaggtgcagaacgtctgccttaatttaatgttatgttgactcatgctcctttatctgctgcatttgttggttcgatgcatggtgttctgttctatggcctccaggttctgtgttgcacctgtttgagtttcgttccagtgcactgacactgtatatgtccaatctag

SEQ ID NO: 54037 - DNA, 4095 bp, Zea Mays
gccccctgctctgctctgcccagcgggaggacaggagagaggagtccacgcgagcggagaggagaggagagggagaagaacgagggagaggagagagatctccccccacccaccccgacccttcctcctcccctcggcctctccggcgggcgggcaattcggccatggatcccccacgcggaggaaaaatgagatggagatgtctgtactgacatgcaggacacattgacctctttctagtgtagtttcagccatagttatcaaggaggcaaagcgagataaggcgactgcttaccatttggacgcttgtgtgctaaggcgtaaacgatggtgacaccatactagtatggcagctgaaggtttgtgggggagaagggagaatggcatgcaaaaaagaagggtggggagggggtgggtgggtgatgacaccaggtcaagtaaccctaacccatagaggggcaaactagcagcagacgtctgttcattgctgctggagggaggcggctgccgccactgccgtgcgggcttgatgcgacaatccctttgtgctggagtgcagatcggaggctgtgaaccctgcttctgcagtgcaaactggaggtgtaccctgctactgtgtcaaccagaggcagccgctgcagctcgtgatgcgggataagggaggatgattcctcctgagcggtatcctgcagacctcccactctctctctcaaacacttttatctgtcttgtgctctatttctctcacgccacgtctctgtttgtcattcaccagagtctcttgctgttttatcctttattctcctgcttttatctgccgatgacacatcaagtggtgcccgtcacaagtaatttcctgccatttggatgccaaattgacgattttcggaggctacattctatcactccctagactgctccgacgcttaagtgatccttaataacaatggtttttgctaagatgtgctatcttataaaaaccattgtggcctgaaactgacatactcatgcatggtatacttgtaattgtgaatgtgtattggcaaacaaaagaagcttgattacacatgattctgttccaacactatttattgtctgtttattagtttctaggattatgctggaacagctaccatttaatccttgcaaccactatatctttttcttggatgctttatgagatctaataaattcaaggtttctattctgggcttcaacttttttgattttttattatgagttgactacaaagttccttccaaacatgcttctgctatatttttaagcatatttgtgatgcatctaagattttaatgctgcaaaaattcgaattctattttgtatatattaaatgggtggtattggtaatatgttgtgttatttattactccaggaacagtgattgatcctactaaatgtcgattgatgagtgtggatgaaaagcgagaacttgttcgtgatttatcaaagagcccagaaagcgctcctgacaggctccagtcatggacacggcgggaaattgtagagattctttgttctgatcttggaagggagaggaaatatactggtttatccaagcagagaatgctagattatctcttcagggtggtgtctcgaaaatcatctggtccagtggaacatgtacatgagaaagagaaagggaaagataaagagtcaattcttgagcccaatacaactaaccatcagtcccctgccaaacgaccgagaaagagtgacaatccatcacgattaccgattatcacaaacaactcagcagcatctgatgtaactgggccaactaataatctacgcttctgccaaaatttagcttgcagggctattctcagggacaatttttgcagacgctgttcatgctgcatttgttttagttacgatgataacaaggacccaagcctctggttgtcgtgtagttcagaccaacacttacaaaaggatacctgtggtttctcatgccatcttgaatgtgctctaaaggatgaaagaacgggtattctgcagagtggacaaggcaagaaacttgatggtggctattattgcattcgctgttggaaacagaatgatttgcttgggtgctggaagaaacagctggtgatagcaaaagatgctcgacgattggatgtattgtgtcatcggatttatctcagtcataggatccttgtctccacagagaagtacttggtattgcatgatattgttgatacggcattgaagaaactggaggctgaggtcggtcctttatctggagctccaaatatgggtcgtggaattgtcagtcgacttactgttggtgccgaagttcagaaactttgtgctcaagcagtagatgctgtggaatcattgttctcgggtgtatctcctgctagttcaaaaattcagcgtacgtggtgtacactttatgtttggttttgacatatacaaatggaattgactaattgatccacatttccattttcagggccatgcatgatgcgaccaaactttgtaaagtttgaagctataacccaaacatccgtcatggtatttttggatttggttgattgtcctatgcttgcccaagaggcaacttcttttaatatctggcaccgagtggctgttactgaatcgtacccatcaaatccgactggcataatacttgcgccattgaaaaaattacttgtcacttggctcgcaccggctacaagctatatctttaaggttgtcgcgttcaagaactcaattgagttgggttcatgggaaattagaatgaagacaagctggcaaaaggatgatccaaggggttcaatgccaggtggtaccggactaggacaaaatagtgagagcccaaaggcaaacagtgatggccagtctgatccttcctcagagggtgtggactcaaacaataatactgcagtttatgctgatctaaacaagtctcctgaaagtgattttgagtactgtgaaaatcctgagatccttgattcaaataaagcttctcatcaccccagtgaacgtattaatgacttgcaaaatatacagatggctgcagatggggtaacagaagtcacagagctggaagaagcacctgggctctcagcctcagccttggatgaggaacccaatgcttgtgttcaaacagtgcttctcagggattcaaacccactagaacacaatcagagaactgtggttcctagatcacatgatacatctaatatactggctggacatgagttggtgattgttggacctcgatattctggttctgtgcctcccactgcaccaagaagtgtggaaaacagcaaagacaatggtggaagggcctccaaacccaaaccttgtgacatagttgttcaaaatggctcttcaaagcctgaaagggaaccaggcaattcgtcaaacaaaagagcaacggataaaatggacgactttggccacaaggatagtttctctgaagtgtcctatgaatactgtgtaagggtggtcaggtggctggagtgtgagggctatattgagacaaacttcaggatgaagtttcttacatggtttagcttacgtgccaccctgcaagagagaaagatagttagcgtatatgtggatactcttatcgaggaccctgtcagtctctctggccagctcgtcgacagcttctcggagaggatatatagcaaaaagcggccttccatgccttctggtttctgcatggatctgtggcattaaggaactgcagggtcttaccgttcgctttcttgtctgaagaagaggatggttgccaggctggatcaggaatgcgcctgtgggacgaagcaggcttcgtgtggacgctgacgaatccaagctaaccatgtcttgtcggtaaaatggttgtgctgtatcttcggggggatttgcattttcttgctgactctttctgggaatgggaggaatgatgtttaaggtgcagaacgtctgccttaatttaatgttatgttgactcatgctcctttatctgctgcatttgttggttcgatgcatggtgttctgttctatggcctccaggttctgtgttgcacctgtttgagtttcgttccagtgcactgacactgtatatgtccaatctag

SEQ ID NO: 54038 - DNA, 2928 bp, Zea Mays
agcgccccctgctctgctctgcccagcgggaggacaggagagaggagtccacgcgagcggagaggagaggagagggagaagaacgagggagaggagagagatctccccccacccaccccgacccttcctcctcccctcggcctctccggcgggcgggcaattcggccatggatcccccacgcggaggaacagtgattgatcctactaaatgtcgattgatgagtgtggatgaaaagcgagaacttgttcgtgatttatcaaagagcccagaaagcgctcctgacaggctccagtcatggacacggcgggaaattgtagagattctttgttctgatcttggaagggagaggaaatatactggtttatccaagcagagaatgctagattatctcttcagggtggtgtctcgaaaatcatctggtccagtggaacatgtacatgagaaagagaaagggaaagataaagagtcaattcttgagcccaatacaactaaccatcagtcccctgccaaacgaccgagaaagagtgacaatccatcacgattaccgattatcacaaacaactcagcagcatctgatgtaactgggccaactaataatctacgcttctgccaaaatttagcttgcagggctattctcagggacaatttttgcagacgctgttcatgctgcatttgttttagttacgatgataacaaggacccaagcctctggttgtcgtgtagttcagaccaacacttacaaaaggatacctgtggtttctcatgccatcttgaatgtgctctaaaggatgaaagaacgggtattctgcagagtggacaaggcaagaaacttgatggtggctattattgcattcgctgttggaaacagaatgatttgcttgggtgctggaagaaacagctggtgatagcaaaagatgctcgacgattggatgtattgtgtcatcggatttatctcagtcataggatccttgtctccacagagaagtacttggtattgcatgatattgttgatacggcattgaagaaactggaggctgaggtcggtcctttatctggagctccaaatatgggtcgtggaattgtcagtcgacttactgttggtgccgaagttcagaaactttgtgctcaagcagtagatgctgtggaatcattgttctcgggtgtatctcctgctagttcaaaaattcagcggccatgcatgatgcgaccaaactttgtaaagtttgaagctataacccaaacatccgtcatggtatttttggatttggttgattgtcctatgcttgcccaagaggcaacttcttttaatatctggcaccgagtggctgttactgaatcgtacccatcaaatccgactggcataatacttgcgccattgaaaaaattacttgtcacttggctcgcaccggctacaagctatatctttaaggttgtcgcgttcaagaactcaattgagttgggttcatgggaaattagaatgaagacaagctggcaaaaggatgatccaaggggttcaatgccaggtggtaccggactaggacaaaatagtgagagcccaaaggcaaacagtgatggccagtctgatccttcctcagagggtgtggactcaaacaataatactgcagtttatgctgatctaaacaagtctcctgaaagtgattttgagtactgtgaaaatcctgagatccttgattcaaataaagcttctcatcaccccagtgaacgtattaatgacttgcaaaatatacagatggctgcagatggggtaacagaagtcacagagctggaagaagcacctgggctctcagcctcagccttggatgaggaacccaatgcttgtgttcaaacagtgcttctcagggattcaaacccactagaacacaatcagagaactgtggttcctagatcacatgatacatctaatatactggctggacatgagttggtgattgttggacctcgatattctggttctgtgcctcccactgcaccaagaagtgtggaaaacagcaaagacaatggtggaagggcctccaaacccaaaccttgtgacatagttgttcaaaatggctcttcaaagcctgaaagggaaccaggcaattcgtcaaacaaaagagcaacggataaaatggacgactttggccacaaggatagtttctctgaagtgtcctatgaatactgtgtaagggtggtcaggtggctggagtgtgagggctatattgagacaaacttcaggatgaagtttcttacatggtttagcttacgtgccaccctgcaagagagaaagatagttagcgtatatgtggatactcttatcgaggaccctgtcagtctctctggccagctcgtcgacagcttctcggagaggatatatagcaaaaagcggccttccatgccttctggtttctgcatggatctgtggcattaaggaactgcagggtcttaccgttcgctttgtagggagcatattcggcccattcttttgttgcagatcgttgcattgattcttcattggaaatttagctgaagtatttgacttgcacatcttcattgaaactttccttggtgatgacacttgtctgaagaagaggatggttgccaggctggatcaggaatgcgcctgtgggacgaagcaggcttcgtgtggacgctgacgaatccaagctaaccatgtcttgtcggtaaaatggttgtgctgtatcttcggggggatttgcattttcttgctgactctttctgggaatgggaggaatgatgtttaaggtgcagaacgtctgccttaatttaatgttatgttgactcatgctcctttatctgctgcatttgttggttcgatgcatggtgttctgttctatggcctccaggttctgtgttgcacctgtttgagtttcgttccagtgcactgacactgtatatgtccaatctag

SEQ ID NO: 54039 - DNA, 4375 bp, Zea Mays
agcgccccctgctctgctctgcccagcgggaggacaggagagaggagtccacgcgagcggagaggagaggagagggagaagaacgagggagaggagagagatctccccccacccaccccgacccttcctcctcccctcggcctctccggcgggcgggcaattcggccatggatcccccacgcggaggaaaaatgagatggagatgtctgtactgacatgcaggacacattgacctctttctagtgtagtttcagccatagttatcaaggaggcaaagcgagataaggcgactgcttaccatttggacgcttgtgtgctaaggcgtaaacgatggtgacaccatactagtatggcagctgaaggtttgtgggggagaagggagaatggcatgcaaaaaagaagggtggggagggggtgggtgggtgatgacaccaggtcaagtaaccctaacccatagaggggcaaactagcagcagacgtctgttcattgctgctggagggaggcggctgccgccactgccgtgcgggcttgatgcgacaatccctttgtgctggagtgcagatcggaggctgtgaaccctgcttctgcagtgcaaactggaggtgtaccctgctactgtgtcaaccagaggcagccgctgcagctcgtgatgcgggataagggaggatgattcctcctgagcggtatcctgcagacctcccactctctctctcaaacacttttatctgtcttgtgctctatttctctcacgccacgtctctgtttgtcattcaccagagtctcttgctgttttatcctttattctcctgcttttatctgccgatgacacatcaagtggtgcccgtcacaagtaatttcctgccatttggatgccaaattgacgattttcggaggctacattctatcactccctagactgctccgacgcttaagtgatccttaataacaatggtttttgctaagatgtgctatcttataaaaaccattgtggcctgaaactgacatactcatgcatggtatacttgtaattgtgaatgtgtattggcaaacaaaagaagcttgattacacatgattctgttccaacactatttattgtctgtttattagtttctaggattatgctggaacagctaccatttaatccttgcaaccactatatctttttcttggatgctttatgagatctaataaattcaaggtttctattctgggcttcaacttttttgattttttattatgagttgactacaaagttccttccaaacatgcttctgctatatttttaagcatatttgtgatgcatctaagattttaatgctgcaaaaattcgaattctattttgtatatattaaatgggtggtattggtaatatgttgtgttatttattactccaggaacagtgattgatcctactaaatgtcgattgatgagtgtggatgaaaagcgagaacttgttcgtgatttatcaaagagcccagaaagcgctcctgacaggctccagtcatggacacggcgggaaattgtagagattctttgttctgatcttggaagggagaggaaatatactggtttatccaagcagagaatgctagattatctcttcagggtggtgtctcgaaaatcatctggtccagtggaacatgtacatgagaaagagaaagggaaagataaagagtcaattcttgagcccaatacaactaaccatcagtcccctgccaaacgaccgagaaagagtgacaatccatcacgattaccgattatcacaaacaactcagcagcatctgatgtaactgggccaactaataatctacgcttctgccaaaatttagcttgcagggctattctcagggacaatttttgcagacgctgttcatgctgcatttgttttagttacgatgataacaaggacccaagcctctggttgtcgtgtagttcagaccaacacttacaaaaggatacctgtggtttctcatgccatcttgaatgtgctctaaaggatgaaagaacgggtattctgcagagtggacaaggcaagaaacttgatggtggctattattgcattcgctgttggaaacagaatgatttgcttgggtgctggaagaaacagctggtgatagcaaaagatgctcgacgattggatgtattgtgtcatcggatttatctcagtcataggatccttgtctccacagagaagtacttggtattgcatgatattgttgatacggcattgaagaaactggaggctgaggtcggtcctttatctggagctccaaatatgggtcgtggaattgtcagtcgacttactgttggtgccgaagttcagaaactttgtgctcaagcagtagatgctgtggaatcattgttctcgggtgtatctcctgctagttcaaaaattcagcgtacgtggtgtacactttatgtttggttttgacatatacaaatggaattgactaattgatccacatttccattttcagggccatgcatgatgcgaccaaactttgtaaagtttgaagctataacccaaacatccgtcatggtatttttggatttggttgattgtcctatgcttgcccaagaggcaacttcttttaatatctggcaccgagtggctgttactgaatcgtacccatcaaatccgactggcataatacttgcgccattgaaaaaattacttgtcacttggctcgcaccggctacaagctatatctttaaggttgtcgcgttcaagaactcaattgagttgggttcatgggaaattagaatgaagacaagctggcaaaaggatgatccaaggggttcaatgccaggtggtaccggactaggacaaaatagtgagagcccaaaggcaaacagtgatggccagtctgatccttcctcagagggtgtggactcaaacaataatactgcagtttatgctgatctaaacaagtctcctgaaagtgattttgagtactgtgaaaatcctgagatccttgattcaaataaagcttctcatcaccccagtgaacgtattaatgacttgcaaaatatacagatggctgcagatggggtaacagaagtcacagagctggaagaagcacctgggctctcagcctcagccttggatgaggaacccaatgcttgtgttcaaacagtgcttctcagggattcaaacccactagaacacaatcagagaactgtggttcctagatcacatgatacatctaatatactggctggacatgagttggtgattgttggacctcgatattctggttctgtgcctcccactgcaccaagaagtgtggaaaacagcaaagacaatggtggaagggcctccaaacccaaaccttgtgacatagttgttcaaaatggctcttcaaagcctgaaagggaaccaggcaattcgtcaaacaaaagagcaacggataaaatggacgactttggccacaaggatagtttctctgaagtgtcctatgaatactgtgtaagggtggtcaggtggctggagtgtgagggctatattgagacaaacttcaggatgaagtttcttacatggtttagcttacgtgccaccctgcaagagagaaagatagttagcgtatatgtggatactcttatcgaggaccctgtcagtctctctggccagctcgtcgacagcttctcggagaggatatatagcaaaaagcggccttccatgccttctggtttctgcatggatctgtggcattaaggaactgcagggtcttaccgttcgctttgtagggagcatattcggcccattcttttgttgcagatcgttgcattgattcttcattggaaatttagctgaagtatttgacttgcacatcttcattgaaactttccttggtgatgacagtaggttatgttatcgtcgggcaacttctttttcccttctgttttttttttcttcatttgctccataataggttacagtgctcccatgttaatcttagagcatcaatgtgctgcattgttcagtcagcttagtgccgtcatgaattttgtggcgtgtagcttgtctgaagaagaggatggttgccaggctggatcaggaatgcgcctgtgggacgaagcaggcttcgtgtggacgctgacgaatccaagctaaccatgtcttgtcggtaaaatggttgtgctgtatcttcggggggatttgcattttcttgctgactctttctgggaatgggaggaatgatgtttaaggtgcagaacgtctgccttaatttaatgttatgttgactcatgctcctttatctgctgcatttgttggttcgatgcatggtgttctgttctatggcctccaggttctgtgttgcacctgtttgagtttcgttccagtgcactgacactgtatatgtccaatctag

SEQ ID NO: 54040 - DNA, 3657 bp, Zea Mays
gagttccacagatatttctctccatccgtcgggtgtcgcttcctctcccagttctttctggcttttcctcctctctgctttctcgcttttcctcctctctgcctttctttgctaccgtcggcgtcaggcgtcaggaactccgcttccacacgaatatttcgtctattgtcagcttgctcagtggctccgtttgtttggtgagatgtgttttcccctttatccttcgtcgtgcgtttccattcggtggatatctttttccatattcctttgtggattagatccaggcttctctagtcgagatcctcttgctttttaccgagatgaaaattgggaccgaaaaggcaagtatttttctttgatagctttggcatgtgcagacatataaggaagtgttctacctcattgaactctattttggagattgagactgaaaaggcaattatttctttttggtaaagtctttcgcatgtggacatctggttccaattccaatctattgttttttgtcgtatcctcttgctttggtacatttagatctgcaagtaaatgttttttatttcattgaacttcaataagggcaggttatgttctgtttgtactttattgaacttcattatactattttcttttggtaaagttgttcgcatcaagtgcatattgcattctttttagttttttaacggttttgctgtcatcttattttttggctgtgtttccattcttccaactgtgtttccattcttcctttgtcaactatttcaatttcgttaacaactaatttcctttgggtaaaataatctactcgaagttgagatttcgctttcttttgtttatgaacgcaccaagattccaacacgccactatttttcttctctggtttagtagtgaggaaatccctttttacggcctaattttgggtttagggttttaactgatattttgaaggaaaaaaaaagttgttcctctctgtcccgactcttccatctactctctgattgttctgctccagactatggtgtgtaaatctgccgcatcatttttttgttctggaaagctctaaaaacaaggaaattatttgcatcgttttcttaaataaagatagcatcttgcacagttgctttttggagaaagaaaagtaacccggtttgattttgtttgtccaaattagtttcaatttaataccttctcgagttttgcttcctgtttttatcctttgggtttactaaattgcttagactatttgtggatctgtacatattaacttaacacctgcaagcacactgttgctaaatgttgatatatggtggtcgaatgctacttaggccccgtttcaatctcatgggataaagtttagcttcctgctaaactttagttatatgaattgaagtgctaaagtttagcttcaattaccaccattagctctcctgtttagattacaaatggctaaaagtagctaaaaaatagctgctaaagtttatctcgcgagattgaaacagggccttagtacgcattgtagtctaaattcactctataactggtatcagctattacatgttgcaaagtgttgatatatggtggttgaatgctacttagaatgttttgtagtctaaattcactatgcaactggtatcaactatattacataaaaataacgttatatgcttacattttgtttcctgcctacatattatataatcatattatatttaaatttgttttacatggctgggtacttacaccaaactcttaagacatatgtgctcacgcgcgctgggcgcgcgctaaacactagtatagagtagtagagattgaatggctgttcagggcagtgtgttgctacagttcctcgtttataccattactggtcttcctatctctgtcattgctggcactaatagcagatcatatctgcatgtacttttatagactgtatcaattaggctagattagaggacattaggaggatagctttgattctttcctttgcatgtacagtccttcgcataaatccagcctttgcatgtataagtacagcctacacaatagagaattcgttccacctaatcgcctatcttctttcactgaggtcctatcacttgacggaatgcaatcgtgttgggcaggtctggatgagatttcatcgaaacatttgtcaaattatgccatgggagcatcttaggctgttgcattgatttggctgatggctgtagttctgtattcaaatgttcccaatgagccacctttttaaatgtgttcagtgcctcttagaatatgcacagatgagtaacatactaccgtgctgtagtgctggactcgaactactataaatttgcctttctggttatctggtataagttaagattaaatgagccacaccagcagctcccaatctttatgaaatgaatgcaaagccaatggcaagcgaacctgcatggatccatgttttgtattgtggagtaaatcatatttgtttgtgcaatacatgttgtctgagagaggtcgcggaacaagggctgttcgggtgtgagtatccaaaaaaataaatgaatttgttaggtttcaattacttcttttccctgcattttacttagttatactggtagcagcggtggcctgtatgttgtcctggacccgtagaataccagatctaagaataaaaaacgtctgcagcggtatccagtacctcgtcctgtattatccaggggggcggctccatcccgtagatatgggggacaagagagcgtccggcaagtcctccagctcccggctcctcctctcattcgcgtgattgggcatggacccgtaggacatagaggatatgccttataggataccgttgcggataaaatttatttacgggaagaaatcttttggaggaatctttaaattagtatttaggggatgcaatatacaggctaccgttgctaccagtcttagggctagtttgagaacccttttttcccaaaagattttcatttttcaaagaaaaattagttcatttttccttgagaaaataggaatcccttaaaaaaatagtgttttcaaactagcccttaatgttttttttcatgaacagaagctgcggccgtcagaaaagcttgacaggtttcttgagggtagaaacttatatgaagattgtttcattgaggcttatacggtaaaaattcttctgctagtgagatcaagattaagggtacaggagttgcatggacccactagaaattggtggccaaagtaccaaacgagttctttgaaacagcttcagtttttcttgttatgtaccaaatcggtctgccactagtgcaatgaccacagaaacaaaaccagggcaggttcccacttcccaccgtgtaaatagagatgcagtcgtcatttttctagctgtcatttttctagctgggttctagtctttggacgacaaatacaagagtagggttgagattgaccatccgtacgtgcttttcttttttttcatggctcccaatctatctttggttgtatttgaatcttgtgctggggtccaatgcgtaatcttctcgttttgtgagggattctaaagctttgatctctgaagtgacttttctgcacaaatgtatgattagctttacatctggactgatcactgatgaagctgccgattgatttctactggcatca

SEQ ID NO: 54041 - DNA, 833 bp, Zea Mays
ctcggatcgaggcaatgatgttatcagaccccaaagattgcacgctctgcaagggtagagaaataattattggggagcatgttacaaacatgatgcaaattttctccttaaagttggctaagattgatgtggatggtggccccatagagttgtatggatatatcgctacgcgggatgttctcgagccattgcttaactatattgtcaatgttagcaggaatgatcctatcaccatcgagcagggttccctcatagaaatgactggccctaagcgaggcattgagttgtgtggcgaaattatgcttgaatttgacatgaggattaagaggggcggagaagagaaagacgacccacagctgattgatggtgtagcaatcgtactagacgagatgagcatgcctaggagtacttatgcattcacaaaacggatccacggcgattgtggagcggttgacataacggtatcacgccttgactttgcagttgaggcgacgatacaacttcacgtatctgaagtagagggcagcttcagtttgcgtgcgggctgttttaccagtgggttatgtgaagaaatccagatctttaagggcaccattagtgagccgcgtgccttgaggagatgtgttgttgctgcagtacatgatacttggatggatgtgaagttgaaggttgacgactcagggcattcttatagcagtgatgacaatccggaacattggtgtagcttcaaaacgaccagtcatggatggacctgccaacaggttacagtacactgcaaagtggcagccgacatctgaggtcaactaaagcaggagggagaccgagggcaaaag

SEQ ID NO: 54042 - DNA, 410 bp, Zea Mays
ggagcatgcagatgcaaatccttccgccgtcccgcgcgatcatcgatgctctctctcctccgcctccgtagcagcgtcgctccgactctctccagtgcccaatacgccgcctcggcacatctccccgccgttttatggcgttcgttgccaccagcgcttgcgtggcgagcacctccatcatatccacccgcccgtcgtgttttcagcagcatggccaccaccaccatcactaccagtggaatcaaaggcgacgacggcacgtcgtcgttggctaaagcatgcaatgacgaacaagatgggaggacggcggctgtgcatggcgacaaacataccaggaagaagataggccatgatatttttcttcgatgtggcgatgggccctcccggtgagcggagcgacgacgaagaac

SEQ ID NO: 54043 - DNA, 449 bp, Zea Mays
gcgacggccgggagcccgggagcatgcagatgcaaatccttccgccgtcccgcgcgatcatcgatgctctctctcctccgcctccgtagcagcgtcgctccgactctctccagtgcccaatacgccgcctcggcacatctccccgccgttttatggcgttcgttgccaccagcgcttgcgtggcgagcacctccatcatatccacccgcccgtcgtgttttcagatttcgaattggatctcgcagcagcatggccaccaccaccatcactaccagtggaatcaaaggcgacgacggcacgtcgtcgttggctaaagcatgcaatgacgaacaagatgggaggacggcggctgtgcatggcgacaaacataccaggaagaagataggccatgatatttttcttcgatgtggcgatgggccctcccggtgagcggagcgacgacgaagaac

SEQ ID NO: 54044 - DNA, 987 bp, Zea Mays
ggctgaggttgttctaccagctatatcgatctgcccttggtgcttgctggtatcattacaatctggtagttttagtggttgggcttgacttcctactattcagaaacacagtaccgagaagtctttaggtggggtcaaagatggtgtcgctgaagttgcaaaagcgccttgccgcgagctacctcaagtgtgggaaaggcaaggtgtggcttgacccaaatgaagttagtgagatctccatggcaaactcccgccagaatatccggaagttggttaaggatgggtttatcatcaagaagcctcataagatccactctagatcccgtgcaagaagggcacatgacgccaagcaaaagggacgccactcaggatatggtaagcgtaggggtaccagggaggctaggctacccaccaaggttctgtggatgaggaggatgcgtgtgctgaggcgccttctccgcaagtatcgtgaggccaagaagattgacaagcacatgtatcatgacatgtacatgaaggtcaaaggtaacgccttcaagaacaagagggtgcttatggagagtatccacaagtccaaggctgagaaggccagagagaagacactttctgaccagtttgaggccaagcgcgccaagagcaaggcgagccgtgagaggaagatcgctaggagggaggagaggttggcccagggtccacgagaaataacaccacctgtctcatccacagctccagctactggggcaccgaagaaagcaaagaagtgaagtattgaaataaagctgtagctttctagtccagtactgcactttcttttataagctctagtcaaattttggagcgcctgaactgttttgctgttatataacttagtgtattgataaattcgactatcacatctggattattctgctggataatgtccgtgtctttgatgtttgtgttaaattcctattctggatgagcacctggccctaactttactccctc

SEQ ID NO: 54045 - DNA, 963 bp, Zea Mays
ggcctgcaacttaatttcaagaagccgagtcaaatcgagctttaagaattgatactgctgctttccgtgacgatggttacgtgatgagtcttggttctcttggccataagatctcaaggcggtgaacaagctctcatgcagacattgaaccgtgcacgtgaactctatgcacagagattgcaggccagtcctagtgttgatgagcttgcctctttgcttgcccaatgtgccatagcagaggctcagtcatcaaatactaaccctccacaagggcctgggtcagaccctgtcaatatgctgaattctgatgaggcctgcattcttgctgagagtggaaggaagcagatcatcctggacgcatttgctgatgggagcagcttcatttgcttgaaatgtggggggctctttagcacatctcgcaaggatgagcacttagcctactggtgcgggactgcatgatcctggttacgtcttgctgtggtatatccatggtcacacctagcaatgaaccgatgatcatgatacccgtgagattttgtataaactttgttctgttccaatccgattactgcttctttactgcggggatgccagaggcacgtctgttaagtcgtagtaaatacatttgccgatgacaaactttatgaacgaaagtttccatctctatccgcttgttgtacttgtgctttcggctgatggaatgtgttgagatgtttggcatggtcatcaaattctaatagttgaatgtgacgaagcaatgttcttgtggttagctctgatctgatcacgcaaatactgaagctgggtagaaagtttggaggaactgatgatatgccccttcgctttcggttttattgagttgaaaactggatttagcagtgatattcatgagaaaaatctgcaaagaagatagagcactgccatcactacctgctaccataaaaaggttggttttcacattcc

SEQ ID NO: 54046 - DNA, 939 bp, Zea Mays
cattgatggcatccgaagtaagggcctgcaacttaatttcaagaagccgagtcaaatcgagctttaagagttctcttggccataagatctcaaggcggtgaacaagctctcatgcagacattgaaccgtgcacgtgaactctatgcacagagattgcaggccagtcctagtgttgatgagcttgcctctttgcttgcccaatgtgccatagcagaggctcagtcatcaaatactaaccctccacaagggcctgggtcagaccctgtcaatatgctgaattctgatgaggcctgcattcttgctgagagtggaaggaagcagatcatcctggacgcatttgctgatgggagcagcttcatttgcttgaaatgtggggggctctttagcacatctcgcaaggatgagcacttagcctactggtgcgggactgcatgatcctggttacgtcttgctgtggtatatccatggtcacacctagcaatgaaccgatgatcatgatacccgtgagattttgtataaactttgttctgttccaatccgattactgcttctttactgcggggatgccagaggcacgtctgttaagtcgtagtaaatacatttgccgatgacaaactttatgaacgaaagtttccatctctatccgcttgttgtacttgtgctttcggctgatggaatgtgttgagatgtttggcatggtcatcaaattctaatagttgaatgtgacgaagcaatgttcttgtggttagctctgatctgatcacgcaaatactgaagctgggtagaaagtttggaggaactgatgatatgccccttcgctttcggttttattgagttgaaaactggatttagcagtgatattcatgagaaaaatctgcaaagaagatagagcactgccatcactacctgctaccataaaaaggttggttttcacattcc

SEQ ID NO: 54047 - DNA, 1233 bp, Zea Mays
tgaaggaaaacgggcgagagactagacaaaccatagaagccgccactcacgcctggaagcatctggaggcgtggcacggcagccgtcgcccgccacaccagcagcgaactgcttcccggtgcccgcggcggcgaagcacaggagagaggcggcgagtgaaaccgatgacgccgccgatggatccgcccgacgtcgagatggagatggagcccgcgccccagcctccggctccgacagcggtcggggaggggtggagcatgctgtcgcgcgcccgcgggctgctcgaggagggcaaaccgtccctcgctctgcaggcgattgatactgctgctttccgtgacgatggttacgtgatgagtcttggttctcttggccataagatctcaaggcggtgaacaagctctcatgcagacattgaaccgtgcacgtgaactctatgcacagagattgcaggccagtcctagtgttgatgagcttgcctctttgcttgcccaatgtgccatagcagaggctcagtcatcaaatactaaccctccacaagggcctgggtcagaccctgtcaatatgctgaattctgatgaggcctgcattcttgctgagagtggaaggaagcagatcatcctggacgcatttgctgatgggagcagcttcatttgcttgaaatgtggggggctctttagcacatctcgcaaggatgagcacttagcctactggtgcgggactgcatgatcctggttacgtcttgctgtggtatatccatggtcacacctagcaatgaaccgatgatcatgatacccgtgagattttgtataaactttgttctgttccaatccgattactgcttctttactgcggggatgccagaggcacgtctgttaagtcgtagtaaatacatttgccgatgacaaactttatgaacgaaagtttccatctctatccgcttgttgtacttgtgctttcggctgatggaatgtgttgagatgtttggcatggtcatcaaattctaatagttgaatgtgacgaagcaatgttcttgtggttagctctgatctgatcacgcaaatactgaagctgggtagaaagtttggaggaactgatgatatgccccttcgctttcggttttattgagttgaaaactggatttagcagtgatattcatgagaaaaatctgcaaagaagatagagcactgccatcactacctgctaccataaaaaggttggttttcacattcc

SEQ ID NO: 54048 - DNA, 2871 bp, Zea Mays
cattcaactactcaattgtaagaggcaaattattggttggtctgttattaactgctggaccaacaaaaggcctgttccacttgagcattgcctgttctactctggagaagtgtacaaaatatgtgagagggatatgtttcttgctcaaggatttaaagaagcaaaagatgctttcaaaaagaaaaatttgaataagtttggagtgaaacctggttcaaagtcaggaacccctgcagtacgtgctggaactcaaggcaaaaatccagatacatccaacaaggggagagatcaaaagtacccaaagcaccgcaattccaattcaggagtagccacagttcaacagagctcctcagggccaaagagatttgaatctttattttggatgccacttgtgaataaccttctgaagaaatcccttgtgcctgtggtgattttttgtttctcaaagaatcgctgtgataaatcggcagatagtatgtttggcactgatctcaccagtagttcagagaaaagtgaaatacgtgtcttctgtgacaaggcattttcacgtcttaaaggatctgataggaaccttccacaggttgtaggaatacaaagccttctgcgaagaggaattggagtacaccacgctgggcttctccctattgtgaaggaagttgttgagatgctgttttgccgtggtgtaatcaaggtactgttttccactgagacatttgcaatgggtgtcaatgcaccggcaagaacggttgtgtttgattctttaagaaagtttgatggaaaagaacaccggaaattgcttccaggggaatatatacaaatggctgggcgagctggtcggagaggacttgataacattggtactgtgatcattatgtgtcgtgatgaaattcctgaagaaagcgatttgaaaaatttgatcgttggaaaaccaactcgtttggaatctcaatttcgattaacatacaccatgatactacatcttctgcgtgtggaggaactgaaggtcgaggacatgctcaagagaagttttgctgaattccacgcacaaaagaatttgcctgagaaggaaaagcttcttctgcaaatgcttcgtcaacctacaaggacaatagagtgcataaaaggagagccttctattgaggaatactacgagatgactttagatgctgaggcacacagggaatacataacagaagcaattatgcagctgcctaattctcaacagtttcttacgcctgggagattggtggttgttaaatctgattctgatgatgatcacttgcttggtgttatactgaaaaatccatctgcattgctaaagaaatatgttgttctggtattgactggtgattgcagttcatctgcactagcccctgagttcaataaaaatgaaaagggtcctgtggattttcaaggaggacaatttattgtcctgaaaggaaaacgtggcatggacgatgaatatttctcttctgttagttcacgaaaagcttcaggtgtaatcaatatcaatctaccatacaagggggatgcatctggaatgggctttgaagtaagagcaattgagaataaagaaatcattagtatatgcagcagcaaaataaagattgatcaagtcagacttcttgaggagcctaacaaaactgcatactctagaactgtccaacagcttataaaggagcaaccagatggaaccaagtatcctcctgctttagatgcaataaaagatctaaaaatgaaagacatgtatcttgttgaaagttaccgtgcatatcacatactactgcaaaaaatgtctgaaaacaagtgccatggttgtataaaactgaaggagcatatatcattgatgagggagcaaaagatgtacaaggatcagttgaatgaattgaaattccaaatgtccgacgaggcacttcaacaaatgccagagtttcaaggcagaattgatgtactaaaggtaatccactacattgattctgatctagttgtgcaacttaagggtcgggtagcatgtgaaatgaactccggtgaggagttaatatcaacagaatgtctgtttgaaaatcaattggatgacctagaacccgaagaagctgtggctattatgtctgcattcgtcttccaacaacgcaatgcttcagaaccatctcttactccaaaactggctgaagcgaagaagaggctctatgatacagccataaaattagggaagctccaatccgagttcaaggtgcctgtggaccctgaagagtatgcacgtgataatctcaagtttggccttgttgaggtcgtctacgagtgggcaaaggggacgcctttcgcagacatatgcgagctgactgatgtatccgaagggatcattgtaagaacaatcgtccgtctggacgaaacatgtagggaattcaggaatgcagcttccatcatggggaactctgcgctgttcaagaagatggaggtcgcgtctaacgctattaagcgtgacattgtgtttgcagcaagtttgtatgtcacaggaatctgatgcatgtaacctcgtagtctcccttgcttcttttgttagagaaatcgttgtgctggtggaatgctactaacctaaccttagctagaacaattgttgtggtatttttttttccagttctggattattgcttttgctagttttgcgaagttttctgaagcggcgaccagcagagtaaaggaaaatcgaaagcgggtgggattctcgtttttttttcactgagaatatgattattgtattattagcggaaacaaaacgttctcgtactcaagacacctggaatccgtctagtaggagctcgatgtctaaagcaaaagtgcttaactggattgggaaacactgagatgcatgcc

SEQ ID NO: 54049 - DNA, 4578 bp, Zea Mays
gtcattgccatcctccatccctctgaactccgaaggccgaaccagttccgacgaaacggtacggtgacggctcacctcgggggtctccatgtccatggacggccctgccacctcgccggcaagcgaggtgccgttccgcatcagcttctccggccacagcggccacctccgcctcgaccctaccccgcacacgcccagccccattccggacttcgtcctgccgccggcatacccggccgagagcccgagcagcgtgaaggagtacctcgagaggaactacctcgaccccgagctgcacctccccaccgcggccgatagcgggagggtgtgggatgtcgactggtttgccctggccaggccgccgctggagccctccgccccccgcaccatgctcgcgcccgtctgggtgccgcctttccggcgcgggcaggagaagttgcaatccgcggcagagtcgcgagtgtgggaccctgagtccgtgcaaatggagatggtcgacgtgttcgattcggggaccggggggatagcgccccggatgcctggtccggcgaaggacttcgtcagggggagcatcaacaacagaccttttcgtccaggcggtctgcaggatgacgccgctgaggcggctgcgctggaaaaggcgttcccagagggtgcaaggactggtgattgggtgcgtgagctcatgagcggtggcccggcgcaggttgcgcctccagggttccgtaagggattggagctgggccagttgaagcggctacttttcttgtaggggtatgaaagccactggaagtgtttccgggatggagaacttgtagaggagcaacctgcatcatcatcgaatgacacaatggagaagtactctgtgcagtttgatgatcttttcaagatagcgtgggaggaagatactgccaacaagttgttgaaggacggtgttgttcaacaatctgctgaaggtgaaggaatcaatgaaattggcgaacaaaaagttgatgcattgcaggatgagttcgagagtataacaacgctagatgacgagaaacaggaagttgatgtcataagaaatgttcctgaaactcaaacagacttggatcagatgttatcttctgaagtacaggatacaggcagggaaccaggtgcatcaggtgataagaagccaacacaagatggcatggtttgggcacttgttggtggggacgaggacatagtgactaacttctccaaactcgttccagatatggcaatcgagtttccatttgaattggataagttccagaaggaggctatatattatctcgagaagggtgaatcagtctttgttgcagcccatacttcagctggaaagacggttgttgctgagtatgcattcgcattagcaacgaaacattgcactaggtctgtctatactgctcctattaaaactatcagcaaccagaaatacagagatttttctgggaagtttgatgtgggacttctgacaggagatgttagcatcaggccagaggcaacttgcttaattatgactactgagatattgcgttcaatgctctacagaggcgcagacattatacgtgatattgaatgggtaatctttgatgaagtgcattatgtaaatgatgctgaaagaggtgtagtctgggaggaggtcattataatgctcccgaagcacattaacattgttcttctttcggcaacggtcccaaatactgttgaatttgctgactggattggtcggacaaagcagaagaaaattcgtgtcacatcgaccaacaaaaggcctgttccacttgagcattgcctgttctactctggagaagtgtacaaaatatgtgagagggatatgtttcttgctcaaggatttaaagaagcaaaagatgctttcaaaaagaaaaatttgaataagtttggagtgaaacctggttcaaagtcaggaacccctgcagtacgtgctggaactcaaggcaaaaatccagatacatccaacaaggggagagatcaaaagtacccaaagcaccgcaattccaattcaggagtagccacagttcaacagagctcctcagggccaaagagatttgaatctttattttggatgccacttgtgaataaccttctgaagaaatcccttgtgcctgtggtgattttttgtttctcaaagaatcgctgtgataaatcggcagatagtatgtttggcactgatctcaccagtagttcagagaaaagtgaaatacgtgtcttctgtgacaaggcattttcacgtcttaaaggatctgataggaaccttccacaggttgtaggaatacaaagccttctgcgaagaggaattggagtacaccacgctgggcttctccctattgtgaaggaagttgttgagatgctgttttgccgtggtgtaatcaaggtactgttttccactgagacatttgcaatgggtgtcaatgcaccggcaagaacggttgtgtttgattctttaagaaagtttgatggaaaagaacaccggaaattgcttccaggggaatatatacaaatggctgggcgagctggtcggagaggacttgataacattggtactgtgatcattatgtgtcgtgatgaaattcctgaagaaagcgatttgaaaaatttgatcgttggaaaaccaactcgtttggaatctcaatttcgattaacatacaccatgatactacatcttctgcgtgtggaggaactgaaggtcgaggacatgctcaagagaagttttgctgaattccacgcacaaaagaatttgcctgagaaggaaaagcttcttctgcaaatgcttcgtcaacctacaaggacaatagagtgcataaaaggagagccttctattgaggaatactacgagatgactttagatgctgaggcacacagggaatacataacagaagcaattatgcagctgcctaattctcaacagtttcttacgcctgggagattggtggttgttaaatctgattctgatgatgatcacttgcttggtgttatactgaaaaatccatctgcattgctaaagaaatatgttgttctggtattgactggtgattgcagttcatctgcactagcccctgagttcaataaaaatgaaaagggtcctgtggattttcaaggaggacaatttattgtcctgaaaggaaaacgtggcatggacgatgaatatttctcttctgttagttcacgaaaagcttcaggtgtaatcaatatcaatctaccatacaagggggatgcatctggaatgggctttgaagtaagagcaattgagaataaagaaatcattagtatatgcagcagcaaaataaagattgatcaagtcagacttcttgaggagcctaacaaaactgcatactctagaactgtccaacagcttataaaggagcaaccagatggaaccaagtatcctcctgctttagatgcaataaaagatctaaaaatgaaagacatgtatcttgttgaaagttaccgtgcatatcacatactactgcaaaaaatgtctgaaaacaagtgccatggttgtataaaactgaaggagcatatatcattgatgagggagcaaaagatgtacaaggatcagttgaatgaattgaaattccaaatgtccgacgaggcacttcaacaaatgccagagtttcaaggcagaattgatgtactaaaggtaatccactacattgattctgatctagttgtgcaacttaagggtcgggtagcatgtgaaatgaactccggtgaggagttaatatcaacagaatgtctgtttgaaaatcaattggatgacctagaacccgaagaagctgtggctattatgtctgcattcgtcttccaacaacgcaatgcttcagaaccatctcttactccaaaactggctgaagcgaagaagaggctctatgatacagccataaaattagggaagctccaatccgagttcaaggtgcctgtggaccctgaagagtatgcacgtgataatctcaagtttggccttgttgaggtcgtctacgagtgggcaaaggggacgcctttcgcagacatatgcgagctgactgatgtatccgaagggatcattgtaagaacaatcgtccgtctggacgaaacatgtagggaattcaggaatgcagcttccatcatggggaactctgcgctgttcaagaagatggaggtcgcgtctaacgctattaagcgtgacattgtgtttgcagcaagtttgtatgtcacaggaatctgatgcatgtaacctcgtagtctcccttgcttcttttgttagagaaatcgttgtgctggtggaatgctactaacctaaccttagctagaacaattgttgtggtatttttttttccagttctggattattgcttttgctagttttgcgaagttttctgaagcggcgaccagcagagtaaaggaaaatcgaaagcgggtgggattctcgtttttttttcactgagaatatgattattgtattattagcggaaacaaaacgttctcgtactcaagacacctggaatccgtctagtaggagctcgatgtctaaagcaaaagtgcttaactggattgggaaacactgagatgcatgcc

SEQ ID NO: 54050 - DNA, 4467 bp, Zea Mays
aacagtcattgccatcctccatccctctgaactccgaaggccgaaccagttccgacgaaacggtacggtgacggctcacctcgggggtctccatgtccatggacggccctgccacctcgccggcaagcgaggtgccgttccgcatcagcttctccggccacagcggccacctccgcctcgaccctaccccgcacacgcccagccccattccggacttcgtcctgccgccggcatacccggccgagagcccgagcagcgtgaaggagtacctcgagaggaactacctcgaccccgagctgcacctccccaccgcggccgatagcgggagggtgtgggatgtcgactggtttgccctggccaggccgccgctggagccctccgccccccgcaccatgctcgcgcccgtctgggtgccgcctttccggcgcgggcaggagaagttgcaatccgcggcagagtcgcgagtgtgggaccctgagtccgtgcaaatggagatggtcgacgtgttcgattcggggaccggggggatagcgccccggatgcctggtccggcgaaggacttcgtcagggggagcatcaacaacagaccttttcgtccaggcggtctgcaggatgacgccgctgaggcggctgcgctggaaaaggcgttcccagagggtgcaaggactggtgattgggtgcgtgagctcatgagcggtggcccggcgcaggttgcgcctccagggttccgtaagggattggagctgggccagttgaaggggtatgaaagccactggaagtgtttccgggatggagaacttgtagaggagcaacctgcatcatcatcgaatgacacaatggagaagtactctgtgcagtttgatgatcttttcaagatagcgtgggaggaagatactgccaacaagttgttgaaggacggtgttgttcaacaatctgctgaaggtgaaggaatcaatgaaattggcgaacaaaaagttgatgcattgcaggatgagttcgagagtataacaacgctagatgacgagaaacaggaagttgatgtcataagaaatgttcctgaaactcaaacagacttggatcagatgttatcttctgaagtacaggatacaggcagggaaccaggtgcatcaggtgataagaagccaacacaagatggcatggtttgggcacttgttggtggggacgaggacatagtgactaacttctccaaactcgttccagatatggcaatcgagtttccatttgaattggataagttccagaaggaggctatatattatctcgagaagggtgaatcagtctttgttgcagcccatacttcagctggaaagacggttgttgctgagtatgcattcgcattagcaacgaaagagatgttagcatcaggccagaggcaacttgcttaattatgactactgagatattgcgttcaatgctctacagaggcgcagacattatacgtgatattgaatgggtaatctttgatgaagtgcattatgtaaatgatgctgaaagaggtgtagtctgggaggaggtcattataatgctcccgaagcacattaacattgttcttctttcggcaacggtcccaaatactgttgaatttgctgactggattggtcggacaaagcagaagaaaattcgtgtcacatcgaccaacaaaaggcctgttccacttgagcattgcctgttctactctggagaagtgtacaaaatatgtgagagggatatgtttcttgctcaaggatttaaagaagcaaaagatgctttcaaaaagaaaaatttgaataagtttggagtgaaacctggttcaaagtcaggaacccctgcagtacgtgctggaactcaaggcaaaaatccagatacatccaacaaggggagagatcaaaagtacccaaagcaccgcaattccaattcaggagtagccacagttcaacagagctcctcagggccaaagagatttgaatctttattttggatgccacttgtgaataaccttctgaagaaatcccttgtgcctgtggtgattttttgtttctcaaagaatcgctgtgataaatcggcagatagtatgtttggcactgatctcaccagtagttcagagaaaagtgaaatacgtgtcttctgtgacaaggcattttcacgtcttaaaggatctgataggaaccttccacaggttgtaggaatacaaagccttctgcgaagaggaattggagtacaccacgctgggcttctccctattgtgaaggaagttgttgagatgctgttttgccgtggtgtaatcaaggtactgttttccactgagacatttgcaatgggtgtcaatgcaccggcaagaacggttgtgtttgattctttaagaaagtttgatggaaaagaacaccggaaattgcttccaggggaatatatacaaatggctgggcgagctggtcggagaggacttgataacattggtactgtgatcattatgtgtcgtgatgaaattcctgaagaaagcgatttgaaaaatttgatcgttggaaaaccaactcgtttggaatctcaatttcgattaacatacaccatgatactacatcttctgcgtgtggaggaactgaaggtcgaggacatgctcaagagaagttttgctgaattccacgcacaaaagaatttgcctgagaaggaaaagcttcttctgcaaatgcttcgtcaacctacaaggacaatagagtgcataaaaggagagccttctattgaggaatactacgagatgactttagatgctgaggcacacagggaatacataacagaagcaattatgcagctgcctaattctcaacagtttcttacgcctgggagattggtggttgttaaatctgattctgatgatgatcacttgcttggtgttatactgaaaaatccatctgcattgctaaagaaatatgttgttctggtattgactggtgattgcagttcatctgcactagcccctgagttcaataaaaatgaaaagggtcctgtggattttcaaggaggacaatttattgtcctgaaaggaaaacgtggcatggacgatgaatatttctcttctgttagttcacgaaaagcttcaggtgtaatcaatatcaatctaccatacaagggggatgcatctggaatgggctttgaagtaagagcaattgagaataaagaaatcattagtatatgcagcagcaaaataaagattgatcaagtcagacttcttgaggagcctaacaaaactgcatactctagaactgtccaacagcttataaaggagcaaccagatggaaccaagtatcctcctgctttagatgcaataaaagatctaaaaatgaaagacatgtatcttgttgaaagttaccgtgcatatcacatactactgcaaaaaatgtctgaaaacaagtgccatggttgtataaaactgaaggagcatatatcattgatgagggagcaaaagatgtacaaggatcagttgaatgaattgaaattccaaatgtccgacgaggcacttcaacaaatgccagagtttcaaggcagaattgatgtactaaaggtaatccactacattgattctgatctagttgtgcaacttaagggtcgggtagcatgtgaaatgaactccggtgaggagttaatatcaacagaatgtctgtttgaaaatcaattggatgacctagaacccgaagaagctgtggctattatgtctgcattcgtcttccaacaacgcaatgcttcagaaccatctcttactccaaaactggctgaagcgaagaagaggctctatgatacagccataaaattagggaagctccaatccgagttcaaggtgcctgtggaccctgaagagtatgcacgtgataatctcaagtttggccttgttgaggtcgtctacgagtgggcaaaggggacgcctttcgcagacatatgcgagctgactgatgtatccgaagggatcattgtaagaacaatcgtccgtctggacgaaacatgtagggaattcaggaatgcagcttccatcatggggaactctgcgctgttcaagaagatggaggtcgcgtctaacgctattaagcgtgacattgtgtttgcagcaagtttgtatgtcacaggaatctgatgcatgtaacctcgtagtctcccttgcttcttttgttagagaaatcgttgtgctggtggaatgctactaacctaaccttagctagaacaattgttgtggtatttttttttccagttctggattattgcttttgctagttttgcgaagttttctgaagcggcgaccagcagagtaaaggaaaatcgaaagcgggtgggattctcgtttttttttcactgagaatatgattattgtattattagcggaaacaaaacgttctcgtactcaagacacctggaatccgtctagtaggagctcgatgtctaaagcaaaagtgcttaactggattgggaaacactgagatgcatgcc

SEQ ID NO: 54051 - DNA, 4397 bp, Zea Mays
gtgcaacagtcattgccatcctccatccctctgaactccgaaggccgaaccagttccgacgaaacggtacggtgacggctcacctcgggggtctccatgtccatggacggccctgccacctcgccggcaagcgaggtgccgttccgcatcagcttctccggccacagcggccacctccgcctcgaccctaccccgcacacgcccagccccattccggacttcgtcctgccgccggcatacccggccgagagcccgagcagcgtgaaggagtacctcgagaggaactacctcgaccccgagctgcacctccccaccgcggccgatagcgggagggtgtgggatgtcgactggtttgccctggccaggccgccgctggagccctccgccccccgcaccatgctcgcgcccgtctgggtgccgcctttccggcgcgggcaggagaagttgcaatccgcggcagagtcgcgagtgtgggaccctgagtccgtgcaaatggagatggtcgacgtgttcgattcggggaccggggggatagcgccccggatgcctggtccggcgaaggacttcgtcagggggagcatcaacaacagaccttttcgtccaggcggtctgcaggatgacgccgctgaggcggctgcgctggaaaaggcgttcccagagggtgcaaggactggtgattgggtgcgtgagctcatgagcggtggcccggcgcaggttgcgcctccagggttccgtaagggattggagctgggccagttgaaggggtatgaaagccactggaagtgtttccgggatggagaacttgtagaggagcaacctgcatcatcatcgaatgacacaatggagaagtactctgtgcagtttgatgatcttttcaagatagcgtgggaggaagatactgccaacaagttgttgaaggacggtgttgttcaacaatctgctgaagaaattggcgaacaaaaagttgatgcattgcaggatgagttcgagagtataacaacgctagatgacgagaaacaggaagttgatgtcataagaaatgttcctgaaactcaaacagacttggatcagatgttatcttctgaagtacaggatacaggcagggaaccaggtgcatcaggtgataagaagccaacacaagatggcatggtttgggcacttgttggtggggacgaggacatagtgactaacttctccaaactcgttccagatatggcaatcgagtttccatttgaattggataagttccagaaggaggctatatattatctcgagaagggtgaatcagtctttgttgcagcccatacttcagctggaaagacggttgttgctgagtatgcattcgcattagcaacgaaacattgcactaggtctgtctatactgctcctattaaaactatcagcaaccagaaatacagagatttttctgggaagtttgatgtgggacttctgacaggagatgttagcatcaggccagaggcaacttgcttaattatgactactgagatattgcgttcaatgctctacagaggcgcagacattatacgtgatattgaatgggtaatctttgatgaagtgcattatgtaaatgatgctgaaagaggtgtagtctgggaggaggtcattataatgctcccgaagcacattaacattgttcttctttcggcaacggtcccaaatactgttgaatttgctgactggattggtcggacaaagcagaagaaaattcgtgtcacatcgaccaacaaaaggcctgttccacttgagcattgcctgttctactctggagaagtgtacaaaatatgtgagagggatatgtttcttgctcaaggatttaaagaagcaaaagatgctttcaaaaagaaaaatttgaataagtttggagtgaaacctggttcaaagtcaggaacccctgcagtacgtgctggaactcaaggcaaaaatccagatacatccaacaaggggagagatcaaaagtacccaaagcaccgcaattccaattcaggagtagccacagttcaacagagctcctcagggccaaagagatttgaatctttattttggatgccacttgtgaataaccttctgaagaaatcccttgtgcctgttgtaggaatacaaagccttctgcgaagaggaattggagtacaccacgctgggcttctccctattgtgaaggaagttgttgagatgctgttttgccgtggtgtaatcaaggtactgttttccactgagacatttgcaatgggtgtcaatgcaccggcaagaacggttgtgtttgattctttaagaaagtttgatggaaaagaacaccggaaattgcttccaggggaatatatacaaatggctgggcgagctggtcggagaggacttgataacattggtactgtgatcattatgtgtcgtgatgaaattcctgaagaaagcgatttgaaaaatttgatcgttggaaaaccaactcgtttggaatctcaatttcgattaacatacaccatgatactacatcttctgcgtgtggaggaactgaaggtcgaggacatgctcaagagaagttttgctgaattccacgcacaaaagaatttgcctgagaaggaaaagcttcttctgcaaatgcttcgtcaacctacaaggacaatagagtgcataaaaggagagccttctattgaggaatactacgagatgactttagatgctgaggcacacagggaatacataacagaagcaattatgcagctgcctaattctcaacagtttcttacgcctgggagattggtggttgttaaatctgattctgatgatgatcacttgcttggtgttatactgaaaaatccatctgcattgctaaagaaatatgttgttctggtattgactggtgattgcagttcatctgcactagcccctgagttcaataaaaatgaaaagggtcctgtggattttcaaggaggacaatttattgtcctgaaaggaaaacgtggcatggacgatgaatatttctcttctgttagttcacgaaaagcttcaggtgtaatcaatatcaatctaccatacaagggggatgcatctggaatgggctttgaagtaagagcaattgagaataaagaaatcattagtatatgcagcagcaaaataaagattgatcaagtcagacttcttgaggagcctaacaaaactgcatactctagaactgtccaacagcttataaaggagcaaccagatggaaccaagtatcctcctgctttagatgcaataaaagatctaaaaatgaaagacatgtatcttgttgaaagttaccgtgcatatcacatactactgcaaaaaatgtctgaaaacaagtgccatggttgtataaaactgaaggagcatatatcattgatgagggagcaaaagatgtacaaggatcagttgaatgaattgaaattccaaatgtccgacgaggcacttcaacaaatgccagagtttcaaggcagaattgatgtactaaaggtaatccactacattgattctgatctagttgtgcaacttaagggtcgggtagcatgtgaaatgaactccggtgaggagttaatatcaacagaatgtctgtttgaaaatcaattggatgacctagaacccgaagaagctgtggctattatgtctgcattcgtcttccaacaacgcaatgcttcagaaccatctcttactccaaaactggctgaagcgaagaagaggctctatgatacagccataaaattagggaagctccaatccgagttcaaggtgcctgtggaccctgaagagtatgcacgtgataatctcaagtttggccttgttgaggtcgtctacgagtgggcaaaggggacgcctttcgcagacatatgcgagctgactgatgtatccgaagggatcattgtaagaacaatcgtccgtctggacgaaacatgtagggaattcaggaatgcagcttccatcatggggaactctgcgctgttcaagaagatggaggtcgcgtctaacgctattaagcgtgacattgtgtttgcagcaagtttgtatgtcacaggaatctgatgcatgtaacctcgtagtctcccttgcttcttttgttagagaaatcgttgtgctggtggaatgctactaacctaaccttagctagaacaattgttgtggtatttttttttccagttctggattattgcttttgctagttttgcgaagttttctgaagcggcgaccagcagagtaaaggaaaatcgaaagcgggtgggattctcgtttttttttcactgagaatatgattattgtattattagcggaaacaaaacgttctcgtactcaagacacctggaatccgtctagtaggagctcgatgtctaaagcaaaagtgcttaactggattgggaaacactgagatgcatgcc

SEQ ID NO: 54052 - DNA, 4491 bp, Zea Mays
cactcgtttggtcgcttccatctcaagtgctggttgtgcaacagtcattgccatcctccatccctctgaactccgaaggccgaaccagttccgacgaaacggtacggtgacggctcacctcgggggtctccatgtccatggacggccctgccacctcgccggcaagcgaggtgccgttccgcatcagcttctccggccacagcggccacctccgcctcgaccctaccccgcacacgcccagccccattccggacttcgtcctgccgccggcatacccggccgagagcccgagcagcgtgaaggagtacctcgagaggaactacctcgaccccgagctgcacctccccaccgcggccgatagcgggagggtgtgggatgtcgactggtttgccctggccaggccgccgctggagccctccgccccccgcaccatgctcgcgcccgtctgggtgccgcctttccggcgcgggcaggagaagttgcaatccgcggcagagtcgcgagtgtgggaccctgagtccgtgcaaatggagatggtcgacgtgttcgattcggggaccggggggatagcgccccggatgcctggtccggcgaaggacttcgtcagggggagcatcaacaacagaccttttcgtccaggcggtctgcaggatgacgccgctgaggcggctgcgctggaaaaggcgttcccagagggtgcaaggactggtgattgggtgcgtgagctcatgagcggtggcccggcgcaggttgcgcctccagggttccgtaagggattggagctgggccagttgaaggggtatgaaagccactggaagtgtttccgggatggagaacttgtagaggagcaacctgcatcatcatcgaatgacacaatggagaagtactctgtgcagtttgatgatcttttcaagatagcgtgggaggaagatactgccaacaagttgttgaaggacggtgttgttcaacaatctgctgaagaaattggcgaacaaaaagttgatgcattgcaggatgagttcgagagtataacaacgctagatgacgagaaacaggaagttgatgtcataagaaatgttcctgaaactcaaacagacttggatcagatgttatcttctgaagtacaggatacaggcagggaaccaggtgcatcaggtgataagaagccaacacaagatggcatggtttgggcacttgttggtggggacgaggacatagtgactaacttctccaaactcgttccagatatggcaatcgagtttccatttgaattggataagttccagaaggaggctatatattatctcgagaagggtgaatcagtctttgttgcagcccatacttcagctggaaagacggttgttgctgagtatgcattcgcattagcaacgaaagagatgttagcatcaggccagaggcaacttgcttaattatgactactgagatattgcgttcaatgctctacagaggcgcagacattatacgtgatattgaatgggtaatctttgatgaagtgcattatgtaaatgatgctgaaagaggtgtagtctgggaggaggtcattataatgctcccgaagcacattaacattgttcttctttcggcaacggtcccaaatactgttgaatttgctgactggattggtcggacaaagcagaagaaaattcgtgtcacatcgaccaacaaaaggcctgttccacttgagcattgcctgttctactctggagaagtgtacaaaatatgtgagagggatatgtttcttgctcaaggatttaaagaagcaaaagatgctttcaaaaagaaaaatttgaataagtttggagtgaaacctggttcaaagtcaggaacccctgcagtacgtgctggaactcaaggcaaaaatccagatacatccaacaaggggagagatcaaaagtacccaaagcaccgcaattccaattcaggagtagccacagttcaacagagctcctcagggccaaagagatttgaatctttattttggatgccacttgtgaataaccttctgaagaaatcccttgtgcctgtggtgattttttgtttctcaaagaatcgctgtgataaatcggcagatagtatgtttggcactgatctcaccagtagttcagagaaaagtgaaatacgtgtcttctgtgacaaggcattttcacgtcttaaaggatctgataggaaccttccacaggttgtaggaatacaaagccttctgcgaagaggaattggagtacaccacgctgggcttctccctattgtgaaggaagttgttgagatgctgttttgccgtggtgtaatcaaggtactgttttccactgagacatttgcaatgggtgtcaatgcaccggcaagaacggttgtgtttgattctttaagaaagtttgatggaaaagaacaccggaaattgcttccaggggaatatatacaaatggctgggcgagctggtcggagaggacttgataacattggtactgtgatcattatgtgtcgtgatgaaattcctgaagaaagcgatttgaaaaatttgatcgttggaaaaccaactcgtttggaatctcaatttcgattaacatacaccatgatactacatcttctgcgtgtggaggaactgaaggtcgaggacatgctcaagagaagttttgctgaattccacgcacaaaagaatttgcctgagaaggaaaagcttcttctgcaaatgcttcgtcaacctacaaggacaatagagtgcataaaaggagagccttctattgaggaatactacgagatgactttagatgctgaggcacacagggaatacataacagaagcaattatgcagctgcctaattctcaacagtttcttacgcctgggagattggtggttgttaaatctgattctgatgatgatcacttgcttggtgttatactgaaaaatccatctgcattgctaaagaaatatgttgttctggtattgactggtgattgcagttcatctgcactagcccctgagttcaataaaaatgaaaagggtcctgtggattttcaaggaggacaatttattgtcctgaaaggaaaacgtggcatggacgatgaatatttctcttctgttagttcacgaaaagcttcaggtgtaatcaatatcaatctaccatacaagggggatgcatctggaatgggctttgaagtaagagcaattgagaataaagaaatcattagtatatgcagcagcaaaataaagattgatcaagtcagacttcttgaggagcctaacaaaactgcatactctagaactgtccaacagcttataaaggagcaaccagatggaaccaagtatcctcctgctttagatgcaataaaagatctaaaaatgaaagacatgtatcttgttgaaagttaccgtgcatatcacatactactgcaaaaaatgtctgaaaacaagtgccatggttgtataaaactgaaggagcatatatcattgatgagggagcaaaagatgtacaaggatcagttgaatgaattgaaattccaaatgtccgacgaggcacttcaacaaatgccagagtttcaaggcagaattgatgtactaaaggtaatccactacattgattctgatctagttgtgcaacttaagggtcgggtagcatgtgaaatgaactccggtgaggagttaatatcaacagaatgtctgtttgaaaatcaattggatgacctagaacccgaagaagctgtggctattatgtctgcattcgtcttccaacaacgcaatgcttcagaaccatctcttactccaaaactggctgaagcgaagaagaggctctatgatacagccataaaattagggaagctccaatccgagttcaaggtgcctgtggaccctgaagagtatgcacgtgataatctcaagtttggccttgttgaggtcgtctacgagtgggcaaaggggacgcctttcgcagacatatgcgagctgactgatgtatccgaagggatcattgtaagaacaatcgtccgtctggacgaaacatgtagggaattcaggaatgcagcttccatcatggggaactctgcgctgttcaagaagatggaggtcgcgtctaacgctattaagcgtgacattgtgtttgcagcaagtttgtatgtcacaggaatctgatgcatgtaacctcgtagtctcccttgcttcttttgttagagaaatcgttgtgctggtggaatgctactaacctaaccttagctagaacaattgttgtggtatttttttttccagttctggattattgcttttgctagttttgcgaagttttctgaagcggcgaccagcagagtaaaggaaaatcgaaagcgggtgggattctcgtttttttttcactgagaatatgattattgtattattagcggaaacaaaacgttctcgtactcaagacacctggaatccgtctagtaggagctcgatgtctaaagcaaaagtgcttaactggattgggaaacactgagatgcatgcc

SEQ ID NO: 54053 - DNA, 4640 bp, Zea Mays
agatgagatagtatataccataataaaccatagtttatatctgcgtttagatcactcgtttggtcgcttccatctcaagtgctggttgtgcaacagtcattgccatcctccatccctctgaactccgaaggccgaaccagttccgacgaaacggtacggtgacggctcacctcgggggtctccatgtccatggacggccctgccacctcgccggcaagcgaggtgccgttccgcatcagcttctccggccacagcggccacctccgcctcgaccctaccccgcacacgcccagccccattccggacttcgtcctgccgccggcatacccggccgagagcccgagcagcgtgaaggagtacctcgagaggaactacctcgaccccgagctgcacctccccaccgcggccgatagcgggagggtgtgggatgtcgactggtttgccctggccaggccgccgctggagccctccgccccccgcaccatgctcgcgcccgtctgggtgccgcctttccggcgcgggcaggagaagttgcaatccgcggcagagtcgcgagtgtgggaccctgagtccgtgcaaatggagatggtcgacgtgttcgattcggggaccggggggatagcgccccggatgcctggtccggcgaaggacttcgtcagggggagcatcaacaacagaccttttcgtccaggcggtctgcaggatgacgccgctgaggcggctgcgctggaaaaggcgttcccagagggtgcaaggactggtgattgggtgcgtgagctcatgagcggtggcccggcgcaggttgcgcctccagggttccgtaagggattggagctgggccagttgaaggggtatgaaagccactggaagtgtttccgggatggagaacttgtagaggagcaacctgcatcatcatcgaatgacacaatggagaagtactctgtgcagtttgatgatcttttcaagatagcgtgggaggaagatactgccaacaagttgttgaaggacggtgttgttcaacaatctgctgaagaaattggcgaacaaaaagttgatgcattgcaggatgagttcgagagtataacaacgctagatgacgagaaacaggaagttgatgtcataagaaatgttcctgaaactcaaacagacttggatcagatgttatcttctgaagtacaggatacaggcagggaaccaggtgcatcaggtgataagaagccaacacaagatggcatggtttgggcacttgttggtggggacgaggacatagtgactaacttctccaaactcgttccagatatggcaatcgagtttccatttgaattggataagttccagaaggaggctatatattatctcgagaagggtgaatcagtctttgttgcagcccatacttcagctggaaagacggttgttgctgagtatgcattcgcattagcaacgaaacattgcactaggtctgtctatactgctcctattaaaactatcagcaaccagaaatacagagatttttctgggaagtttgatgtgggacttctgacaggagatgttagcatcaggccagaggcaacttgcttaattatgactactgagatattgcgttcaatgctctacagaggcgcagacattatacgtgatattgaatgggtaatctttgatgaagtgcattatgtaaatgatgctgaaagaggtgtagtctgggaggaggtcattataatgctcccgaagcacattaacattgttcttctttcggcaacggtcccaaatactgttgaatttgctgactggattggtcggacaaagcagaagaaaattcgtgtcacatcgaccaacaaaaggcctgttccacttgagcattgcctgttctactctggagaagtgtacaaaatatgtgagagggatatgtttcttgctcaaggatttaaagaagcaaaagatgctttcaaaaagaaaaatttgaataagtttggagtgaaacctggttcaaagtcaggaacccctgcagtacgtgctggaactcaaggcaaaaatccagatacatccaacaaggggagagatcaaaagtacccaaagcaccgcaattccaattcaggagtagccacagttcaacagagctcctcagggccaaagagatttgaatctttattttggatgccacttgtgaataaccttctgaagaaatcccttgtgcctgtggtgattttttgtttctcaaagaatcgctgtgataaatcggcagatagtatgtttggcactgatctcaccagtagttcagagaaaagtgaaatacgtgtcttctgtgacaaggcattttcacgtcttaaaggatctgataggaaccttccacaggttgtaggaatacaaagccttctgcgaagaggaattggagtacaccacgctgggcttctccctattgtgaaggaagttgttgagatgctgttttgccgtggtgtaatcaaggtactgttttccactgagacatttgcaatgggtgtcaatgcaccggcaagaacggttgtgtttgattctttaagaaagtttgatggaaaagaacaccggaaattgcttccaggggaatatatacaaatggctgggcgagctggtcggagaggacttgataacattggtactgtgatcattatgtgtcgtgatgaaattcctgaagaaagcgatttgaaaaatttgatcgttggaaaaccaactcgtttggaatctcaatttcgattaacatacaccatgatactacatcttctgcgtgtggaggaactgaaggtcgaggacatgctcaagagaagttttgctgaattccacgcacaaaagaatttgcctgagaaggaaaagcttcttctgcaaatgcttcgtcaacctacaaggacaatagagtgcataaaaggagagccttctattgaggaatactacgagatgactttagatgctgaggcacacagggaatacataacagaagcaattatgcagctgcctaattctcaacagtttcttacgcctgggagattggtggttgttaaatctgattctgatgatgatcacttgcttggtgttatactgaaaaatccatctgcattgctaaagaaatatgttgttctggtattgactggtgattgcagttcatctgcactagcccctgagttcaataaaaatgaaaagggtcctgtggattttcaaggaggacaatttattgtcctgaaaggaaaacgtggcatggacgatgaatatttctcttctgttagttcacgaaaagcttcaggtgtaatcaatatcaatctaccatacaagggggatgcatctggaatgggctttgaagtaagagcaattgagaataaagaaatcattagtatatgcagcagcaaaataaagattgatcaagtcagacttcttgaggagcctaacaaaactgcatactctagaactgtccaacagcttataaaggagcaaccagatggaaccaagtatcctcctgctttagatgcaataaaagatctaaaaatgaaagacatgtatcttgttgaaagttaccgtgcatatcacatactactgcaaaaaatgtctgaaaacaagtgccatggttgtataaaactgaaggagcatatatcattgatgagggagcaaaagatgtacaaggatcagttgaatgaattgaaattccaaatgtccgacgaggcacttcaacaaatgccagagtttcaaggcagaattgatgtactaaaggtaatccactacattgattctgatctagttgtgcaacttaagggtcgggtagcatgtgaaatgaactccggtgaggagttaatatcaacagaatgtctgtttgaaaatcaattggatgacctagaacccgaagaagctgtggctattatgtctgcattcgtcttccaacaacgcaatgcttcagaaccatctcttactccaaaactggctgaagcgaagaagaggctctatgatacagccataaaattagggaagctccaatccgagttcaaggtgcctgtggaccctgaagagtatgcacgtgataatctcaagtttggccttgttgaggtcgtctacgagtgggcaaaggggacgcctttcgcagacatatgcgagctgactgatgtatccgaagggatcattgtaagaacaatcgtccgtctggacgaaacatgtagggaattcaggaatgcagcttccatcatggggaactctgcgctgttcaagaagatggaggtcgcgtctaacgctattaagcgtgacattgtgtttgcagcaagtttgtatgtcacaggaatctgatgcatgtaacctcgtagtctcccttgcttcttttgttagagaaatcgttgtgctggtggaatgctactaacctaaccttagctagaacaattgttgtggtatttttttttccagttctggattattgcttttgctagttttgcgaagttttctgaagcggcgaccagcagagtaaaggaaaatcgaaagcgggtgggattctcgtttttttttcactgagaatatgattattgtattattagcggaaacaaaacgttctcgtactcaagacacctggaatccgtctagtaggagctcgatgtctaaagcaaaagtgcttaactggattgggaaacactgagatgcatgcc

SEQ ID NO: 54054 - DNA, 760 bp, Zea Mays
ggcgcagctagcagcagccgacatgagcgacgggcgcgaggagagcaccaacggcggggtggcgcgggcgggagcgggaggaccaccgccacggccacgccaagacggccaaggtcatgcacctgctgctctggggacccaagtgaggtgaagtgaagcgctgctgcacctgcctctgcctctgcctctgcctcgtggcccgcgcgcggcgtcctcgcttccttctccgcccgctgcccgcacgggttgtttgtacttgtacatgtaccactgctagactagtactgctgctgtgcctgtactatgcactgtgtattgtattgtattgtacgtgctagtagtaagctgctgccttcttccttctcttctctcccccaccactctgctgttttgctcctcctcatcgtcgtcgtcgcgtcggctgtgagttgtgacctgtatgtaattaagccatcatccaacacgtctaatctccctcccctttctgtcgaaggttattcgatgagtcgatgttaactagatcacaagatcgaaaactaaagataaaagcacaggaaagtttttatacaagttcaatctctctctttctgagataataacctatgtcgtgtatgttggatctgttattgtatcttactatcttgcgtattttacgatgatcagagtggacggtggttacacattagccacgaggtcggttgtaagaggacgggtcaagttgtacacgagtgtaaaaaaaaaaaatcatagcgtctttctg

SEQ ID NO: 54055 - DNA, 3017 bp, Zea Mays
gcgtggaagccatggccgctcccccaagagaaaataaaaatgtagcagtagcttgcaagcgggaaagccaagaaggcgtgtctcgcacctgtctctgaccaagacgcgcgcatggaagagaaagcgtcgggaggcggttgagatgcgtgggcgggcgggcggccaggcatccacacgtctgacgcctccccgcggtcggcgcctcggcgtggcaatataccggcgtgccccgagcgcgccggggccttcttctactcgaggcgtggcaactcccgcgtgcgcgaggccggcttccttggacctgctgccgccctcgccaccggcgatagccgcccgccgcatccattccctcgccttctcgccacggcgccaggcaaacgatgcacaagaaaaaaggagggacaaaacaaagagggaaaagaacgagcggcgtgggccgttggcccatcgggcccttggagaaattaggcaagtggggcccagtgacatggccgctctggctgtccacggccggtcagccgcgagcgagagctgggctgagctgccgtgcgcgtgctaacctggactgggcagcaggcatcagacgcatctcgcggcatctcggcatgtggaagctgtgaagaggagaagacgcggagaggagatgctgcaacagaagccgaaccgaacgaaaggaaggagagagagagagagagagagaaaaaaaaaggacggctccgcccaagggtcggaagggagggagttgccgcgccgcggccggttcgatcctttgcgcgagatcgagcttctccggttggtgttggggctggcgacatctgggatccgtcgtctctcctcgtgttcttgagcagttttccacttgcctggcaaaagaacatttgacttggaagagcaaacactggaagctttgtggtttgtcctaagtgatcctatcaagttctcataggctgcatactggtacagcattttctcctgtgttttgggccacagaagaggggggagccaaggatttttctatctcagatctacataatggacgagaggaggactattttgatggaccgttacgaaatcgggaggcagttaggccaaggaaacttcgccaagctcttcgaggtaatggctagcaagagcaagatctacttcgtattggagtacgctaaaggcggcgagctgttcaacaaagtatcaaaggcgaagctcagcgaggatgccgcgaggaggtatttccaccagctggttaatgccgtggactactgccacagccgaggcgtctaccatcgcgacttgaagccggaaaacctactcctggacgagaacgagaaccttagagtctcggacttcggtctgagcgccctgtctgaatccagaaggcacgacggcctcctacataccacgtgtggaacccctgcctatgttgctcctgaagtgcttggtaggagaggctacgatggcaccaaggcggacatatggtcctgcggagtgattctcttcgtgctcgtggctggttacctgccgttccacgacccgaatctcatcgagatgtacaggaagatctccagagctgaatacagatgccctcgctccttctccggtgagctgaaggacctgcttttcagaatgctcgatccagatcccagtaccaggatatccatttcaaggatcaagagaagcacttggtacagaaaacctatcgaggcaaacgcggcaaagatcaagcacggcacagcaagagacaccaccgtgcgcgacggtgaagccgccacggcctcgagctcgatagagtgcagtaaccggccagaggaagaccaagggtcgtcaagcctccctaacctgaacgcattcgacatcatttctctctcgaccgggtttgacctatctaacctgttcgaagaaagacacgggcggagggaggagaggttcaccaccaggcagccagtgggagcggtgtttggtaggctgaaggagctggctgagcggttgaagctgaaaatccagaagaaggagagcggggtcttgaaactggctgcgcagaaggaagggatgaaggggttcctggagctcgacgccgaggttttcgagcttgccccttcgttccttctggtcgagctgaagaaggccagcggtgacaccattgagtaccaaaggctcgtgagggaagaagtgcggcctgcgctgaaggatatggtctgggcttggcagagcgaccggcaccagcagcagcagcagcggtgcgagcagtctgtgcaaggagaggaccagcagcagccgttgtcgtctttgccgacgcagcagtagtcactgcaccaccagttgcgaccgccataaccagatcacgtcaaaactgcaccaagccgcacaggactagtaactcccacttgcatcgacgcttatgtgattgcggaattgtgtttcaggttacctgcctgctgcggtaggacctaaaacgcctacctgcctaccatttggcatttttttgtatactgtacgtacattagagtaataaacaaacatgcttaacttttcagctttcgattggaatgtgcttttcgatgtaactctgtaaccagtgtaggtacgaagtcgattagccacagggtctggccatgttgacctcacgtagccctggttcattggtgtaacagtttgttggctgcggctttacattattttgtctctatggattacggctgcgactatgtgtagctgaacaagctggtatatgatgagccctggaaacgtgtgtttactgcagctatttgcagccagtgactgttgatacaaacgacgaagtagagttggttgtttatgtaggcacgcagcatgaccataattatccatgaatcatggatagatgcacaatgtttaggaaacaggtgtgtgtggctggctggtggtgcgagaagagatgcgctgccttgatgtactgtactgggactgggagggatgcgtctcgcagtacagtctgtactatcatctctacacgcacgcacgcaggctcgacgtgtcggcggcgg

SEQ ID NO: 54056 - DNA, 2154 bp, Zea Mays
attcctttcccaccgctccttcgctttcccttcctcgcccgccgtaataaatagacaccccctccacaccctctttccccaacctcgtgttgttcggagcgcacacacacacaaccagatctcccccaaatccacccgtcggcacctccgcttcaagatgcagatctttgtgaaaaccctgactggcaagactatcaccctcgaggtggagtcctctgacaccattgacaacgtcaaggccaagatccaggacaaggagggcatccctccagaccagcagcggctcatctttgctgggaagcagcttgaggacgggcgcacgcttgccgactacaacatccagaaggagagcaccctccacttggtgctgcgcctcaggggaggcatgcagatcttcgtgaagaccctgaccggcaagactatcaccctcgaggtggagtcttcagacaccatcgacaacgtcaaggccaagatccaggacaaggagggcattcccccagaccagcagcggctcatctttgctggaaagcagcttgaggacgggcgcacgcttgccgactacaacatccagaaggagagcaccctccacttggtgctgcgcctcaggggaggcatgcagatcttcgtgaagaccctgaccggcaagactatcaccctcgaggtggagtcttcagacaccatcgacaatgtcaaggccaagatccaggacaaggagggcatcccaccggaccagcagcgtttgatcttcgctggcaagcagctggaggatggccgcacccttgcggattacaacatccagaaggagagcaccctccacctggtgctccgtctcaggggtggtatgcagatctttgtgaagacactcactggcaagacaatcacccttgaggtggagtcttcggataccattgacaatgtcaaggccaagatccaggacaaggagggcatcccacccgaccagcagcgcctcatcttcgccggcaagcagctggaggatggccgcaccctggcggattacaacatccagaaggagagcactctccacctggtgctccgcctcaggggtggcatgcagatttttgtgaagacattgactggcaagaccatcaccttggaggtggagagctctgacaccattgacaatgtgaaggccaagatccaggacaaggagggcattcccccagaccagcagcgtctgatctttgcgggcaagcagctggaggatggccgcactctcgcggactacaacatccagaaggagagcacccttcaccttgttctccgcctcagaggtggtatgcagatctttgtaaagaccctgactggaaaaaccataaccctggaggttgagagctcggacaccatcgacaatgtgaaggcgaagatccaggacaaggagggcatccccccggaccagcagcgtctgatcttcgccggcaaacagctggaggatggccgcaccctagcagactacaacatccaaaaggagagcaccctccaccttgtgctccgtctccgtggtggtcagtaagtcatgggtcgtttaagctgccgatgtgcctgcgtcgtctggtgccctctctccatatggaggttgtcaaagtatctgctgttcgtgtcatgagtcgtgtcagtgttggtttaataatggaccggttgtgttgtgtgtgcgtactacccagaactatgacaaatcatgaataagtttgatgtttgaaattaaagcctgtgctcattatgttctgtctttcagttgtctcctaatatttgcctgcaggtactggctatctaccgtttcttacttaggaggtgtttgaatgcactaaaactaatagttagtggctaaaattagttaaaacatccaaacaccatagctaatagttgaactattagctatttttggaaaattagttaatagtgaggtagttatttgttagctagctaattcaactaacaatttttagccaactaacaattagtttcagtgcattcaaacacccccttaatgttaacgtggttctatctaccgtctcctaatatatggttgattgttcggtttgttgctatgctattgggttctgattgctgctagttcttgctgaatccagaagttctcgtagtatagctcagattcatattatttatttgagtgat

SEQ ID NO: 54057 - DNA, 2017 bp, Zea Mays
attcctttcccaccgctccttcgctttcccttcctcgcccgccgtaataaatagacaccccctccacaccctctttccccaacctcgtgttgttcggagcgcacacacacacaaccagatctcccccaaatccacccgtcggcacctccgcttcaagatgcagatctttgtgaaaaccctgactggcaagactatcaccctcgaggtggagtcgtctgacaccattgacaacgttaaggccaagcatccagaaggagagcaccctccaccttgtgctccgtctcaggggaggcatgcagatctttgtgaaaaccctgaccggcaagactatcaccctcgaggtggagtcctctgacaccattgacaacgtcaaggccaagatccaggacaaggagggcatccctccagaccagcagcggctcatctttgctgggaagcagcttgaggacgggcgcacgcttgccgactacaacatccagaaggagagcaccctccacttggtgctgcgcctcaggggaggcatgcagatcttcgtgaagaccctgaccggcaagactatcaccctcgaggtggagtcttcagacaccatcgacaacgtcaagactatcaccctcgaggtggagtcttcagacaccatcgacaatgtcaaggccaagatccaggacaaggagggcatcccaccggaccagcagcgtttgatcttcgctggcaagcagctggaggatggccgcacccttgcggattacaacatccagaaggagagcaccctccacctggtgctccgtctcaggggtggtatgcagatctttgtgaagacactcactggcaagacaatcacccttgaggtggagtcttcggataccattgacaatgtcaaggccaagatccagaaggagagcactctccacctggtgctccgcctcaggggtggcatgcagatttttgtgaagacattgactggcaagaccatcaccttggaggtggagagctctgacaccattgacaatgtgaaggccaagatccaggacaaggagggcattcccccagaccagcagcgtctgatctttgcgggcaagcagctggaggatggccgcactctcgcggactacaacatccagaaggagagcacccttcaccttgttctccgcctcagaggtggtatgcagatctttgtaaagaccctgactggaaaaaccataaccctggaggttgagagctcggacaccatcgacaatgtgaaggcgaagatccaggacaaggagggcatccccccggaccagcagcgtctgatcttcgccggcaaacagctggaggatggccgcaccctagcagactacaacatccaaaaggagagcaccctccaccttgtgctccgtctccgtggtggtcagtaagtcatgggtcgtttaagctgccgatgtgcctgcgtcgtctggtgccctctctccatatggaggttgtcaaagtatctgctgttcgtgtcatgagtcgtgtcagtgttggtttaataatggaccggttgtgttgtgtgtgcgtactacccagaactatgacaaatcatgaataagtttgatgtttgaaattaaagcctgtgctcattatgttctgtctttcagttgtctcctaatatttgcctgcaggtactggctatctaccgtttcttacttaggaggtgtttgaatgcactaaaactaatagttagtggctaaaattagttaaaacatccaaacaccatagctaatagttgaactattagctatttttggaaaattagttaatagtgaggtagttatttgttagctagctaattcaactaacaatttttagccaactaacaattagtttcagtgcattcaaacacccccttaatgttaacgtggttctatctaccgtctcctaatatatggttgattgttcggtttgttgctatgctattgggttctgattgctgctagttcttgctgaatccagaagttctcgtagtatagctcagattcatattatttatttgagtgat

SEQ ID NO: 54058 - DNA, 5586 bp, Zea Mays
accctactccatcttctcgtgttgttcggcgcacgcggagacagcccgcgatcccgatcccgatccttcttcacgcgaatctcgacgatcccccccttccttccttcaagaaggagagcaccctccacctggtgctccgcctgaggggtggcaatggtaatgcagatctttgtgaagaccttgactgccatgtatgataccgtctttgaagtatttgtattgtctgtcgtgactaagtttgtttcgtggaccggttgtcttctaccctacccaaaactacagtgtggcagcaaatgatgaataaatgtgatgtttgaatttaaaaatatgtgctgaataatgttgtttttttgttatgtcagttaatgttactaaattggctagcttttaaattttgtttactagtgttcgtcgcacctacatctttgtactgaatgtttgctttaggttctgacaaactcattttgagactagttaaatacttaggacctaaaatgaatgcagtaaatatttatcatattttctatgaatttggtcagacttaatttggctgaatccaaacctaatgtttttttactaatcatattgatatacatgtttgattgtctgattatctggtttgttactattttacttggttcgggtctctatttcttggtgaatctacatagacttgtgcagaacctggttgtgatcataattctacttcctctggagataaagtggcttgcttttctgtatgtctaattttttgtttgaccattgaaaaacaaacaaccaacttacggatcaaatcagtattactgccagaagtatatttgacccttaacactatttataaattacataaagtttcacgattaaaactgacggacggatgttattggcctagaaatagctcgaaagctctaggcttaacaacccttgcactaaattattgtgattaacgttgtactttatagtgacaaaaattaattggaattatatagtttcttttgttttgtagaagcaaactaagttaggctataataatatagatagatgattaggtttatatatggtttcttttgtgaattttattaaggatcaactagtgtcatgaagttgatagacataaaatagcgacacatttcttttgccgtactataaaaagcgctggaataattaagatagtcaagagggtgaatttggtgtctctaacttttcttggacaaatttaaattttgaacacaagcttaactatctccgtgtgttcaataacgtgtctaataatatgataaaaagtttatatcctgattttctattttatactacgatggtaattttaaggatgctaattttaaaattgaattgcttaaatataaatgtataaaataagtaaaagatcaatggactcctcgatgttttgtattatagatgttgttaattgattaacttgtactgagttatttaagagcaaggtagtaagctgttgccaacaactgattcggttgtcacggattagtggccttaaataatttctagccggattacttctctaatcttaacgatttctgatctatttcttaaaaaacgaataaggtctgaatcaagatcagagctggagatgtgcatgggtgcatctcatatggcacaccgcagacaaaagattgcatagttggctccgatcctatttggcaagtgattagagatggcaatggcccaatggttacccgcgatccgatactcgatgagtatttactctattagggtatatatatggtctaaatgttctacctatggatttcttgttaggtaaaaaccttcaaccaattggtaaacgggtataagaaaattctgtccctacccatacttgttaacccgtgggtataaacttagcctaaaaacatgaacttgggctttacttatatatttcttttgacttagcctaaaaacatgaacttgggctttacttatatatctcttttgactatttaacaaccttttcggcgataataccatagaaggcttaacaactatttgatgatcatgtaatagaacatgtaatgtgttatgtgttactatcctagtgttgctactatatccaattatctatggtgttcttgaatagatgattgaatgatgttagaaattttgtaatggatatattgacatttgtataatgtagatgtttaatctttgtgagtacggatctgacgggtaactcatacctatatgggtaatataagtgacccgatgggactattttttttatcttaggtatggatatgagatagataagagatcataatgctcatgtacgccatcaatgccatttttttaaatgaacaacatttgaagccttttccatgagaaagagaaaggggaactaagatatttatagaagttccttagagcaacttcaataggaaccctaatcacataaacaaattaaaatatagagctttaataagaaaagacagctacccaagagccttattttaatgaaattcgtgtaaacttgaagggtagcatatttggatctgagatccgcagccctatatggttcgcgctcgtcccaaccacctcggatattttcgctttcttcttcgccgccaccggctcccattccaccgccaaggtcagcttcgtttccatcgccgcatcgcgttcgcgtgtgccaaccccgctcccatctcaactgtcaccgtccgaagaactgatccgttctgcacaaccgctcgtcactctccaaatttgctgcacctgccctctccaaagttcttgcactcgtccctctccaaagttcctgcagattcacttctctccaaagttcaggaggatgtgtggtgtgacagcgctacaacaaatctgtcaacggggactctcatcctcttgctcatagaaagaactgcagtgttacaggtaggtaattactagagtactactactaagtaaatctgtcaaaggcagtcatggcatccatatccttcacatcagtactgggagtggcacacgcaccgcacacatactactacatctactagtatgtagtggagtgcttgaaaggcataagcgaattttcttcttgtttggtctacgtccatttgcttgtccactaaccggctagtttactctgctttttgggttttccacgtctctacaattgtgactgttagagcaactccagtagttctctaaaaaatagcttgctaaaatcatgtttagcaagttgctaaatagctattggaagtaaaaaataacttagtttccaatagttgctcatatttaggaagtagttcgattttgaatctagctttagcggccctgtccctatgagatctgcctgataataaggttgagagcagaggatatgagggcggaagaaaaaaggtcggtcgatatgaattatggatgagtggtggtccggtgacgcaacttatgagaaagttaggttcgacggtgaaggagaaacttgcgtcatacgtgtttgacctagctacctcattatgctagaaaataaaaaagagtgtgttataactggctatctcactgtataggaaaggtaaaaataatcacgctagtgtgaagaaattgacgtcaactgtatttagggagttcctaccgagttgctaaatgtggagagtaaatagagttgaatagcaactaactaaatttagcaagtctatttagagaaccattggagaagtatttttctgttcacttcttaaatttaagatttagagagttatttagagaactattgaagttgctcttagaccacctataattgtgactgttgaccacctatagatgcggttcaactagccctccgaccccctctcgagagttccgctccaccgcggcgaaggaagtggcggaggaggaggatccgcgcctgcgctgggccttcgtgcggaaggtgtacgcggccccccgctgccgtctggcccacgtacatcgccatcctcctatccctgtccccgctcggactcttcctcgctaccgccgtgtctgcggatctggccaagtagcccggtaggaagcgccgtgggaggagacaggcgaggcgttcgaccgccgccggcagcttaggacgtaccacgtctctgttctatgggttcacgagtttcggggccctacatggattctccgcctccgcctccgcctcgtccgccatcgccgccgcgacaccctcctcaccctcagggcgagcgtcacgtcggcggggagatgctgtaccaggacacagaccataggctccgcgcgctggtcgggagcgccgagggcttcggccgccacgccatcgggggcctctacggggccatccaccgcgtcacgtcgctccaagacgacgggcccgggagtctgagggaggcgtgccgggcggaggagcccctgtggatcgtcttcgaggtgtccggcaccatccacctccactcctacctccgcgtctcctcgtacaagaccatcgacgggcgcggccagcgcgtggtgctcaccggcaaggggctccggctcaagtcatgccatcacgtcatcatctgcaacctggtgttagaaggaggccgtgggcacgacgtggatggcatccaggtcaagcccgactccaccaacatctggatcgaccgctgcaccctcgccgactacgatgacggcctcatcgacatcacgcgccagagcacagacatcacagtctcaagatgccattttatgcggcacgacaagacgatgctcatcggtgccgaccccacgcacgtcggcgaccgctgcatcagggtcaccatccaccactgcttcttcgacggcacgcgacagaggcacccccgcctccgcttcggaaaggttcacctctacaacaactacacgcgcagctggggcatctacgccgtctgcgcaggcgtagaggcccagatcgtgtcccagtgcaacatctacgaggcaggtggagggcccccaaagaagacaactgtattcaagtacatgccggagaaggccggcgaccgagaggacgtggtggcagggtcgatcagctcggaaggggacgccttcctcaatggcgcgctgccctgcctgatcgataaccctgggtctgtcttcaggccagaggagtactaccagcagtggaccatggagccagcgtcgccggcgctcaaggacataatacagctctgcgcaggatggcagccggtgccccgccccccggatgatcgctgactttcatcattctgatatgctgcagctcgcttctagcttgatggtttagctgtggcatggtggttatgacaaaggatcctccaaaagctaataaataaaaaggaggtggagacgggagcttgactgggacgcggcggcctacacgaactcggtggcgtcggaggcggcgaggtcggcgataagcaacagggggcgagagcggtgacaaggacaggcgtgtgagagtgggattctcttgcttctctggcttctagtttctcgaggtcaagttgcatgtgtactcacgggtcacggtaaaggagctatgtgccaattaatttaagttccatgtgtactctattaccggtacaagatgaatcaattgttgatttgtgataagtttaaactatt

SEQ ID NO: 54059 - DNA, 6090 bp, Zea Mays
aagcattgaacgggcatctctctcggctgctctcgaaagctccgcgcttggcgtggcggagccgagccgagggctgatctcgtccacacggcactaggatttctccttcccctcccgctgccgttcacgtcctcaataaataccccaccctactccatcttctcgtgttgttcggcgcacgcggagacagcccgcgatcccgatcccgatccttcttcacgcgaatctcgacgatcccccccttccttccttcaagaaggagagcaccctccacctggtgctccgcctgaggggtggcaatggtaatgcagatctttgtgaagaccttgactgccatgtatgataccgtctttgaagtatttgtattgtctgtcgtgactaagtttgtttcgtggaccggttgtcttctaccctacccaaaactacagtgtggcagcaaatgatgaataaatgtgatgtttgaatttaaaaatatgtgctgaataatgttgtttttttgttatgtcagttaatgttactaaattggctagcttttaaattttgtttactagtgttcgtcgcacctacatctttgtactgaatgtttgctttaggttctgacaaactcattttgagactagttaaatacttaggacctaaaatgaatgcagtaaatatttatcatattttctatgaatttggtcagacttaatttggctgaatccaaacctaatgtttttttactaatcatattgatatacatgtttgattgtctgattatctggtttgttactattttacttggttcgggtctctatttcttggtgaatctacatagacttgtgcagaacctggttgtgatcataattctacttcctctggagataaagtggcttgcttttctgtatgtctaattttttgtttgaccattgaaaaacaaacaaccaacttacggatcaaatcagtattactgccagaagtatatttgacccttaacactatttataaattacataaagtttcacgattaaaactgacggacggatgttattggcctagaaatagctcgaaagctctaggcttaacaacccttgcactaaattattgtgattaacgttgtactttatagtgacaaaaattaattggaattatatagtttcttttgttttgtagaagcaaactaagttaggctataataatatagatagatgattaggtttatatatggtttcttttgtgaattttattaaggatcaactagtgtcatgaagttgatagacataaaatagcgacacatttcttttgccgtactataaaaagcgctggaataattaagatagtcaagagggtgaatttggtgtctctaacttttcttggacaaatttaaattttgaacacaagcttaactatctccgtgtgttcaataacgtgtctaataatatgataaaaagtttatatcctgattttctattttatactacgatggtaattttaaggatgctaattttaaaattgaattgcttaaatataaatgtataaaataagtaaaagatcaatggactcctcgatgttttgtattatagatgttgttaattgattaacttgtactgagttatttaagagcaaggtagtaagctgttgccaacaactgattcggttgtcacggattagtggccttaaataatttctagccggattacttctctaatcttaacgatttctgatctatttcttaaaaaacgaataaggtctgaatcaagatcagagctggagatgtgcatgggtgcatctcatatggcacaccgcagacaaaagattgcatagttggctccgatcctatttggcaagtgattagagatggcaatggcccaatggttacccgcgatccgatactcgatgagtatttactctattagggtatatatatggtctaaatgttctacctatggatttcttgttaggtaaaaaccttcaaccaattggtaaacgggtataagaaaattctgtccctacccatacttgttaacccgtgggtataaacttagcctaaaaacatgaacttgggctttacttatatatttcttttgacttagcctaaaaacatgaacttgggctttacttatatatctcttttgactatttaacaaccttttcggcgataataccatagaaggcttaacaactatttgatgatcatgtaatagaacatgtaatgtgttatgtgttactatcctagtgttgctactatatccaattatctatggtgttcttgaatagatgattgaatgatgttagaaattttgtaatggatatattgacatttgtataatgtagatgtttaatctttgtgagtacggatctgacgggtaactcatacctatatgggtaatataagtgacccgatgggactattttttttatcttaggtatggatatgagatagataagagatcataatgctcatgtacgccatcaatgccatttttttaaatgaacaacatttgaagccttttccatgagaaagagaaaggggaactaagatatttatagaagttccttagagcaacttcaataggaaccctaatcacataaacaaattaaaatatagagctttaataagaaaagacagctacccaagagccttattttaatgaaattcgtgtaaacttgaagggtagcatatttggatctgagatccgcagccctatatggttcgcgctcgtcccaaccacctcggatattttcgctttcttcttcgccgccaccggctcccattccaccgccaaggtcagcttcgtttccatcgccgcatcgcgttcgcgtgtgccaaccccgctcccatctcaactgtcaccgtccgaagaactgatccgttctgcacaaccgctcgtcactctccaaatttgctgcacctgccctctccaaagttcttgcactcgtccctctccaaagttcctgcagattcacttctctccaaagttcaggaggatgtgtggtgtgacagcgctacaacaaatctgtcaacggggactctcatcctcttgctcatagaaagaactgcagtgttacaggtaggtaattactagagtactactactaagtaaatctgtcaaaggcagtcatggcatccatatccttcacatcagtactgggagtggcacacgcaccgcacacatactactacatctactagtatgtagtggagtgcttgaaaggcataagcgaattttcttcttgtttggtctacgtccatttgcttgtccactaaccggctagtttactctgctttttgggttttccacgtctctacaattgtgactgttagagcaactccagtagttctctaaaaaatagcttgctaaaatcatgtttagcaagttgctaaatagctattggaagtaaaaaataacttagtttccaatagttgctcatatttaggaagtagttcgattttgaatctagctttagcggccctgtccctatgagatctgcctgataataaggttgagagcagaggatatgagggcggaagaaaaaaggtcggtcgatatgaattatggatgagtggtggtccggtgacgcaacttatgagaaagttaggttcgacggtgaaggagaaacttgcgtcatacgtgtttgacctagctacctcattatgctagaaaataaaaaagagtgtgttataactggctatctcactgtataggaaaggtaaaaataatcacgctagtgtgaagaaattgacgtcaactgtatttagggagttcctaccgagttgctaaatgtggagagtaaatagagttgaatagcaactaactaaatttagcaagtctatttagagaaccattggagaagtatttttctgttcacttcttaaatttaagatttagagagttatttagagaactattgaagttgctcttagaccacctataattgtgactgttgaccacctatagatgcggttcaactagccctccgaccccctctcgagagttccgctccaccgcggcgaaggaagtggcggaggaggaggatccgcgcctgcgctgggccttcgtgcggaaggtgtacgcggccccccgctgccgtctggcccacgtacatcgccatcctcctatccctgtccccgctcggactcttcctcgctaccgccgtgtctgcggatctggccaagtagcccggtaggaagcgccgtgggaggagacaggcgaggcgttcgaccgccgccggcagcttaggacgtaccacgtctctgttctatgggttcacgagtttcggggccctacatggattctccgcctccgcctccgcctcgtccgccatcgccgccgcgacaccctcctcaccctcagggcgagcgtcacgtcggcggggagatgctgtaccaggacacagaccataggctccgcgcgctggtcgggagcgccgagggcttcggccgccacgccatcgggggcctctacggggccatccaccgcgtcacgtcgctccaagacgacgggcccgggagtctgagggaggcgtgccgggcggaggagcccctgtggatcgtcttcgaggtgtccggcaccatccacctccactcctacctccgcgtctcctcgtacaagaccatcgacgggcgcggccagcgcgtggtgctcaccggcaaggggctccggctcaagtcatgccatcacgtcatcatctgcaacctggtgttagaaggaggccgtgggcacgacgtggatggcatccaggtcaagcccgactccaccaacatctggatcgaccgctgcaccctcgccgactacgatgacggcctcatcgacatcacgcgccagagcacagacatcacagtctcaagatgccattttatgcggcacgacaagacgatgctcatcggtgccgaccccacgcacgtcggcgaccgctgcatcagggtcaccatccaccactgcttcttcgacggcacgcgacagaggcacccccgcctccgcttcggaaaggttcacctctacaacaactacacgcgcagctggggcatctacgccgtctgcgcaggcgtagaggcccagatcgtgtcccagtgcaacatctacgaggcaggtggagggcccccaaagaagacaactgtattcaagtacatgccggagaaggccggcgaccgagaggacgtggtggcagggtcgatcagctcggaaggggacgccttcctcaatggcgcgctgccctgcctgatcgataaccctgggtctgtcttcaggccagaggagtactaccagcagtggaccatggagccagcgtcgccggcgctcaaggacataatacagctctgcgcaggatggcagccggtgccccgccccccggatgatcgctgactttcatcattctgatatgctgcagctcgcttctgtaagaatattcgtttcacggaagcactgcatttgtatgcatctcatcctaggtaattcaacatttgtttcatggtagagtggcatttgtatgccactcctcttcatctgccccctctctgaaatgtagtagaaaagttgttatggttttctatttgtgtctttatttatggtacatacaattcccaatgtaaagatatttctctcgtccatagcagtacaatagcttttagttgtgaatgctactcgtatgtcttatactagaaagctgcaagacacgtcaatctgctttgtagacattcacagaggatgaggatctccattcataaggaatgcaggaattttaactgaacttgcagagcttgatggtttagctgtggcatggtggttatgacaaaggatcctccaaaagctaataaataaaaaggaggtggagacgggagcttgactgggacgcggcggcctacacgaactcggtggcgtcggaggcggcgaggtcggcgataagcaacagggggcgagagcggtgacaaggacaggcgtgtgagagtgggattctcttgcttctctggcttctagtttctcgaggtcaagttgcatgtgtactcacgggtcacggtaaaggagctatgtgccaattaatttaagttccatgtgtactctattaccggtacaagatgaatcaattgttgatttgtgataagtttaaactatt

SEQ ID NO: 54060 - DNA, 4095 bp, Zea Mays
cccgctgccgttcacgtcctcaataaataccccaccctactccatcttctcgtgttgttcggcgcacgcggagacagcccgcgatcccgatcccgatccttcttcacgcgaatctcgacgatcccccccttccttccttcaaggtctgaatcaagatcagagctggagatgtgcatgggtgcatctcatatggcacaccgcagacaaaagattgcatagttggctccgatcctatttggcaagtgattagagatggcaatggcccaatggttacccgcgatccgatactcgatgagtatttactctattagggtatatatatggtctaaatgttctacctatggatttcttgttaggtaaaaaccttcaaccaattggtaaacgggtataagaaaattctgtccctacccatacttgttaacccgtgggtataaacttagcctaaaaacatgaacttgggctttacttatatatttcttttgacttagcctaaaaacatgaacttgggctttacttatatatctcttttgactatttaacaaccttttcggcgataataccatagaaggcttaacaactatttgatgatcatgtaatagaacatgtaatgtgttatgtgttactatcctagtgttgctactatatccaattatctatggtgttcttgaatagatgattgaatgatgttagaaattttgtaatggatatattgacatttgtataatgtagatgtttaatctttgtgagtacggatctgacgggtaactcatacctatatgggtaatataagtgacccgatgggactattttttttatcttaggtatggatatgagatagataagagatcataatgctcatgtacgccatcaatgccatttttttaaatgaacaacatttgaagccttttccatgagaaagagaaaggggaactaagatatttatagaagttccttagagcaacttcaataggaaccctaatcacataaacaaattaaaatatagagctttaataagaaaagacagctacccaagagccttattttaatgaaattcgtgtaaacttgaagggtagcatatttggatctgagatccgcagccctatatggttcgcgctcgtcccaaccacctcggatattttcgctttcttcttcgccgccaccggctcccattccaccgccaaggtcagcttcgtttccatcgccgcatcgcgttcgcgtgtgccaaccccgctcccatctcaactgtcaccgtccgaagaactgatccgttctgcacaaccgctcgtcactctccaaatttgctgcacctgccctctccaaagttcttgcactcgtccctctccaaagttcctgcagattcacttctctccaaagttcaggaggatgtgtggtgtgacagcgctacaacaaatctgtcaacggggactctcatcctcttgctcatagaaagaactgcagtgttacaggtaggtaattactagagtactactactaagtaaatctgtcaaaggcagtcatggcatccatatccttcacatcagtactgggagtggcacacgcaccgcacacatactactacatctactagtatgtagtggagtgcttgaaaggcataagcgaattttcttcttgtttggtctacgtccatttgcttgtccactaaccggctagtttactctgctttttgggttttccacgtctctacaattgtgactgttagagcaactccagtagttctctaaaaaatagcttgctaaaatcatgtttagcaagttgctaaatagctattggaagtaaaaaataacttagtttccaatagttgctcatatttaggaagtagttcgattttgaatctagctttagcggccctgtccctatgagatctgcctgataataaggttgagagcagaggatatgagggcggaagaaaaaaggtcggtcgatatgaattatggatgagtggtggtccggtgacgcaacttatgagaaagttaggttcgacggtgaaggagaaacttgcgtcatacgtgtttgacctagctacctcattatgctagaaaataaaaaagagtgtgttataactggctatctcactgtataggaaaggtaaaaataatcacgctagtgtgaagaaattgacgtcaactgtatttagggagttcctaccgagttgctaaatgtggagagtaaatagagttgaatagcaactaactaaatttagcaagtctatttagagaaccattggagaagtatttttctgttcacttcttaaatttaagatttagagagttatttagagaactattgaagttgctcttagaccacctataattgtgactgttgaccacctatagatgcggttcaactagccctccgaccccctctcgagagttccgctccaccgcggcgaaggaagtggcggaggaggaggatccgcgcctgcgctgggccttcgtgcggaaggtgtacgcggccccccgctgccgtctggcccacgtacatcgccatcctcctatccctgtccccgctcggactcttcctcgctaccgccgtgtctgcggatctggccaagtagcccggtaggaagcgccgtgggaggagacaggcgaggcgttcgaccgccgccggcagcttaggacgtaccacgtctctgttctatgggttcacgagtttcggggccctacatggattctccgcctccgcctccgcctcgtccgccatcgccgccgcgacaccctcctcaccctcagggcgagcgtcacgtcggcggggagatgctgtaccaggacacagaccataggctccgcgcgctggtcgggagcgccgagggcttcggccgccacgccatcgggggcctctacggggccatccaccgcgtcacgtcgctccaagacgacgggcccgggagtctgagggaggcgtgccgggcggaggagcccctgtggatcgtcttcgaggtgtccggcaccatccacctccactcctacctccgcgtctcctcgtacaagaccatcgacgggcgcggccagcgcgtggtgctcaccggcaaggggctccggctcaagtcatgccatcacgtcatcatctgcaacctggtgttagaaggaggccgtgggcacgacgtggatggcatccaggtcaagcccgactccaccaacatctggatcgaccgctgcaccctcgccgactacgatgacggcctcatcgacatcacgcgccagagcacagacatcacagtctcaagatgccattttatgcggcacgacaagacgatgctcatcggtgccgaccccacgcacgtcggcgaccgctgcatcagggtcaccatccaccactgcttcttcgacggcacgcgacagaggcacccccgcctccgcttcggaaaggttcacctctacaacaactacacgcgcagctggggcatctacgccgtctgcgcaggcgtagaggcccagatcgtgtcccagtgcaacatctacgaggcaggtggagggcccccaaagaagacaactgtattcaagtacatgccggagaaggccggcgaccgagaggacgtggtggcagggtcgatcagctcggaaggggacgccttcctcaatggcgcgctgccctgcctgatcgataaccctgggtctgtcttcaggccagaggagtactaccagcagtggaccatggagccagcgtcgccggcgctcaaggacataatacagctctgcgcaggatggcagccggtgccccgccccccggatgatcgctgactttcatcattctgatatgctgcagctcgcttctgtaagaatattcgtttcacggaagcactgcatttgtatgcatctcatcctaggtaattcaacatttgtttcatggtagagtggcatttgtatgccactcctcttcatctgccccctctctgaaatgtagtagaaaagttgttatggttttctatttgtgtctttatttatggtacatacaattcccaatgtaaagatatttctctcgtccatagcagtacaatagcttttagttgtgaatgctactcgtatgtcttatactagaaagctgcaagacacgtcaatctgctttgtagacattcac

SEQ ID NO: 54061 - DNA, 1214 bp, Zea Mays
tggcatcatactatgctgtcaaatctgcttgtatgtccaaggtggtatgggttcagtgtcatcagctataagcaaagcagctcttgaagcaggagtgcagattgtaacaaatgccgaggtttcccaagtaatggttaatgaaactagtggaatggtagaaggggtagctttggttgatggaacagaggtgcactcgccagttgttctctcaaatgccacaccatacaaaacatttgtggacctagtaccttctagtgttcttccggaggacttcctctgtgcaattaaggcagcagattacagctctgcaacaacaaagattaatgtggctgtcgacagactgccacagttccagtgttgcaacaccaatcttgaaggtggcccagagcacatgggcacaatacacattgggtccgaaagcatggaggaaattgacgttgcatacagggaagcagcagacggcatctcgtccaaaagacctgttatagaaatgacaattccttctgttttggataagaccatctctccgccaggtcagcatgttattaatctctttgttcagtacacaccctacaaactttcagaaggcagctggcaggattctaatgtcagaaaagcctttgctgagcgatgcttctctttgattgatgagtacgcgccaggcttcagctcatcggtggtaggctacgatatgctgactccgcctgatcttgaaagagagttcggcctaacagggggaaacattttccacggcgcaatgggcttggattctctcttcctcatgaggcctgccaagggatggtcggattacagaactcctgtgaaggggctgtacctctgcgggagtggcgcacacccaggtggcggggtgatgggcgcgccaggacgcaacgccgccgccgttgttttggaggaccacgtgaagacaaagtaggtgtagtgtagctcgctggaaaccaagatggcatttttatcatcaggagaaaatctttgatgccatggtgctgttttagtgcctttcttttcttttcctttttggagaattattgtcgcaatccatagtcggagaacttatatcatgtgaagactcgtgtaacaaatcctcactaacatttctgtccctgtccggcgggaaattggaactgtggtaaaatgtggacccatctctttgaaccacaaaggccctatgggcttattttgtgatgaaacaacca

SEQ ID NO: 54062 - DNA, 2144 bp, Zea Mays
agaaagattcgcccatcgcccactggccactgcgcactgggcacggactggcaggcgaagaacctaagcagaacctaccatgtcaccggcggcgaggcgcatcctgctcgccgtcgccgcccgtcgccgccgcttctccacggacgcagcggcgtcggacccgtcccgggcgtcgcagcagctgcccaggggcaagcgatgggatgcggtggtgatcggcggcggccacaacggcctcgtcgcggccgcctacctcgcccgcgctggccgctccgtcgccgtgctggagcgccggggcgtcctgggtggcgcggcggtctcggagtcggaccttgtccccggattccgcttctcccgctgcagctacctcctcagcctccttcgccccgccatcctccgcgacctggagctggagaggcacgggctgaagctgctgccgcggagcccttcgtcgtttacgccatgccttgacggcagatacctgcttcttggccccgatgctgagctaaactactcagagatcagcaagttctctaggaaggatgcagtggcatacccaagatacgaggagaagctggagaacttctgcaagctcatggactttgtcatagactcagctccacccgagctgaggcaggaggcccacttctcgatggttgacaggatgaagcatagggttgagaagtcagcattctggggccaccttcttcggcatgtgatgcagcaggggcagaagaacatggtggaattctttgacctactcctttctccggcatcgaaaatcttgaacacctggtttgagagtgaggttttgaaggccactcttgcaactgacgccgtgataggagctatggctggtgtgcacactccaggttctggatatgttcttctacaccatgtcatgggggagactggtggtcagcgtggtgtttgggcgtatgtccaaggtggtatgggttcagtgtcatcagctataagcaaagcagctcttgaagcaggagtgcagattgtaacaaatgccgaggtgacttcacaattcttatagcatgtttcccaagtaatggttaatgaaactagtggaatggtagaaggggtagctttggttgatggaacagaggtgcactcgccagttgttctctcaaatgccacaccatacaaaacatttgtggacctagtaccttctagtgttcttccggaggacttcctctgtgcaattaaggcagcagattacagctctgcaacaacaaagattaatgtggctgtcgacagactgccacagttccagtgttgcaacaccaatcttgaaggtggcccagagcacatgggcacaatacacattgggtccgaaagcatggaggaaattgacgttgcatacagggaagcagcagacggcatctcgtccaaaagacctgttatagaaatgacaattccttctgttttggataagaccatctctccgccaggtcagcatgttattaatctctttgttcagtacacaccctacaaactttcagaaggcagctggcaggattctaatgtcagaaaagcctttgctgagcgatgcttctctttgattgatgagtacgcgccaggcttcagctcatcggtggtaggctacgatatgctgactccgcctgatcttgaaagagagttcggcctaacagggggaaacattttccacggcgcaatgggcttggattctctcttcctcatgaggcctgccaagggatggtcggattacagaactcctgtgaaggggctgtacctctgcgggagtggcgcacacccaggtggcggggtgatgggcgcgccaggacgcaacgccgccgccgttgttttggaggaccacgtgaagacaaagtaggtgtagtgtagctcgctggaaaccaagatggcatttttatcatcaggagaaaatctttgatgccatggtgctgttttagtgcctttcttttcttttcctttttggagaattattgtcgcaatccatagtcggagaacttatatcatgtgaagactcgtgtaacaaatcctcactaacatttctgtccctgtccggcgggaaattggaactgtggtaaaatgtggacccatctctttgaaccacaaaggccctatgggcttattttgtgatgaaacaacca

SEQ ID NO: 54063 - DNA, 2040 bp, Zea Mays
agaaagattcgcccatcgcccactggccactgcgcactgggcacggactggcaggcgaagaacctaagcagaacctaccatgtcaccggcggcgaggcgcatcctgctcgccgtcgccgcccgtcgccgccgcttctccacggacgcagcggcgtcggacccgtcccgggcgtcgcagcagctgcccaggggcaagcgatgggatgcggtggtgatcggcggcggccacaacggcctcgtcgcggccgcctacctcgcccgcgctggccgctccgtcgccgtgctggagcgccggggcgtcctgggtggcgcggcggtctcggagtcggaccttgtccccggattccgcttctcccgctgcagctacctcctcagcctccttcgccccgccatcctccgcgacctggagctggagaggcacgggctgaagctgctgccgcggagcccttcgtcgtttacgccatgccttgacggcagatacctgcttcttggccccgatgctgagctaaactactcagagatcagcaagttctctaggaaggatgcagtggcatacccaagatacgaggagaagctggagaacttctgcaagctcatggactttgtcatagactcagctccacccgagctgaggcaggaggcccacttctcgatggttgacaggatgaagcatagggttgagaagtcagcattctggggccaccttcttcggcatgtgatgcagcaggggcagaagaacatggtggaattctttgacctactcctttctccggcatcgaaaatcttgaacacctggtttgagagtgaggttttgaaggccactcttgcaactgacgccgtgataggagctatggctggtgtgcacactccaggttctggatatgttcttctacaccatgtcatgggggagactggtggtcagcgtggtgtttgggcgtatgtccaaggtggtatgggttcagtgtcatcagctataagcaaagcagctcttgaagcaggagtgcagattgtaacaaatgccgaggtttcccaagtaatggttaatgaaactagtggaatggtagaaggggtagctttggttgatggaacagaggtgcactcgccagttgttctctcaaatgccacaccatacaaaacatttgtggacctagtaccttctagtgttcttccggaggacttcctctgtgcaattaaggcagcagattacagctctgcaacaacaaagattaatgtggctgtcgacagactgccacagttccagtgttgcaacaccaatcttgaaggtggcccagagcacatgggcacaatacacattgggtccgaaagcatggaggaaattgacgttgcatacagggaagcagcagacggcatctcgtccaaaagacctgttatagaaatgacaattccttctgttttggataagaccatctctccgccagaaagcctttgctgagcgatgcttctctttgattgatgagtacgcgccaggcttcagctcatcggtggtaggctacgatatgctgactccgcctgatcttgaaagagagttcggcctaacagggggaaacattttccacggcgcaatgggcttggattctctcttcctcatgaggcctgccaagggatggtcggattacagaactcctgtgaaggggctgtacctctgcgggagtggcgcacacccaggtggcggggtgatgggcgcgccaggacgcaacgccgccgccgttgttttggaggaccacgtgaagacaaagtaggtgtagtgtagctcgctggaaaccaagatggcatttttatcatcaggagaaaatctttgatgccatggtgctgttttagtgcctttcttttcttttcctttttggagaattattgtcgcaatccatagtcggagaacttatatcatgtgaagactcgtgtaacaaatcctcactaacatttctgtccctgtccggcgggaaattggaactgtggtaaaatgtggacccatctctttgaaccacaaaggccctatgggcttattttgtgatgaaacaacca

SEQ ID NO: 54064 - DNA, 2139 bp, Zea Mays
agaaagattcgcccatcgcccactggccactgcgcactgggcacggactggcaggcgaagaacctaagcagaacctaccatgtcaccggcggcgaggcgcatcctgctcgccgtcgccgcccgtcgccgccgcttctccacggacgcagcggcgtcggacccgtcccgggcgtcgcagcagctgcccaggggcaagcgatgggatgcggtggtgatcggcggcggccacaacggcctcgtcgcggccgcctacctcgcccgcgctggccgctccgtcgccgtgctggagcgccggggcgtcctgggtggcgcggcggtctcggagtcggaccttgtccccggattccgcttctcccgctgcagctacctcctcagcctccttcgccccgccatcctccgcgacctggagctggagaggcacgggctgaagctgctgccgcggagcccttcgtcgtttacgccatgccttgacggcagatacctgcttcttggccccgatgctgagctaaactactcagagatcagcaagttctctaggaaggatgcagtggcatacccaaggatctgtatgtgaatgcagatacgaggagaagctggagaacttctgcaagctcatggactttgtcatagactcagctccacccgagctgaggcaggaggcccacttctcgatggttgacaggatgaagcatagggttgagaagtcagcattctggggccaccttcttcggcatgtgatgcagcaggggcagaagaacatggtggaattctttgacctactcctttctccggcatcgaaaatcttgaacacctggtttgagagtgaggttttgaaggccactcttgcaactgacgccgtgataggagctatggctggtgtgcacactccaggttctggatatgttcttctacaccatgtcatgggggagactggtggtcagcgtggtgtttgggcgtatgtccaaggtggtatgggttcagtgtcatcagctataagcaaagcagctcttgaagcaggagtgcagattgtaacaaatgccgaggtttcccaagtaatggttaatgaaactagtggaatggtagaaggggtagctttggttgatggaacagaggtgcactcgccagttgttctctcaaatgccacaccatacaaaacatttgtggacctagtaccttctagtgttcttccggaggacttcctctgtgcaattaaggcagcagattacagctctgcaacaacaaagattaatgtggctgtcgacagactgccacagttccagtgttgcaacaccaatcttgaaggtggcccagagcacatgggcacaatacacattgggtccgaaagcatggaggaaattgacgttgcatacagggaagcagcagacggcatctcgtccaaaagacctgttatagaaatgacaattccttctgttttggataagaccatctctccgccaggtcagcatgttattaatctctttgttcagtacacaccctacaaactttcagaaggcagctggcaggattctaatgtcagaaaagcctttgctgagcgatgcttctctttgattgatgagtacgcgccaggcttcagctcatcggtggtaggctacgatatgctgactccgcctgatcttgaaagagagttcggcctaacagggggaaacattttccacggcgcaatgggcttggattctctcttcctcatgaggcctgccaagggatggtcggattacagaactcctgtgaaggggctgtacctctgcgggagtggcgcacacccaggtggcggggtgatgggcgcgccaggacgcaacgccgccgccgttgttttggaggaccacgtgaagacaaagtaggtgtagtgtagctcgctggaaaccaagatggcatttttatcatcaggagaaaatctttgatgccatggtgctgttttagtgcctttcttttcttttcctttttggagaattattgtcgcaatccatagtcggagaacttatatcatgtgaagactcgtgtaacaaatcctcactaacatttctgtccctgtccggcgggaaattggaactgtggtaaaatgtggacccatctctttgaaccacaaaggccctatgggcttattttgtgatgaaacaacca

SEQ ID NO: 54065 - DNA, 2361 bp, Zea Mays
agaaagattcgcccatcgcccactggccactgcgcactgggcacggactggcaggcgaagaacctaagcagaacctaccatgtcaccggcggcgaggcgcatcctgctcgccgtcgccgcccgtcgccgccgcttctccacggacgcagcggcgtcggacccgtcccgggcgtcgcagcagctgcccaggggcaagcgatgggatgcggtggtgatcggcggcggccacaacggcctcgtcgcggccgcctacctcgcccgcgctggccgctccgtcgccgtgctggagcgccggggcgtcctgggtggcgcggcggtctcggagtcggaccttgtccccggattccgcttctcccgctgcagctacctcctcagcctccttcgccccgccatcctccgcgacctggagctggagaggcacgggctgaagctgctgccgcggagcccttcgtcgtttacgccatgccttgacggcagatacctgcttcttggccccgatgctgagctaaactactcagagatcagcaagttctctaggaaggatgcagtggcatacccaagatacgaggagaagctggagaacttctgcaagctcatggactttgtcatagactcagctccacccgagctgaggcaggaggcccacttctcgatggttgacaggatgaagcatagggttgagaagtcagcattctggggccaccttcttcggcatgtgatgcagcaggggcagaagaacatggtggaattctttgacctactcctttctccggcatcgaaaatcttgaacacctggtttgagggcctcccattgactactgtctactgcagagtgaggttttgaaggccactcttgcaactgacgccgtgataggagctatggctggtgtgcacactccaggttctggatatgttcttctacaccatgtcatgggggagactggtggtcagcgtggtgtttgggcgtatgtccaaggtggtatgggttcagtgtcatcagctataagcaaagcagctcttgaagcaggagtgcagattgtaacaaatgccgaggtttcccaagtaatggttaatgaaactagtggaatggtagaaggggtagctttggttgatggaacagaggtgcactcgccagttgttctctcaaatgccacaccatacaaaacatttgtggacctagtaccttctagtgttcttccggaggacttcctctgtgcaattaaggcagcagattacagctctgcaacaacaaagattaatgtggctgtcgacagactgccacagttccagtgttgcaacaccaatcttgaaggtggcccagagcacatgggcacaatacacattgggtccgaaagcatggaggaaattgacgttgcatacagggaagcagcagacggcatctcgtccaaaagacctgttatagaaatgacaattccttctgttttggataagaccatctctccgccaggtatgcatgtatcttgctccgtcatcgcagtggcataactatctactaagacatatctcagtatcacaagatcccaatagagcaagaaactatatgggggcgcacgtcgttaaactgtgataggatcctaccgctactctttgtgtccaaggcaatttttcgttcctacccccctgatatcatttccatcttttgctttatcctttcgataggtcagcatgttattaatctctttgttcagtacacaccctacaaactttcagaaggcagctggcaggattctaatgtcagaaaagcctttgctgagcgatgcttctctttgattgatgagtacgcgccaggcttcagctcatcggtggtaggctacgatatgctgactccgcctgatcttgaaagagagttcggcctaacagggggaaacattttccacggcgcaatgggcttggattctctcttcctcatgaggcctgccaagggatggtcggattacagaactcctgtgaaggggctgtacctctgcgggagtggcgcacacccaggtggcggggtgatgggcgcgccaggacgcaacgccgccgccgttgttttggaggaccacgtgaagacaaagtaggtgtagtgtagctcgctggaaaccaagatggcatttttatcatcaggagaaaatctttgatgccatggtgctgttttagtgcctttcttttcttttcctttttggagaattattgtcgcaatccatagtcggagaacttatatcatgtgaagactcgtgtaacaaatcctcactaacatttctgtccctgtccggcgggaaattggaactgtggtaaaatgtggacccatctctttgaaccacaaaggccctatgggcttattttgtgatgaaacaacca

SEQ ID NO: 54066 - DNA, 1991 bp, Zea Mays
agaaagattcgcccatcgcccactggccactgcgcactgggcacggactggcaggcgaagaacctaagcagaacctaccatgtcaccggcggcgaggcgcatcctgctcgccgtcgccgcccgtcgccgccgcttctccacggacgcagcggcgtcggacccgtcccgggcgtcgcagcagctgcccaggggcaagcgatgggatgcggtggtgatcggcggcggccacaacggcctcgtcgcggccgcctacctcgcccgcgctggccgctccgtcgccgtgctggagcgccggggcgtcctgggtggcgcggcggtctcggagtcggaccttgtccccggattccgcttctcccgctgcagctacctcctcagcctccttcgccccgccatcctccgcgacctggagctggagaggcacgggctgaagctgctgccgcggagcccttcgtcgtttacgccatgccttgacggcagatacctgcttcttggccccgatgctgagctaaactactcagagatcagcaagttctctaggaaggatgcagtggcatacccaagatacgaggagaagctggagaacttctgcaagctcatggactttgtcatagactcagctccacccgagctgaggcaggaggcccacttctcgatggttgacaggatgaagcatagggttgagaagtcagcattctggggccaccttcttcggcatgtgatgcagcaggggcagaagaacatggtggaattctttgacctactcctttctccggcatcgaaaatcttgaacacctggtttgagagtgaggttttgaaggccactcttgcaactgacgccgtgataggagctatggctggtgtgcacactccaggttctggatatgttcttctacaccatgtcatgggggagactggtggtcagcgtggtgtttgggcgtatgtccaaggtggtatgggttcagtgtcatcagctataagcaaagcagctcttgaagcaggagtgcagattgtaacaaatgccgaggtttcccaagtaatggttaatgaaactagtggaatggtagaaggggtagctttggttgatggaacagaggtgcactcgccagttgttctctcaaatgccacaccatacaaaacatttgtggacctagtaccttctagtgttcttccggaggacttcctctgtgcaattaaggcagcagattacagctctgcaacaacaaagattaatgtggctgtcgacagactgccacagttccagtgttgcaacaccaatcttgaaggtggcccagagcacatgggcacaatacacattgggtccgaaagcatggaggaaattgacgttgcatacagggaagcagcagacggcatctcgtccaaaagacctgttatagaaatgacaattccttctgttttggataagaccatctctccgccaggcttcagctcatcggtggtaggctacgatatgctgactccgcctgatcttgaaagagagttcggcctaacagggggaaacattttccacggcgcaatgggcttggattctctcttcctcatgaggcctgccaagggatggtcggattacagaactcctgtgaaggggctgtacctctgcgggagtggcgcacacccaggtggcggggtgatgggcgcgccaggacgcaacgccgccgccgttgttttggaggaccacgtgaagacaaagtaggtgtagtgtagctcgctggaaaccaagatggcatttttatcatcaggagaaaatctttgatgccatggtgctgttttagtgcctttcttttcttttcctttttggagaattattgtcgcaatccatagtcggagaacttatatcatgtgaagactcgtgtaacaaatcctcactaacatttctgtccctgtccggcgggaaattggaactgtggtaaaatgtggacccatctctttgaaccacaaaggccctatgggcttattttgtgatgaaacaacca

SEQ ID NO: 54067 - DNA, 2149 bp, Zea Mays
agaaagattcgcccatcgcccactggccactgcgcactgggcacggactggcaggcgaagaacctaagcagaacctaccatgtcaccggcggcgaggcgcatcctgctcgccgtcgccgcccgtcgccgccgcttctccacggacgcagcggcgtcggacccgtcccgggcgtcgcagcagctgcccaggggcaagcgatgggatgcggtggtgatcggcggcggccacaacggcctcgtcgcggccgcctacctcgcccgcgctggccgctccgtcgccgtgctggagcgccggggcgtcctgggtggcgcggcggtctcggagtcggaccttgtccccggattccgcttctcccgctgcagctacctcctcagcctccttcgccccgccatcctccgcgacctggagctggagaggcacgggctgaagctgctgccgcggagcccttcgtcgtttacgccatgccttgacggcagatacctgcttcttggccccgatgctgagctaaactactcagagatcagcaagttctctaggaaggatgcagtggcatacccaagatacgaggagaagctggagaacttctgcaagctcatggactttgtcatagactcagctccacccgagctgaggcaggaggcccacttctcgatggttgacaggatgaagcatagggttgagaagtcagcattctggggccaccttcttcggcatgtgatgcagcaggggcagaagaacatggtggaattctttgacctactcctttctccggcatcgaaaatcttgaacacctggtttgagggcctcccattgactactgtctactgcagagtgaggttttgaaggccactcttgcaactgacgccgtgataggagctatggctggtgtgcacactccaggttctggatatgttcttctacaccatgtcatgggggagactggtggtcagcgtggtgtttgggcgtatgtccaaggtggtatgggttcagtgtcatcagctataagcaaagcagctcttgaagcaggagtgcagattgtaacaaatgccgaggtttcccaagtaatggttaatgaaactagtggaatggtagaaggggtagctttggttgatggaacagaggtgcactcgccagttgttctctcaaatgccacaccatacaaaacatttgtggacctagtaccttctagtgttcttccggaggacttcctctgtgcaattaaggcagcagattacagctctgcaacaacaaagattaatgtggctgtcgacagactgccacagttccagtgttgcaacaccaatcttgaaggtggcccagagcacatgggcacaatacacattgggtccgaaagcatggaggaaattgacgttgcatacagggaagcagcagacggcatctcgtccaaaagacctgttatagaaatgacaattccttctgttttggataagaccatctctccgccaggtcagcatgttattaatctctttgttcagtacacaccctacaaactttcagaaggcagctggcaggattctaatgtcagaaaagcctttgctgagcgatgcttctctttgattgatgagtacgcgccaggcttcagctcatcggtggtaggctacgatatgctgactccgcctgatcttgaaagagagttcggcctaacagggggaaacattttccacggcgcaatgggcttggattctctcttcctcatgaggcctgccaagggatggtcggattacagaactcctgtgaaggggctgtacctctgcgggagtggcgcacacccaggtggcggggtgatgggcgcgccaggacgcaacgccgccgccgttgttttggaggaccacgtgaagacaaagtaggtgtagtgtagctcgctggaaaccaagatggcatttttatcatcaggagaaaatctttgatgccatggtgctgttttagtgcctttcttttcttttcctttttggagaattattgtcgcaatccatagtcggagaacttatatcatgtgaagactcgtgtaacaaatcctcactaacatttctgtccctgtccggcgggaaattggaactgtggtaaaatgtggacccatctctttgaaccacaaaggccctatgggcttattttgtgatgaaacaacca

SEQ ID NO: 54068 - DNA, 2115 bp, Zea Mays
agaaagattcgcccatcgcccactggccactgcgcactgggcacggactggcaggcgaagaacctaagcagaacctaccatgtcaccggcggcgaggcgcatcctgctcgccgtcgccgcccgtcgccgccgcttctccacggacgcagcggcgtcggacccgtcccgggcgtcgcagcagctgcccaggggcaagcgatgggatgcggtggtgatcggcggcggccacaacggcctcgtcgcggccgcctacctcgcccgcgctggccgctccgtcgccgtgctggagcgccggggcgtcctgggtggcgcggcggtctcggagtcggaccttgtccccggattccgcttctcccgctgcagctacctcctcagcctccttcgccccgccatcctccgcgacctggagctggagaggcacgggctgaagctgctgccgcggagcccttcgtcgtttacgccatgccttgacggcagatacctgcttcttggccccgatgctgagctaaactactcagagatcagcaagttctctaggaaggatgcagtggcatacccaagatacgaggagaagctggagaacttctgcaagctcatggactttgtcatagactcagctccacccgagctgaggcaggaggcccacttctcgatggttgacaggatgaagcatagggttgagaagtcagcattctggggccaccttcttcggcatgtgatgcagcaggggcagaagaacatggtggaattctttgacctactcctttctccggcatcgaaaatcttgaacacctggtttgagagtgaggttttgaaggccactcttgcaactgacgccgtgataggagctatggctggtgtgcacactccaggttctggatatgttcttctacaccatgtcatgggggagactggtggtcagcgtggtgtttgggcgtatgtccaaggtggtatgggttcagtgtcatcagctataagcaaagcagctcttgaagcaggagtgcagattgtaacaaatgccgaggtttcccaagtaatggttaatgaaactagtggaatggtagaaggggtagctttggttgatggaacagaggtgcactcgccagttgttctctcaaatgccacaccatacaaaacatttgtggacctagtaccttctagtgttcttccggaggacttcctctgtgcaattaaggcagcagattacagctctgcaacaacaaagattaatgtggctgtcgacagactgccacagttccagtgttgcaacaccaatcttgaaggtggcccagagcacatgggcacaatacacattgggtccgaaagcatggaggaaattgacgttgcatacagggaagcagcagacggcatctcgtccaaaagacctgttatagaaatgacaattccttctgttttggataagaccatctctccgccagcatgttattaatctctttgttcagtacacaccctacaaactttcagaaggcagctggcaggattctaatgtcagaaaagcctttgctgagcgatgcttctctttgattgatgagtacgcgccaggcttcagctcatcggtggtaggctacgatatgctgactccgcctgatcttgaaagagagttcggcctaacagggggaaacattttccacggcgcaatgggcttggattctctcttcctcatgaggcctgccaagggatggtcggattacagaactcctgtgaaggggctgtacctctgcgggagtggcgcacacccaggtggcggggtgatgggcgcgccaggacgcaacgccgccgccgttgttttggaggaccacgtgaagacaaagtaggtgtagtgtagctcgctggaaaccaagatggcatttttatcatcaggagaaaatctttgatgccatggtgctgttttagtgcctttcttttcttttcctttttggagaattattgtcgcaatccatagtcggagaacttatatcatgtgaagactcgtgtaacaaatcctcactaacatttctgtccctgtccggcgggaaattggaactgtggtaaaatgtggacccatctctttgaaccacaaaggccctatgggcttattttgtgatgaaacaacca

SEQ ID NO: 54069 - DNA, 783 bp, Zea Mays
gtaggttctatgctaccttctcggaagatttagctccctctgcttcctacccctctaaaccgaactgcttctgttttgctcttcatctttggagtgaactttggtctaacgattcagaagcgaaagctgctaataggagctgcacaactgagagaataattccagaggagctctttctcttccgtcaaagggttccaccgatggcgataaagatgaaggggatcttcaaagggctgaagataatttctcaaatgtttgcgcataaggagcaggagatggagattgggtaccctacagatgtaaagcatgtggctcacattggtctgggcaccagtgacacatctccaagctggatggctgaattcaagggaacagatgattcatcagcaggctctgtgagcacagctgcgcagtcaaggcagacttcttgggcctctgcagacttcgagcagccgagaagcatgctgcccatcgacatcttccaggacaagaggcccgggcaagagaacccggacgtgcagaggggggagagaaaggcgaggaggaagaagacgaagaagaacagagcgtcgtcgccgcccgcttcgtccgcaaggtcgtcttccgcgaggtccacagcctcgtttgcgacggcgtacgacgccttcagcgagtcccagagagggttcccggtcgcctgaatgaatggcgcgcgccggccggacggaaacaaaccaccatgcgtgcgtgaactgtaaatgctttcggattagggagacagacagcttggtttggattgtttga

SEQ ID NO: 54070 - DNA, 977 bp, Zea Mays
gtccttatccattttgttcactgtctctagtacgggacagggggagatatttgtgtatgctgaagagctggcctggtgttgggtgtttgtttgacacgtatgtaagcttgtgcagtgctggcgcccagggagtactccactatgttgtgaacaagttcagggtacttgcccacatattgagtgccttagggcttggctttagtggaactttctccctgtcccgagctctggtcaaggttcacagtgagtgtgctgtagtttttgtgcccactctggtgctaaccctctccccaacctcatctgttggtctgccctgaacccttgcacgccagcaccctgtctggtgaccacaatagcagttctcaccctcgtcatggcccagattcctcggaggttgtgtcggtcgtgtggtgctcgttccctactcctcgaagagtacccagaagaagtgatttgtgaagaaggagcatgttccagttctactgatccagtggtggattccatctaactgcttatcgtaatagaagatctcagatttcctcctgtaataaggagggattcttgctatctttagctcctaatagttgcttcgtggggaggccttgaagattttaatgcttagtttatttcttatggaaaggcttcacctttcccaatcgtgtattaattcatgcacttgagtactatcaggacctgtaataattacaactctttctatgatgtaaaacttgagatctggaattgtaaaagtatattttgtaaaatcttctgctctatctccgaagtgtgtgtgtgtatcaaatgtgattactgtaatgtacatgttatgtgggagatccttgggatgatgagttcgagttgatgaactcgatagccttattaagttacccggtacatgtgcatagccatctgaggccgttaatggcaaggattggtgcatgtgggcctgataacttgggagggctgtcacatctaat

SEQ ID NO: 54071 - DNA, 301 bp, Zea Mays
gttcagggtacttgcccacatattgagtgccttagggcttggctttagtggaactttctccctgtcccgagctctggtcaaggttcacagtgagtgtgctgtagtttttgtgcccactctggtgctaaccctctccccaacctcatctgttggtctgccctgaacccttgcacgccagcaccctgtctggtgaccacaatagcagttctcaccctcgtcatggcccagattcctcggaggttgtgtcggtcgtgtggtgctcgttccctactcctcgaagaagaagtgatttgtgaagaag

SEQ ID NO: 54072 - DNA, 3138 bp, Zea Mays
atggccaacctagcggcccagctcgctgccgtgctccaggcctgcatcaagcgtagcggtggccgcaagcccagccgctcaaacgccaaggccgcgcacgcgcgcgtcctcgccgccggcctcgccgcagataccttcctcctcaaccgcctcgtcgagctctactccctctcgggcctgccatgccacgcgctccgcgccttccgcgcgctgccccaccccaacgtctactcctacaacgccgccatctcagctgcctgccgcgcgggggacctcgccgccgcccgggacctgctcggccgaatgcccgaccggaacgccgtctcctggaataccgtcatcgccgccgtcgcgcggtcgggctccccgggggaggcgctagagatgtaccaggggatgctgcaggagggcctcgcgccgacgaacttcacgctggccagcgtgctcagcgcgtgcggcgccgtggccgcgctcgacgacgggaggcgctgccatgggctcgccgtcaaggtcgggctcgacgggcaccagttcgtcgagaacgggctcctcggcatgtacacaaagtgcgggagcgtcgccgacgcggtcaggctgttcgacgggatgcctagcccgaacgaggtgtcgttcacggcgatgatgggcgggttggcgcagggcggggccgtcgacgatgccctcaggttgttcgcgcggatgagcaggaccgggattcgtgttgatccggtagcggtctccagtgttctcggcgcctgcgcgcaggcctgcgctggtgactacaatgtcgctcgtgcaatccagctcgcacagtccatccatgcattggttgtcagaaaaggttttggatcggaccaacacgtgggtaactcgttggttgatctgtacgcgaagggcatgaagatggatgaggccatcaaagtctttgagtcgttgtccagtgttagtattgtttcttggaacattcttataactgggtatggtcagctgggatgctatgagagggccatggaagttcttgagtttatgcaagagtcaggctttgagcccaatgaggtaacctacagtaacatgcttgcttcttgtattaaggcaagggatgttccgtctgctcgtgcaatgtttgacaagataccaaagccaagtgtgactacatggaacaccctattatctggctacggccaggaggaactgcatcaagaaacaatcgacttgtttaggagaatgcaacatcaaaatgtgcagcctgaccggacaactttagctgtgatactcagttcatgttctagattaggaaatttcgaactgggcaagcaagtgcattctgcttcagtaagactactgcttcataatgacatgtttgttgcgagtggtctgatagatatatattcaaagtgtggtcaggttggcatcgcactgatcattttcaacatgatgaccgagagagatgtggtatgctggaattccatgatctcaggtttggctatccattctttgagtgaagaggccttcgatttcttgaagcagatgagggaaaatgggatgttccccacagaatcctcttatgctagtatgatcaatttgtgtgctagattgtcatccatacctcaaggtaggcagatgcatgcacaggttctgaaggatggttatgatcagaatgtatacgttggctgttccctgatcgacatgtatgctaaatctggcaacatggatgatgcacgccttttctttaactgcatgattgtgaagaacttagtggcatggaatgagatgatccatggatatgcccagaatggttttggagagaaagctgtggaattgtttgagtacatgctaaccacaaaacagaagcctgacagtgtgactttcattgctgtactgacaggatgcagtcactctgggctcgttgatgaagcagttacattctttaattccatggagagcaattatgggattacaccattagttgagcattacacttgcctgatagatgcactggcgcgggctgctcgttttgctgaagttgaggcagtgataggtaaaatgccatacaaggatgatcctatactgtgggaagttctactagctgcatgtgttgtacatcacaatgctgagttgggggaattttctgccaagcatctattccgccttgatccaaaaaatccatcaccttatgtgcttctatcaaacatatatgctactttgggtagacatggtgatgcctcagctgttagggcgctgatgagtagtcgcggtgttgtgaaaggccgcggatacagctgggtgaatcacaaggatggttctcgtgcctttatggtagctgatgatcttggaacggatgttggagaacgcacaatgttcagtgataatggggacacttctgggatgacagaagtgcacatagatgaaacctgtgctggatgatttgaaatctggtgctgctgctagcctgctaccatcttcactgaaaccttaaaccaatattagttgaatccagcaggctcaatctggtgttgggagcctcaggtttcactgttgttttagcttcaagcgttactgcaaattaggcatggtctgaacgtttgggaggaaagtgtgaactgaaggaaatgtacattgcagattggtgcaaagacaacttcaagctggattgattagtttatttcatcatattctgcaaaagagctggtgactggtgagtttaacaagaaggagcggtaacttgggtaattggaatctaattgtgcttcccattctgtccaagatccatcataatttaggcagtcatgccagatccgcaagtgacatcaatgggtttgtctagggaaattcctgaagaaacaccaaacacaccatattgttattgcttggcaaacttttcagaatttatgtacatgtataatatatctgtgagaaatactcaatttctcaaagatctgaaatgttaaattatcagtattcttcttcttcctctgcttctcgtatttgtactttggaaaaattcttgctttcgttcttgccaagaacacaacaaattacttgtttctgattattaaaatgagttgcaagttgcaacagaatggagacctgcctgcttgctgaaacttctgccgcagctcatctgcagacagaaggctt

SEQ ID NO: 54073 - DNA, 3193 bp, Zea Mays
atggccaacctagcggcccagctcgctgccgtgctccaggcctgcatcaagcgtagcggtggccgcaagcccagccgctcaaacgccaaggccgcgcacgcgcgcgtcctcgccgccggcctcgccgcagataccttcctcctcaaccgcctcgtcgagctctactccctctcgggcctgccatgccacgcgctccgcgccttccgcgcgctgccccaccccaacgtctactcctacaacgccgccatctcagctgcctgccgcgcgggggacctcgccgccgcccgggacctgctcggccgaatgcccgaccggaacgccgtctcctggaataccgtcatcgccgccgtcgcgcggtcgggctccccgggggaggcgctagagatgtaccaggggatgctgcaggagggcctcgcgccgacgaacttcacgctggccagcgtgctcagcgcgtgcggcgccgtggccgcgctcgacgacgggaggcgctgccatgggctcgccgtcaaggtcgggctcgacgggcaccagttcgtcgagaacgggctcctcggcatgtacacaaagtgcgggagcgtcgccgacgcggtcaggctgttcgacgggatgcctagcccgaacgaggtgtcgttcacggcgatgatgggcgggttggcgcagggcggggccgtcgacgatgccctcaggttgttcgcgcggatgagcaggaccgggattcgtgttgatccggtagcggtctccagtgttctcggcgcctgcgcgcaggcctgcgctggtgactacaatgtcgctcgtgcaatccagctcgcacagtccatccatgcattggttgtcagaaaaggttttggatcggaccaacacgtgggtaactcgttggttgatctgtacgcgaagggcatgaagatggatgaggccatcaaagtctttgagtcgttgtccagtgttagtattgtttcttggaacattcttataactgggtatggtcagctgggatgctatgagagggccatggaagttcttgagtttatgcaagagtcaggctttgagcccaatgaggtaacctacagtaacatgcttgcttcttgtattaaggcaagggatgttccgtctgctcgtgcaatgtttgacaagataccaaagccaagtgtgactacatggaacaccctattatctggctacggccaggaggaactgcatcaagaaacaatcgacttgtttaggagaatgcaacatcaaaatgtgcagcctgaccggacaactttagctgtgatactcagttcatgttctagattaggaaatttcgaactgggcaagcaagtgcattctgcttcagtaagactactgcttcataatgacatgtttgttgcgagtggtctgatagatatatattcaaagtgtggtcaggttggcatcgcactgatcattttcaacatgatgaccgagagagatgtggtatgctggaattccatgatctcaggtttggctatccattctttgagtgaagaggccttcgatttcttgaagcagatgagggaaaatgggatgttccccacagaatcctcttatgctagtatgatcaatttgtgtgctagattgtcatccatacctcaaggtaggcagatgcatgcacaggttctgaaggatggttatgatcagaatgtatacgttggctgttccctgatcgacatgtatgctaaatctggcaacatggatgatgcacgccttttctttaactgcatgattgtgaagaacttagtggcatggaatgagatgatccatggatatgcccagaatggttttggagagaaagctgtggaattgtttgagtacatgctaaccacaaaacagaagcctgacagtgtgactttcattgctgtactgacaggatgcagtcactctgggctcgttgatgaagcagttacattctttaattccatggagagcaattatgggattacaccattagttgagcattacacttgcctgatagatgcactggcgcgggctgctcgttttgctgaagttgaggcagtgataggtaaaatgccatacaaggatgatcctatactgtgggaagttctactagctgcatgtgttgtacatcacaatgctgagttgggggaattttctgccaagcatctattccgccttgatccaaaaaatccatcaccttatgtgcttctatcaaacatatatgctactttgggtagacatggtgatgcctcagctgttagggcgctgatgagtagtcgcggtgttgtgaaaggccgcggatacagctgggtgaatcacaaggatggttctcgtgcctttatggtagctgatgatcttggaacggatgttggagaacgcacaatgttcagtgataatggggacacttctgggatgacagaagtgcacatagatgaaacctgtgctggatgatttgaaatctggtgctgctgctagcctgctaccatcttcactgaaaccttaaaccaatattagttgaatccagcaggctcaatctggtgttgggagcctcaggtttcactgttgttttagcttcaagcgttactgcaaattaggcatggtctgaacgtttgggaggaaagtgtgaactgaaggaaatgtacattgcagattggtgcaaagacaacttcaagctggattgattagtttatttcatcatattctgcaaaagatgagtcaaggataaaattgcaattgttttttgaagtgtataatgggagaaaaagagctggtgactggtgagtttaacaagaaggagcggtaacttgggtaattggaatctaattgtgcttcccattctgtccaagatccatcataatttaggcagtcatgccagatccgcaagtgacatcaatgggtttgtctagggaaattcctgaagaaacaccaaacacaccatattgttattgcttggcaaacttttcagaatttatgtacatgtataatatatctgtgagaaatactcaatttctcaaagatctgaaatgttaaattatcagtattcttcttcttcctctgcttctcgtatttgtactttggaaaaattcttgctttcgttcttgccaagaacacaacaaattacttgtttctgattattaaaatgagttgcaagttgcaacagaatggagacctgcctgcttgctgaaacttctgccgcagctcatctgcagacagaaggctt

SEQ ID NO: 54074 - DNA, 2071 bp, Zea Mays
gcagcgtgatccgctggcgctcgcggtgaggcgtcgaaggtcaacccctatcttccacctcggggggactgcctacccggtggatcgacgcagcagctttattggttccccggagacctgcaagttgcaagacgagctagacctagcaaccgctccctgccgaccttcggcgtcttggagtaaacatttcggcgtccaggcaataccgaagatctcccatccgctctgtcgatttgcaatggagcccggcagcccagccccgaagaaatcacggctggtgcactcagcggactgcgaaatggaggaggcgcaggcgccttccagttccaatgcagcggggggcgtgaaccagagcttgcactggacccagtggcagatcctggactccatcctcccgaccggcggcttcgcgcactcgtacggcctcgaggccgccatgcagtcccgcgtggtgaacgaccaggaggacctgaggtcgttcgtcgtccaggtcctcgacagcgccggcagcctgctgctgccgttcgtgcactgcgcatgcgcaggcaagtcccccggcgacgcagcggcgtgggccaagctggaccggttgctggacgccacgttgacgaacgaggtcgccaggaaggcgtccgcggctcagggctcggctctgctgcgggtggccgcgtccgtcttcgccgaggttccggcgctgcaggagctccggcggacgttgctgggctccaagagcgtgtcgttccaccacgcgcctgtgtttgggctggtgtgcggcttggttggattcgacggcgagacggcgcagcgggcgtacatgttcgtgacgatgagggacgtgctctctgccgcgacgaggctcaatctgatcggcccgctggctgcttcggtgctgcagcaccagcttgcgccggatgccgagaggatggtgcggaaatggagggaccgtgatgtctctgaggcgtcacagactgccccgctgctcgatgccgtgcagggctgccacgcttacatgttctccaggctgttttgttcgtgacaacaaggatcacatcgacaggagccaacgacagctgtcttctcataaaaaaaaagcaccaggtgagtacaagaatcccaggaacagattcattatgcctcatactgaccctcgtcgttattttcatgcaaacttgtacaacagagatgcaatagtgcatcattagtatcagggttgtaccctctctaccatctattacaccatcatagcatcgtcccatatattcaacggttacagaacacaaacatttgcatgtcaagtgtcacaaagaacacgcttcattatttctgttccatgatacaaagtgccacagcagttgctcgtctccaagcactgtcctaggatccctgagctgcagctgctgcagcagcttgcttggcttcaagggacttctcataatcctcgatggacttgaacagctgcgagaagtttcccttgccgaacccgccgcagccacccttttggtattcttgccccttctcatccttctccatgcacccgatcctttggatgatttccaagaacagcgttggcctgaatgacgcagctggtccagttagattttggattgcataggggtcaaggaaaccatggcattgacactagaatgctgagctatgatcttcagaattaaagtgcaggggattaatgatgagaatggaatgttgaccatcatgtaatcagctgggacatgggagctcgaattatgattcacagcatgcaaaaaggatcctcttttttgctgtcacggtcttcataaagatgcatcatgcatggaggcacaaaaagagggtttgataccttcgtactgtatatatattctatatatgcctgcaatcctgaactagctgaataccttatcctggaattgttcctttgcaattctagatgcatcatgcacacttgtaaaacaaaaaaggtgaaaaagataacgattttacctgtcccccactggcttggtgaagatttggagcagcacgccctggtcatccctgtccaccagcacccctagctcctggcactccttaatctgtg

SEQ ID NO: 54075 - DNA, 2145 bp, Zea Mays
gcagcgtgatccgctggcgctcgcggtgaggcgtcgaaggtcaacccctatcttccacctcggggggactgcctacccggtggatcgacgcagcagctttattggttccccggagacctgcaagttgcaagacgagctagacctagcaaccgctccctgccgaccttcggcgtcttggagtaaacatttcggcgtccaggcaataccgaagatctcccatccgctctgtcgatttgcaatggagcccggcagcccagccccgaagaaatcacggctggtgcactcagcggactgcgaaatggaggaggcgcaggcgccttccagttccaatgcagcggggggcgtgaaccagagcttgcactggacccagtggcagatcctggactccatcctcccgaccggcggcttcgcgcactcgtacggcctcgaggccgccatgcagtcccgcgtggtgaacgaccaggaggacctgaggtcgttcgtcgtccaggtcctcgacagcgccggcagcctgctgctgccgttcgtgcactgcgcatgcgcaggcaagtcccccggcgacgcagcggcgtgggccaagctggaccggttgctggacgccacgttgacgaacgaggtcgccaggaaggcgtccgcggctcagggctcggctctgctgcgggtggccgcgtccgtcttcgccgaggttccggcgctgcaggagctccggcggacgttgctgggctccaagagcgtgtcgttccaccacgcgcctgtgtttgggctggtgtgcggcttggttggattcgacggcgagacggcgcagcgggcgtacatgttcgtgacgatgagggacgtgctctctgccgcgacgaggctcaatctgatcggcccgctggctgcttcggtgctgcagcaccagcttgcgccggatgccgagaggatggtgcggaaatggagggaccgtgatgtctctgaggcgtcacagactgccccgctgctcgatgccgtgcagggctgccacgcttacatgttctccaggctgttttgttcgtgacaacaagccatacacgatacatatccctggacaaaactagcagccttccatggccatggctgatggctccaagtgatttctgatcacatcgacaggagccaacgacagctgtcttctcataaaaaaaaagcaccaggtgagtacaagaatcccaggaacagattcattatgcctcatactgaccctcgtcgttattttcatgcaaacttgtacaacagagatgcaatagtgcatcattagtatcagggttgtaccctctctaccatctattacaccatcatagcatcgtcccatatattcaacggttacagaacacaaacatttgcatgtcaagtgtcacaaagaacacgcttcattatttctgttccatgatacaaagtgccacagcagttgctcgtctccaagcactgtcctaggatccctgagctgcagctgctgcagcagcttgcttggcttcaagggacttctcataatcctcgatggacttgaacagctgcgagaagtttcccttgccgaacccgccgcagccacccttttggtattcttgccccttctcatccttctccatgcacccgatcctttggatgatttccaagaacagcgttggcctgaatgacgcagctggtccagttagattttggattgcataggggtcaaggaaaccatggcattgacactagaatgctgagctatgatcttcagaattaaagtgcaggggattaatgatgagaatggaatgttgaccatcatgtaatcagctgggacatgggagctcgaattatgattcacagcatgcaaaaaggatcctcttttttgctgtcacggtcttcataaagatgcatcatgcatggaggcacaaaaagagggtttgataccttcgtactgtatatatattctatatatgcctgcaatcctgaactagctgaataccttatcctggaattgttcctttgcaattctagatgcatcatgcacacttgtaaaacaaaaaaggtgaaaaagataacgattttacctgtcccccactggcttggtgaagatttggagcagcacgccctggtcatccctgtccaccagcacccctagctcctggcactccttaatctgtg

SEQ ID NO: 54076 - DNA, 2083 bp, Zea Mays
tttagagggaaccgctgcagcgtgatccgctggcgctcgcggtgaggcgtcgaaggtcaacccctatcttccacctcggggggactgcctacccggtggatcgacgcagcagctttattggttccccggagacctgcaagttgcaagacgagctagacctagcaaccgctccctgccgaccttcggcgtcttggagtaaacatttcggcgtccagtaccgaagatctcccatccgctctgtcgatttgcaatggagcccggcagcccagccccgaagaaatcacggctggtgcactcagcggactgcgaaatggaggaggcgcaggcgccttccagttccaatgcagcggggggcgtgaaccagagcttgcactggacccagtggcagatcctggactccatcctcccgaccggcggcttcgcgcactcgtacggcctcgaggccgccatgcagtcccgcgtggtgaacgaccaggaggacctgaggtcgttcgtcgtccaggtcctcgacagcgccggcagcctgctgctgccgttcgtgcactgcgcatgcgcaggcaagtcccccggcgacgcagcggcgtgggccaagctggaccggttgctggacgccacgttgacgaacgaggtcgccaggaaggcgtccgcggctcagggctcggctctgctgcgggtggccgcgtccgtcttcgccgaggttccggcgctgcaggagctccggcggacgttgctgggctccaagagcgtgtcgttccaccacgcgcctgtgtttgggctggtgtgcggcttggttggattcgacggcgagacggcgcagcgggcgtacatgttcgtgacgatgagggacgtgctctctgccgcgacgaggctcaatctgatcggcccgctggctgcttcggtgctgcagcaccagcttgcgccggatgccgagaggatggtgcggaaatggagggaccgtgatgtctctgaggcgtcacagactgccccgctgctcgatgccgtgcagggctgccacgcttacatgttctccaggctgttttgttcgtgacaacaaggatcacatcgacaggagccaacgacagctgtcttctcataaaaaaaaagcaccaggtgagtacaagaatcccaggaacagattcattatgcctcatactgaccctcgtcgttattttcatgcaaacttgtacaacagagatgcaatagtgcatcattagtatcagggttgtaccctctctaccatctattacaccatcatagcatcgtcccatatattcaacggttacagaacacaaacatttgcatgtcaagtgtcacaaagaacacgcttcattatttctgttccatgatacaaagtgccacagcagttgctcgtctccaagcactgtcctaggatccctgagctgcagctgctgcagcagcttgcttggcttcaagggacttctcataatcctcgatggacttgaacagctgcgagaagtttcccttgccgaacccgccgcagccacccttttggtattcttgccccttctcatccttctccatgcacccgatcctttggatgatttccaagaacagcgttggcctgaatgacgcagctggtccagttagattttggattgcataggggtcaaggaaaccatggcattgacactagaatgctgagctatgatcttcagaattaaagtgcaggggattaatgatgagaatggaatgttgaccatcatgtaatcagctgggacatgggagctcgaattatgattcacagcatgcaaaaaggatcctcttttttgctgtcacggtcttcataaagatgcatcatgcatggaggcacaaaaagagggtttgataccttcgtactgtatatatattctatatatgcctgcaatcctgaactagctgaataccttatcctggaattgttcctttgcaattctagatgcatcatgcacacttgtaaaacaaaaaaggtgaaaaagataacgattttacctgtcccccactggcttggtgaagatttggagcagcacgccctggtcatccctgtccaccagcacccctagctcctggcactccttaatctgtg

SEQ ID NO: 54077 - DNA, 1616 bp, Zea Mays
gtggttcgtttagctccgtctccgtggagagcctctctcgcggataaccggtaggcactgccaaggggacggcggcgcctggtgccgtcggccagcgcggctgcgcggtgcgcgcgtctcgccgactcgatgtgccgttgcgtgttcgttcgtttcttggactacagtttcttactttctttggagaaaagtccgctgtttagaaattaagcttcggatctgaaataagcttctagattgtggaatgacgcgtcttttctgactagtagctcgcatataattctttctttacgaaaaggactccaggtggttacttgggatctacgtgctccaagaaatgagcaatagccagtaggaatccgtaagctgcgagaccaatcttcatatttactctgaaacagtatggacagtggtaaacttttttctcacgagctgcagtcataattcgagagtaacaagcagcggatgtcgtaatggttagattggatggatggatgctactagtgtagaaaccacttgatgatggttacctgcctacagtcaacccattcaacctcaaatgttccttgtgaggtatcatgacagaacagcaggaaggtgttagcaagagctcttcctcaagtattagcagcagcactcaggagagtgaggaggaactgaccatcggtacccttataaccgaagcaacaaacacaacaaacagtgccaagagtcttggaaagcgcctttcacacttagattcgatcccgcacactccacgtgttaatgggaaaattccagattttaataatgcgacaattgatcatgaatcattattagaaaggcacttatggcttagctgaatatcaaatagaaggagatgggaattgccagacttaataggtcgtcgggagggggagtactattgcttcaatccatcttctacttagttggtagtaatttactatatcttcttcttgctaagagcaaatctgattacgatatttaggttcattgacgaggtggctttgttgtcttttacgctttctccatgttgtgctttctcttgttgcagtttcgagctctggcagaccagatattccgcaatcctgactatcacaaacatgtgaggaaggcggtagtgaagcagctgaaggagttcaggaaacactatgaaggttatgtgccaatggaatataaggtttacttgaagaaaatgaaaaggtctggggaatggggtgatcatgtgaccttacaggcagctgcagacaggagctttggctaagtttctggtgtgaagtacactacaattcattgtatgcagttgaagatcttccaacacggaaaactaagaagaagcattggctgttctagctcgccaggctttggtgatttcttggtatgctattggtcttctctttgtagtccagcagcatctgtaagcctgcttagttatgcctttgtttgttgtaagttgtaacttgacctggaatcaaattcatttaagatcatgcaaaatacagtgagctcttgcttcgtccttggctgaaatatttccagcacatagtaaacatgttttcagggacctattttttattttttttggggggggggggggggggtattttgcttcgtag

SEQ ID NO: 54078 - DNA, 1599 bp, Zea Mays
tctgtttcctgttgcgtgttggatgcgtctctttccttccttagtgctccccctttcgctggtgaacgcttattgtggttcgtttagctccgtctccgtggagagcctctctcgcggataaccggtaggcactgccaaggggacggcggcgcctggtgccgtcggccagcgcggctgcgcggtgcgcgcgtctcgccgactcgatgtgccgttgcgtgttcgttcgtttcttggactacagtttcttactttctttggagaaaagtccgctgtttagaaattaagcttcggatctgaaataagcttctagattgtggaatgacgcgtcttttctgactagtagctcgcatataattctttctttacgaaaaggactccaggtggttacttgggatctacgtgctccaagaaatgagcaatagccagtaggaatccgtaagctgcgagaccaatcttcatatttactctgaaacagtatggacagtggtaaacttttttctcacgagctgcagtcataattcgagagtaacaagcagcggatgtcgtaatggttagattggatggatggatgctactagtgtagaaaccacttgatgatggttacctgcctacagtcaacccattcaacctcaaatgttccttgtgaggtatcatgacagaacagcaggaaggtgttagcaagagctcttcctcaagtattagcagcagcactcaggagagtgaggaggaactgaccatcggtacccttataaccgaagcaacaaacacaacaaacagtgccaagagtcttggaaagcgcctttcacacttagattcgatcccgcacactccacgtgttaatgggaaaattccagattttaataatgcgacaattgatcatgaatcattattagaaagattaggcacttatggcttagctgaatatcaaatagaaggagatgggaattgccagtttcgagctctggcagaccagatattccgcaatcctgactatcacaaacatgtgaggaaggcggtagtgaagcagctgaaggagttcaggaaacactatgaaggttatgtgccaatggaatataaggtttacttgaagaaaatgaaaaggtctggggaatggggtgatcatgtgaccttacaggcagctgcagacaggtttgctgctaaaatatgtctgttgacatcgtttagagacacatgcctagttgagatagtccccagagatgccactccaacaagagagctttggctaagtttctggtgtgaagtacactacaattcattgtatgcagttgaagatcttccaacacggaaaactaagaagaagcattggctgttctagctcgccaggctttggtgatttcttggtatgctattggtcttctctttgtagtccagcagcatctgtaagcctgcttagttatgcctttgtttgttgtaagttgtaacttgacctggaatcaaattcatttaagatcatgcaaaatacagtgagctcttgcttcgtccttggctgaaatatttccagcacatagtaaacatgttttcagggacctattttttattttttttggggggggggggggggggtattttgcttcgtag

SEQ ID NO: 54079 - DNA, 1061 bp, Zea Mays
atcccaaggtcatttcggttaatctccacacgcatcgcggacacggagacttgccttccttttggtgcggaaaaagaaagagaggagaagcgaaggaggttctcagttggagcggctccctctccccgcgcgcgccaccgcctccgatccgagcagccgcctacagtcaacccattcaacctcaaatgttccttgtgaggtatcatgacagaacagcaggaaggtgttagcaagagctcttcctcaagtattagcagcagcactcaggagagtgaggaggaactgaccatcggtacccttataaccgaagcaacaaacacaacaaacagtgccaagagtcttggaaagcgcctttcacacttagattcgatcccgcacactccacgtgttaatgggaaaattccagattttaataatgcgacaattgatcatgaatcattattagaaaggcacttatggcttagctgaatatcaaatagaaggagatgggaattgccagtttcgagctctggcagaccagatattccgcaatcctgactatcacaaacatgtgaggaaggcggtagtgaagcagctgaaggagttcaggaaacactatgaaggttatgtgccaatggaatataaggtttacttgaagaaaatgaaaaggtctggggaatggggtgatcatgtgaccttacaggcagctgcagacaggagctttggctaagtttctggtgtgaagtacactacaattcattgtatgcagttgaagatcttccaacacggaaaactaagaagaagcattggctgttctagctcgccaggctttggtgatttcttggtatgctattggtcttctctttgtagtccagcagcatctgtaagcctgcttagttatgcctttgtttgttgtaagttgtaacttgacctggaatcaaattcatttaagatcatgcaaaatacagtgagctcttgcttcgtccttggctgaaatatttccagcacatagtaaacatgttttcagggacctattttttattttttttggggggggggggggggggtattttgcttcgtag

SEQ ID NO: 54080 - DNA, 1430 bp, Zea Mays
atcccaaggtcatttcggttaatctccacacgcatcgcggacacggagacttgccttccttttggtgcggaaaaagaaagagaggagaagcgaaggaggttctcagttggagcggctccctctccccgcgcgcgccaccgcctccgatccgagcagccgcctacagtcaacccattcaacctcaaatgttccttgtgaggtatcatgacagaacagcaggaaggtgttagcaagagctcttcctcaagtattagcagcagcactcaggagagtgaggaggaactgaccatcggtacccttataaccgaagcaacaaacacaacaaacagtgccaagagtcttggaaagcgcctttcacacttagattcgatcccgcacactccacgtgttaatgggaaaattccagattttaataatgcgacaattgatcatgaatcattattagaaagattaggcacttatggcttagctgaatatcaaatagaaggagatgggaattgccagacttaataggtcgtcgggagggggagtactattgcttcaatccatcttctacttagttggtagtaatttactatatcttcttcttgctaagagcaaatctgattacgatatttaggttcattgacgaggtggctttgttgtcttttacgctttctccatgttgtgctttctcttgttgcagtttcgagctctggcagaccagatattccgcaatcctgactatcacaaacatgtgaggaaggcggtagtgaagcagctgaaggagttcaggaaacactatgaaggttatgtgccaatggaatataaggtttacttgaagaaaatgaaaaggtctggggaatggggtgatcatgtgaccttacaggcagctgcagacaggtttgctgctaaaatatgtctgttgacatcgtttagagacacatgcctagttgagatagtccccagagatgccactccaacaagagagttttgttaagtttctggaatccacatgcacaatacaaggtcagtaaattttagtgtaagatttggtgcctcattatttgcttgtacctttttgcagagctttggctaagtttctggtgtgaagtacactacaattcattgtatgcagttgaagatcttccaacacggaaaactaagaagaagcattggctgttctagctcgccaggctttggtgatttcttggtatgctattggtcttctctttgtagtccagcagcatctgtaagcctgcttagttatgcctttgtttgttgtaagttgtaacttgacctggaatcaaattcatttaagatcatgcaaaatacagtgagctcttgcttcgtccttggctgaaatatttccagcacatagtaaacatgttttcagggacctattttttattttttttggggggggggggggggggtattttgcttcgtag

SEQ ID NO: 54081 - DNA, 1247 bp, Zea Mays
atcccaaggtcatttcggttaatctccacacgcatcgcggacacggagacttgccttccttttggtgcggaaaaagaaagagaggagaagcgaaggaggttctcagttggagcggctccctctccccgcgcgcgccaccgcctccgatccgagcagccgcctacagtcaacccattcaacctcaaatgttccttgtgaggtatcatgacagaacagcaggaaggtgttagcaagagctcttcctcaagtattagcagcagcactcaggagagtgaggaggaactgaccatcggtacccttataaccgaagcaacaaacacaacaaacagtgccaagagtcttggaaagcgcctttcacacttagattcgatcccgcacactccacgtgttaatgggaaaattccagattttaataatgcgacaattgatcatgaatcattattagaaagattaggcacttatggcttagctgaatatcaaatagaaggagatgggaattgccagacttaataggtcgtcgggagggggagtactattgcttcaatccatcttctacttagttggtagtaatttactatatcttcttcttgctaagagcaaatctgattacgatatttaggttcattgacgaggtggctttgttgtcttttacgctttctccatgttgtgctttctcttgttgcagtttcgagctctggcagaccagatattccgcaatcctgactatcacaaacatgtgaggaaggcggtagtgaagcagctgaaggagttcaggaaacactatgaaggttatgtgccaatggaatataaggtttacttgaagaaaatgaaaaggtctggggaatggggtgatcatgtgaccttacaggcagctgcagacaggagctttggctaagtttctggtgtgaagtacactacaattcattgtatgcagttgaagatcttccaacacggaaaactaagaagaagcattggctgttctagctcgccaggctttggtgatttcttggtatgctattggtcttctctttgtagtccagcagcatctgtaagcctgcttagttatgcctttgtttgttgtaagttgtaacttgacctggaatcaaattcatttaagatcatgcaaaatacagtgagctcttgcttcgtccttggctgaaatatttccagcacatagtaaacatgttttcagggacctattttttattttttttggggggggggggggggggtattttgcttcgtag

SEQ ID NO: 54082 - DNA, 715 bp, Zea Mays
ctgactctcctaatttccttcccgtttttcttcctgtggtcgctcgttgagtgcggaaattccacgaacgtgagctcaacatggagccggcgacccctccggcacccgccgccggcgtcacggctaccgtcgacctctcctcagtcgcagccgacctcggtggggcgcacctcctgccctgcggcatcaggcagaacggcggcgcccccgtatccgactacttcaagcctagggacacaggttatgtattggagaagagtcgcggacagaattcagatgctgaagtcagcaattttacatcccgagctgaattccagagcataacctactggaatcacgatacagcgccatcagcagaggattccctcccgaggtgcttccattggcttaccgtcgctaatgcgatgcatagagcagtgactgctgaagacctgactaacatggcagcaatgcagaatcaggacaagtagattcgttctataacgaagccatgcaatttcgatttggtgaaccatctcgacaaaggatcttgtaacaaccaacatgttatttgaacgcatccagtaggtaatgtttaggctttggggtaagatgcttcaggagatccttgttcagtagcatctgaaaatgtctgggtaatttagattgggacctgtatcagactatcagttatctccaatattgtgaaagagtgccggtgttgcctttgtgttca

SEQ ID NO: 54083 - DNA, 2510 bp, Zea Mays
gatctacacatccagctcttcttcggtcagcagccagcagtgcactggcgatggcaagtagtccagcttctgttaatgactattgtgatccgaagactgatccagcaaggaaggcaaagaacacacgtgatcctggttggaaatatgggtactggacagacgatcctggttggaaatatgggtactggacagacttgatgttgtgacctgcactctttgtaggatcataagactgaagcaagaccttgctggtggatatgaagatgcaaaaatgtgtgccaaaacaactactgcaatcaggaaggaaatgagagcatacttggaaatgcacaagaggagaagacccttgagctttgaagatgatgatggtgatgtggatgtgctggaggtggtaccacaggaggggaacaacgttgatgtggtggaggagataacacaggacaggaacaagagcaatgcagctgtggcagagtcccaagcctaaggcagctagcaatgggaagtctattgtccaaaatcagggactgcagccaaaagaagacaatcagcaatgcaattcaagcccaagcctaaggcagctagcaatgggaagtctattgtctagttgcttagaagaactcctgaagaagtggttgagcaaagacactcggggaaggctcaaaaatacaattgaggccagctgcaagaccaaggaggagaagcactatgtagatatgcagtgtgccttatggttttatgaggctggcataccttttaatgtagcaacatcaagacagattgagattgcacttgaggccactgcacagtatgtctaggatacattccacctacatcatatcagcttggggagccattgctagaggctgttgtaaagatgacgagcaatgtgagaaaggaccatgagcgagcatggaaacattttggctatacactcatgtcagatgggtgtgccgataggaggggacaccatttgatcaatttcctagtgaacagccctgaagggacatatttcttggagtatgttgatgcatccgatgaagtgcacaatgatgaaatacttgcagatttattagaaaaaagaattgaagagattggaaaggacaacgttgttcaagttatcaccaataacggtgccaactacaaggcagcaattaggcttctaatggagagggttccaacactattttggagtccatgtgcagcacattgcttagaccttatgttggaagatataggaaacttaaaggactttaagaagcctattgcacgtgccaagcgtgtgacaactgaacattcatatataggcatggcagaattcttaatacaatgagggagaaaacaggtggtagagatcttgtgagggctgcagccacttggtttgcaacatcattccttactttcaagagtccgtacaagcacaaggatgctttgaaggctttaattgttagtgaagtatgggttggaaacaagttggcaagaaccaaagccagagcggatgtccatgacattgtcctatcaacccaattctggaattcaattgaagattgcctatgagcttgagctccacatcttatcatgcttagggtagtcgatggtgatgagaggccagcaatgccaaaatttcaagcactaatgagtcatgcaaaggagaccatcaataaggcctttgatatccaaagcaagaaatctttgcttaagaggatcatggacattgttgagagacaatggctgaagcaaatggaccatcctttgtatggtgctgtgttgtacttgaactcaggaaaatcgcactctctcattaaagaagatgatgattctgctgttggacaattaatggggctggttccttaatgtgcttgcaaaaatggtggaagatgatgaaactagaaacaagattgatgctcaagcaagggactatgaactttttagaggcactgccttatcaaataaaatacccatacaaaatcttgattcggtcagcccaagtgtccatggctcatgccatatttcagttctacatcgatcgctggggttcttatggtggacgtgctattgaattacaaaggtttgctaggcgtgttgttagtctttgtgcttcatcatctagttatgaaagaaaatggaacacattcggatttattcataagaaaagaaataggctgctccacaagagactgaattatattgtgtctgtgtcatataatcagaagatgaagagcagatttcatttagacgtgagaaaaggggggaaacattgaccctttggtcatttcagagtttgattgggacaatgagtgggcagactcattgcatgtgccctctcaaggtgttcatgggtcagatctaacatgggagcttgttgatgaagctatgggtgcagctaaagcactactaggccgcaattttccaaggagagctcatatgaatagcaagcatgcaaggagttctacacaaacagtggacgaggatgacttcggttctacaaatgaagaagatcaagacccattgac

SEQ ID NO: 54084 - DNA, 2607 bp, Zea Mays
cgaatttgcagtcaagcatctgaatgcatctcttacatcttctcgtgggtggttacatgtcaatattgtgccttcagttttgtcaaactgtcagaagaaatccaaacagccatgacatttgcacatccagccgtactctgtgatctacacatccagctcttcttcggtcagcagccagcagtgcactggcgatggcaagtagtccagcttctgttaatgactattgtgatccgaagactgatccagcaaggaaggcaaagaacacacgtgatcctggttggaaatatgggtactggacagacgatcctggttggaaatatgggtactggacagacttgatgttgtgacctgcactctttgtaggatcataagactgaagcaagaccttgctggtggatatgaagatgcaaaaatgtgtgccaaaacaactactgcaatcaggaaggaaatgagagcatacttggaaatgcacaagaggagaagacccttgagctttgaagatgatgatggtgatgtggatgtgctggaggtggtaccacaggaggggaacaacgttgatgtggtggaggagataacacaggacaggaacaagagcaatgcagctgtggcagagtcccaagcctaaggcagctagcaatgggaagtctattgtccaaaatcagggactgcagccaaaagaagacaatcagcaatgcaattcaagcccaagcctaaggcagctagcaatgggaagtctattgtctagttgcttagaagaactcctgaagaagtggttgagcaaagacactcggggaaggctcaaaaatacaattgaggccagctgcaagaccaaggaggagaagcactatgtagatatgcagtgtgccttatggttttatgaggctggcataccttttaatgtagcaacatcaagacagattgagattgcacttgaggccactgcacagtatgtctaggatacattccacctacatcatatcagcttggggagccattgctagaggctgttgtaaagatgacgagcaatgtgagaaaggaccatgagcgagcatggaaacattttggctatacactcatgtcagatgggtgtgccgataggaggggacaccatttgatcaatttcctagtgaacagccctgaagggacatatttcttggagtatgttgatgcatccgatgaagtgcacaatgatgaaatacttgcagatttattagaaaaaagaattgaagagattggaaaggacaacgttgttcaagttatcaccaataacggtgccaactacaaggcagcaattaggcttctaatggagagggttccaacactattttggagtccatgtgcagcacattgcttagaccttatgttggaagatataggaaacttaaaggactttaagaagcctattgcacgtgccaagcgtgtgacaactgaacattcatatataggcatggcagaattcttaatacaatgagggagaaaacaggtggtagagatcttgtgagggctgcagccacttggtttgcaacatcattccttactttcaagagtccgtacaagcacaaggatgctttgaaggctttaattgttagtgaagtatgggttggaaacaagttggcaagaaccaaagccagagcggatgtccatgacattgtcctatcaacccaattctggaattcaattgaagattgcctatgagcttgagctccacatcttatcatgcttagggtagtcgatggtgatgagaggccagcaatgccaaaatttcaagcactaatgagtcatgcaaaggagaccatcaataaggcctttgatatccaaagcaagaaatctttgcttaagaggatcatggacattgttgagagacaatggctgaagcaaatggaccatcctttgtatggtgctgtgttgtacttgaactcaggaaaatcgcactctctcattaaagaagatgatgattctgctgttggacaattaatggggctggttccttaatgtgcttgcaaaaatggtggaagatgatgaaactagaaacaagattgatgctcaagcaagggactatgaactttttagaggcactgccttatcaaataaaatacccatacaaaatcttgattcgtcgatcgctggggttcttatggtggacgtgctattgaattacaaaggtttgctaggcgtgttgttagtctttgtgcttcatcatctagttatgaaagaaaatggaacacattcggatttattcataagaaaagaaataggctgctccacaagagactgaattatattgtgtctgtgtcatataatcagaagatgaagagcagatttcatttagacgtgagaaaaggggggaaacattgaccctttggtcatttcagagtttgattgggacaatgagtgggcagactcattgcatgtgccctctcaaggtgttcatgggtcagatctaacatgggagcttgttgatgaagctatgggtgcagctaaagcactactaggccgcaattttccaaggagagctcatatgaatagcaagcatgcaaggagttctacacaaacagtggacgaggatgacttcggttctacaaatgaagaagatcaagacccattgac

SEQ ID NO: 54085 - DNA, 2851 bp, Zea Mays
atggagccggcgacccctccggcacccgccgccggcgtcactgctaccatcgacctctccctagtcgcagccgacctcggtggggcgcacctcctgccctgcggcatcaggcagaacggcggcgcccccgtatccgactacttcaagcctagggccacaggtccggatggctaccgaggttttgtattggagaagaggcacggacataattcaaatgctgaagtcaacaattttacatcccaagctgaattccagagcataacctactggaatcacgatacaacgtcatcaacagaggattccctcccgagttttgtcaaactgtcagaagaaatccaaacagccatgacatttgcacatccagccgtactctgtgatctacacatccagctcttcttcggtcagcagccagcagtgcactggcgatggcaagtagtccagcttctgttaatgactattgtgatccgaagactgatccagcaaggaaggcaaagaacacacgtgatcctggttggaaatatgggtactggacagacgatcctggttggaaatatgggtactggacagacttgatgttgtgacctgcactctttgtaggatcataagactgaagcaagaccttgctggtggatatgaagatgcaaaaatgtgtgccaaaacaactactgcaatcaggaaggaaatgagagcatacttggaaatgcacaagaggagaagacccttgagctttgaagatgatgatggtgatgtggatgtgctggaggtggtaccacaggaggggaacaacgttgatgtggtggaggagataacacaggacaggaacaagagcaatgcagctgtggcagagtcccaagcctaaggcagctagcaatgggaagtctattgtccaaaatcagggactgcagccaaaagaagacaatcagcaatgcaattcaagcccaagcctaaggcagctagcaatgggaagtctattgtctagttgcttagaagaactcctgaagaagtggttgagcaaagacactcggggaaggctcaaaaatacaattgaggccagctgcaagaccaaggaggagaagcactatgtagatatgcagtgtgccttatggttttatgaggctggcataccttttaatgtagcaacatcaagacagattgagattgcacttgaggccactgcacagtatgtctaggatacattccacctacatcatatcagcttggggagccattgctagaggctgttgtaaagatgacgagcaatgtgagaaaggaccatgagcgagcatggaaacattttggctatacactcatgtcagatgggtgtgccgataggaggggacaccatttgatcaatttcctagtgaacagccctgaagggacatatttcttggagtatgttgatgcatccgatgaagtgcacaatgatgaaatacttgcagatttattagaaaaaagaattgaagagattggaaaggacaacgttgttcaagttatcaccaataacggtgccaactacaaggcagcaattaggcttctaatggagagggttccaacactattttggagtccatgtgcagcacattgcttagaccttatgttggaagatataggaaacttaaaggactttaagaagcctattgcacgtgccaagcgtgtgacaactgaacattcatatataggcatggcagaattcttaatacaatgagggagaaaacaggtggtagagatcttgtgagggctgcagccacttggtttgcaacatcattccttactttcaagagtccgtacaagcacaaggatgctttgaaggctttaattgttagtgaagtatgggttggaaacaagttggcaagaaccaaagccagagcggatgtccatgacattgtcctatcaacccaattctggaattcaattgaagattgcctatgagcttgagctccacatcttatcatgcttagggtagtcgatggtgatgagaggccagcaatgccaaaatttcaagcactaatgagtcatgcaaaggagaccatcaataaggcctttgatatccaaagcaagaaatctttgcttaagaggatcatggacattgttgagagacaatggctgaagcaaatggaccatcctttgtatggtgctgtgttgtacttgaactcaggaaaatcgcactctctcattaaagaagatgatgattctgctgttggacaattaatggggctggttccttaatgtgcttgcaaaaatggtggaagatgatgaaactagaaacaagattgatgctcaagcaagggactatgaactttttagaggcactgccttatcaaataaaatacccatacaaaatcttgattcggtcagcccaatcgatcgctggggttcttatggtggacgtgctattgaattacaaaggtttgctaggcgtgttgttagtctttgtgcttcatcatctagttatgaaagaaaatggaacacattcggatttattcataagaaaagaaataggctgctccacaagagactgaattatattgtgtctgtgtcatataatcagaagatgaagagcagatttcatttagacgtgagaaaaggggggaaacattgaccctttggtcatttcagagtttgattgggacaatgagtgggcagactcattgcatgtgccctctcaaggtgttcatgggtcagatctaacatgggagcttgttgatgaagctatgggtgcagctaaagcactactaggccgcaattttccaaggagagctcatatgaatagcaagcatgcaaggagttctacacaaacagtggacgaggatgacttcggttctacaaatgaagaagatcaagacccattgac

SEQ ID NO: 54086 - DNA, 833 bp, Zea Mays
cttgggcccaacacgaggctcccggactcctcagttccttcgctcctctgtaacccggggcggccgacgaggccgggaccaccgacggcgacgatgggcggcggcgagggcaagtccaagaaacgccgctcttctacctcctcagggggggaacggaagaggcgggacaagaaggagagcaagaggaggagccgagacgacagggaggatgacgatgacagacacaagaagaaggggaaacacatcgacaggaacaaaggaaaagagagagattcgaaggataggcattccaaggagaagacgagcaagagaaaagacaaggacgctgccttcaaagaaatatccaaggatgactactttgcaaagaacaacgagttcgctacctggttgaaggaggaaaagggcaaatatttctcagatttgtcttcagagtctgctcgtgatcttttcttgaagtttgtgaaacaatggaacaaaggcaagctgccatcacaatactatgaggggattacgagtggcccacgatcagcgcacaattggaacatcaaagcatgatacgttttctggttaatcgggtccttcggcttgagatgttttttgctttcctggcgagatttttctaatagttgcatctagcaactgcttttaatattctgggttgttgtatttaagctgatgttcagaatgtctgtctaagcaggagggtagatcgtgggtctctctagtatccagtgtttaacatcaacgctacttttccattgatcactactgtttgatcctacaatgagcaaacatattgtttctaaggaaagttgtgttctttttatcggatg

SEQ ID NO: 54087 - DNA, 535 bp, Zea Mays
agaaaagttaagcgttggaacactcaagtctagtagtatataacatttctctaaaaaaaactggcatgcgtgagcggcctcacagttaaaagataaagtgttaccgctgacgagaagtaacagtggctaggcaggccggccacacacacgccagcagtccagcacttggccactacttactctccttctatatatgtctctccttctgcccctcctgactttgcctttcaagcaagcgcctcacaaggaaaagatctcctagcagctagccagctacagcctacagcaagagatcggcgcgttgattgcttggatcgaccgaccggccggggtggtcgccatgggacgcgggaagatcgagatcaagcggatcgagaactcgacgaaccggcaggtcaccttctccaagcgccggggcgggctgctcaagaaggccaacgagctcgccgtgctgtgcgacgcgcgcgtcggcgtcgtcatcttctccagcaccagcaagatgttcgagtactgcagccctgcctgcaggttggtt

SEQ ID NO: 54088 - DNA, 629 bp, Zea Mays
agaaaagttaagcgttggaacactcaagtctagtagtatataacatttctctaaaaaaaactggcatgcgtgagcggcctcacagttaaaagataaagtgttaccgctgacgagaagtaacagtggctaggcaggccggccacacacacgccagcagtccagcacttggccactacttactctccttctatatatgtctctccttctgcccctcctgactttgcctttcaagcaagcgcctcacaaggtatgcacacatagcttagccctctctctctctctctctctagctacctccatcatctccatctctactcctctgattatttcaagaaaaaaaggaaaagatctcctagcagctagccagctacagcctacagcaagagatcggcgcgttgattgcttggatcgaccgaccggccggggtggtcgccatgggacgcgggaagatcgagatcaagcggatcgagaactcgacgaaccggcaggtcaccttctccaagcgccggggcgggctgctcaagaaggccaacgagctcgccgtgctgtgcgacgcgcgcgtcggcgtcgtcatcttctccagcaccagcaagatgttcgagtactgcagccctgcctgcaggttggtt

SEQ ID NO: 54089 - DNA, 1255 bp, Zea Mays
gaacacggccttatcttagagtatgaaactgcggttgtaaacatgtttagcgccaactgctatgtacgtgatcaggtgcggcgctacgtgtaccatgacgtcgtccgcctcggcgacctagagaagctcatcgactgctcctgtgtccagacctacacaatcaacagtgccaaggtgatcttcctgaagccgaggccgcagtccaggcctttcaagggctccggcaacatctgcctcacgtgcgacaggatcctccaggagcccttccacttctgctccctctcatgcaaggttgcattggtggaccacgtgatgacgcagggaggggacctgtccaacatcctgcagcactacggcgccggcggtggcggtggcggtggcacggcggacccggaccgcctcgcgttcccgaggttcgagaacctccgcgtcgtcgacggctcggacctcgacgacgacgtccaggtcgtcaccccagactccaccctcgaggacccgaccaacaacgcgggcggcgggtccagcgacaacggtactgacgacgccagacggcaggtcgtcgtccatggcggcggcgaggcggccaagcggaagaaagggggcggcttcttgccccagatcgtgctgtcactcggcggcggcggcggcggcggcaacaggaggaagggtgccccccacaggtcccctctggcctaagcagcgctaccttcatgcatgcgtccccctgctgctgctcgttatatatcacaagtcacaacacacgtagcgcgctgtggttgcatgcagtgatgatggtgtgggtggtagctacagtattaattagtagtagcgtgttataatagtatcttaatggtgattagcctcgtagagagacgacgacaagctggtagctggtcgatcggttttgcttgggggggaaggtcttggtggccttgtgatccgtctagcagctcgctaggaccaaccatggccgccgcgccatctcatgagactttagagagagagagagagagagagggtcatgggggaggtagaggggggagagacggttgtaaaagcagttcccattgttacaggcaccaggtagtaactggtcagtggggcccacttctgcaggcggtggggcccatacgatcgaggtggctaccaattttgtatttgatgtaccaagggttactcgcggtctcgcgcatacaatttccacacctatatatgttatatataaatgataatatatctgaattctgtcccagac

SEQ ID NO: 54090 - DNA, 1156 bp, Zea Mays
gaacacggccttatcttagagtatgaaactgcggttgtaaacatgtttagcgccaactgctatgtacgtgatcaggtgcggcgctacgtgtaccatgacgtcgtccgcctcggcgacctagagaagctcatcgactgctcctgtgtccagacctacacaatcaacagtgccaaggtgatcttcctgaagccgaggccgcagtccaggcctttcaagggctccggcaacatctgcctcacgtgcgacaggatcctccaggagcccttccacttctgctccctctcatgcaaggtggaccacgtgatgacgcagggaggggacctgtccaacatcctgcagcactacggcgccggcggtggcggtggcggtggcacggcggacccggaccgcctcgcgttcccgaggttcgagaacctccgcgtcgtcgacggctcggacctcgacgacgacgtccaggtcgtcgtccatggcggcggcgaggcggccaagcggaagaaagggggcggcttcttgccccagatcgtgctgtcactcggcggcggcggcggcggcggcaacaggaggaagggtgccccccacaggtcccctctggcctaagcagcgctaccttcatgcatgcgtccccctgctgctgctcgttatatatcacaagtcacaacacacgtagcgcgctgtggttgcatgcagtgatgatggtgtgggtggtagctacagtattaattagtagtagcgtgttataatagtatcttaatggtgattagcctcgtagagagacgacgacaagctggtagctggtcgatcggttttgcttgggggggaaggtcttggtggccttgtgatccgtctagcagctcgctaggaccaaccatggccgccgcgccatctcatgagactttagagagagagagagagagagagggtcatgggggaggtagaggggggagagacggttgtaaaagcagttcccattgttacaggcaccaggtagtaactggtcagtggggcccacttctgcaggcggtggggcccatacgatcgaggtggctaccaattttgtatttgatgtaccaagggttactcgcggtctcgcgcatacaatttccacacctatatatgttatatataaatgataatatatctgaattctgtcccagac

SEQ ID NO: 54091 - DNA, 2712 bp, Zea Mays
tcctcgcaggcaggcagaggcagtacaggttgttgcaaaacttgcacgtacttgattcctcgcgcgcgcagcgccttgtcgccttgcgaggtttgttttggttgggtcatgagctcatccatccattcccttttccacccatgcatgcatgcatgcatgccactcccttgattagggtttataagccagcaggaggcgctgattgagtcctaatctgcgccactgtaacagcaatcccaaccatgattttcgcacccgctccaggactccggagcagtgctacttcttcatcgctataattaatataattcgtctgctccttcctgcctgaccggggtattaaatcctgtgtatgtacgtagtactaacaaacaaggacaaggcagtaaaaattctcgttacggaacattatctactccgacctcccttgcattttttttttggaattagtacccgggcgttcatcgcgacctgcatgcaactgtttcctcaacgagctagccattacatgcttttagtttttttataaaatatatatgcatgcatggcaaaactttttcctttttaaattttcgggagttaaagaggaggagggtcgaaaattcaaatccccccacccggggcatgcaaacccttcttctttctctccgtagctttgtcttgtagctgcagccatgcatttcccccctactttcatgcagcagcaactaatccatccggatatgctggcgctgcgggagccggagtctcgaacccaaatggcaaaaaaagctgcggggggaggttttaccgctgcctcttcattggaattccaatccttgggattaggatcctctgcggtaatcgccagcctcctgctgcgcttccgcttgcttccccgtccattaataggcctggttatccaaactgttttgccaagtatagcaacatttccctgccccccgtcctgccgactgaaccccgccactgataaaggaaaaaaaatcggttcgggcctttgaattagattttaccgtatgcgcccgcgcgcggtaactgcgcggcctgtctttttttaccaaacagaggcatcgacgacgacactgttgtcccccgacgacgaccccatctctccctggtgcgtgctacacgaccaaacttctctctccttaccttagggtggggtggttttgggggtctcccaggccatgataaagatcaccactggagtggtactgctgcccggccggtcaaagcatgggggccatcgcgtggtgtgtggcccaacccaaagttgtaccctgctgctgctgtaccgcctgcgttgttatcttaggccccgtttcaatctcacgggataaactttagcttcatgctaaactttagctatatgaattgaagtgctaaagtttagctttaattaccaccattagctctcatgtttagattataaatggctaaaagtagctagaaaaaagctgctaaagtttatctcgcgagattggaacacggccttatcttagagtatgaaactgcggttgtaaacatgtttagcgccaactgctatgtacgtgatcaggtgcggcgctacgtgtaccatgacgtcgtccgcctcggcgacctagagaagctcatcgactgctcctgtgtccagtgccaaggtgatcttcctgaagccgaggccgcagtccaggcctttcaagggctccggcaacatctgcctcacgtgcgacaggatcctccaggagcccttccacttctgctccctctcatgcaaggtggaccacgtgatgacgcagggaggggacctgtccaacatcctgcagcactacggcgccggcggtggcggtggcggtggcacggcggacccggaccgcctcgcgttcccgaggttcgagaacctccgcgtcgtcgacggctcggacctcgacgacgacgtccaggtcgtcaccccagactccaccctcgaggacccgaccaacaacgcgggcggcgggtccagcgacaacggtactgacgacgccagacggcaggtcgtcgtccatggcggcggcgaggcggccaagcggaagaaagggggcggcttcttgccccagatcgtgctgtcactcggcggcggcggcggcggcggcaacaggaggaagggtgccccccacaggtcccctctggcctaagcagcgctaccttcatgcatgcgtccccctgctgctgctcgttatatatcacaagtcacaacacacgtagcgcgctgtggttgcatgcagtgatgatggtgtgggtggtagctacagtattaattagtagtagcgtgttataatagtatcttaatggtgattagcctcgtagagagacgacgacaagctggtagctggtcgatcggttttgcttgggggggaaggtcttggtggccttgtgatccgtctagcagctcgctaggaccaaccatggccgccgcgccatctcatgagactttagagagagagagagagagagagggtcatgggggaggtagaggggggagagacggttgtaaaagcagttcccattgttacaggcaccaggtagtaactggtcagtggggcccacttctgcaggcggtggggcccatacgatcgaggtggctaccaattttgtatttgatgtaccaagggttactcgcggtctcgcgcatacaatttccacacctatatatgttatatataaatgataatatatctgaattctgtcccagac

SEQ ID NO: 54092 - DNA, 548 bp, Zea Mays
gtcaatccccgaacgaggcagatgcgcctcgatctggttgacccgcccgccgcccccatcgcccgtccaatcgaaccgctctgtggcggtggtgttctggtcagccggcgatggcgacgccgacgccgatgggggcggtgcgggtggagagggtgcgggggaggtcggcgctgacccgctgcttcgccaggtacccgctcaagctcatcgccccgtccagggtgggcccctcctcctgtgacgccgtctggctctacgccctcacctacggcggcggcatcgtctccgtgagtccgaggacccccccccccgcacacaaccctccacttcccattctctccgttctcgcccgctgcgccgttgctgggcactcgcggttcggagatgcttgctgtagcgtgacggtctcctgtcctggtgccgcgcttgctcctgcgcccgcccttgcagggggacaccgtgtcgtgcacggtcagcgtcggcgacggctgtacggcggcgatcaccacgcaggcctcgaccaaggtgtacaaggctgtgggtcaaaa

SEQ ID NO: 54093 - DNA, 396 bp, Zea Mays
gtcaatccccgaacgaggcagatgcgcctcgatctggttgacccgcccgccgcccccatcgcccgtccaatcgaaccgctctgtggcggtggtgttctggtcagccggcgatggcgacgccgacgccgatgggggcggtgcgggtggagagggtgcgggggaggtcggcgctgacccgctgcttcgccaggtacccgctcaagctcatcgccccgtccagggtgggcccctcctcctgtgacgccgtctggctctacgccctcacctacggcggcggcatcgtctccggggacaccgtgtcgtgcacggtcagcgtcggcgacggctgtacggcggcgatcaccacgcaggcctcgaccaagtacttttgtaggtgtacaaggctgtgggtcaaaa

SEQ ID NO: 54094 - DNA, 1475 bp, Zea Mays
gtcaatccccgaacgaggcagatgcgcctcgatctggttgacccgcccgccgcccccatcgcccgtccaatcgaaccgctctgtggcggtggtgttctggtcagccggcgatggcgacgccgacgccgatgggggcggtgcgggtggagagggtgcgggggaggtcggcgctgacccgctgcttcgccaggtacccgctcaagctcatcgccccgtccagggtgggcccctcctcctgtgacgccgtctggctctacgccctcacctacggcggcggcatcgtctccggggacaccgtgtcgtgcacggtcagcgtcggcgacggctgtacggcggcgatcaccacgcaggcctcgaccaaggtacgctgattgctcgattcaagcctggctctgcgcgtcctgcctatactatacttataccatggcttgttacgtttggtgttatgatgcttacccgtgtatgctgtatggtactgtatacaacattgaccagagaatgtctggattccaattaccagctctgtaggaatgtatgaattatgataaactggagcctatgagccttctacgtgcactgtttaggctggactagtagtttggtactcgtttcccctcaacaaataaaggcttgggctaaaaaaatcctacctaatggggaagtcgttggcgaagtcacaaggccctccacttttcattataaaaccgataaaccagaaaaagatggattgttttgcgaaagaatctttggacccataaaaagcggaatttgtgcttgtggaaactctcgagcgagcgtagctgaaaacgaagacgaaagattttgccaaaaatgcggggtagaatttgttgattctcggattgtgggaggcatccgtacctgggtaatttcttcgtctgctcatggtagaaactagtggttgtatgcggaacacaagggctggcaagttaattctccaaatctgggatctctgccaatggccgaacacaattcaaactgtgtgtgtgtgtgtgtgtgtggaggatatggggagggggtttttctttctactgtgaaccttttatagtcgaacaaagaattagctcgctgattactttctcttactaagattgcttagctctgctcttcgtcctagctttggggcactactccactgtttcctgcttcaagaaatcatccagctcagttattaccatgcctaggtttcatgcattgacaagttcatagaaagcgtcaactgaaaatgctgatttccttcattcatgtattttgtctactccatgtcaactgaaaagctagtttcactcaaatccgttgtatttttttttctggacggcaagtactcatgcaagcttaacaagtctgccgatgaaattgtcaattggaaaactagtttgcttcaaatctgctgactttgtttattccatttctgattggcaagtacttttgtaggtgtacaaggctgtgggtcaaaa

SEQ ID NO: 54095 - DNA, 1242 bp, Zea Mays
attatctctattttaggctttcatcaaggattccaagtttacgcagcaggagcttccagcttgcaagccgattcttactccaaaatgggttatttcagtatttgttcttgttggtgtgatttttgtcccgatcggtattgtttcgctgcgagcttcacatcaagttgtcgagatcgttgatcggtatgatgacgcatgcatccctgctaatgtcactgagaagcttgcttacatccagaatgatagtataccaaaaacctgcacaagaaatctgacgattacaaaggatatgaaacaaccgatttttgtatattatcagctggataacttttaccagaatcataggaggtatgtcaagagccgtaacgacgcacaactaagagataaaagtaaggcgagtgacactaccaattgtgatcccgaggccaaaacagtagatggaaagccaattgtgccttgcggtcttattgcatggagcctgttcaatgatacatataccctcatccacaacaataaaaccttgagagtggacaagaaagacatctcttggaagagtgacagagaccacaagtttgggagtgatgtcttccccacgaacttccagaaaggacctcttcaaggtggaaaaatacttaatccaaaaatcccgttgagtgaacaagaggaccttattgtttggatgcggactgcagcgcttccaacattcagaaagctgtatggtaggatacatgttgatctcaaggaaaacgatacaattacagttcagttggagaacaactacaacacctatagcttcagtggcaagaagaagctggtgctttctactgcaacctggattggtggaaagaacgattttctgggccttgcatatctcactgttggtggaatctgcttcgttttggcatttgcattcaccttgctatacttgataaaaccaaggaaaatgggagataacaactacttgtcatggaacagacccactttaggtcgctgatatggttttgaagttaaatgtttacacggacaacaaattcatttatggttcagatgtatcttgtaccacatcgaatttttattcatgagcattggtgtagaatacatacagagtaggcatgtgtatacgtgcgacaactttggatccatccttgcacagattgtacattaaactgaaacagatagctttatgttctccaaaattgtataatcagaagttaatgtcagtttcgatgctttgctcttctt

SEQ ID NO: 54096 - DNA, 1247 bp, Zea Mays
gatcgtcttcctgatattatctctattttaggctttcatcaaggattccaagtttacgcagcaggagcttccagcttgcaagccgattcttactccaaaatggtatttgttcttgttggtgtgatttttgtcccgatcggtattgtttcgctgcgagcttcacatcaagttgtcgagatcgttgatcggtatgatgacgcatgcatccctgctaatgtcactgagaagcttgcttacatccagaatgatagtataccaaaaacctgcacaagaaatctgacgattacaaaggatatgaaacaaccgatttttgtatattatcagctggataacttttaccagaatcataggaggtatgtcaagagccgtaacgacgcacaactaagagataaaagtaaggcgagtgacactaccaattgtgatcccgaggccaaaacagtagatggaaagccaattgtgccttgcggtcttattgcatggagcctgttcaatgatacatataccctcatccacaacaataaaaccttgagagtggacaagaaagacatctcttggaagagtgacagagaccacaagtttgggagtgatgtcttccccacgaacttccagaaaggacctcttcaaggtggaaaaatacttaatccaaaaatcccgttgagtgaacaagaggaccttattgtttggatgcggactgcagcgcttccaacattcagaaagctgtatggtaggatacatgttgatctcaaggaaaacgatacaattacagttcagttggagaacaactacaacacctatagcttcagtggcaagaagaagctggtgctttctactgcaacctggattggtggaaagaacgattttctgggccttgcatatctcactgttggtggaatctgcttcgttttggcatttgcattcaccttgctatacttgataaaaccaaggaaaatgggagataacaactacttgtcatggaacagacccactttaggtcgctgatatggttttgaagttaaatgtttacacggacaacaaattcatttatggttcagatgtatcttgtaccacatcgaatttttattcatgagcattggtgtagaatacatacagagtaggcatgtgtatacgtgcgacaactttggatccatccttgcacagattgtacattaaactgaaacagatagctttatgttctccaaaattgtataatcagaagttaatgtcagtttcgatgctttgctcttctt

SEQ ID NO: 54097 - DNA, 1744 bp, Zea Mays
atgtacgcacatacaggagagaaaaaaaaaagcaggacaattcgactcctccggtcctcccttgccttggtcagttggtcatctccgccggctcaacctcaacgcgggtagcacgaccaccaccagtccaccaccacgcccacctccccctctctcctcctcttctatagtcaaaccacccccctccttccacaaaccttcgcagaaggggcacaccggcaaggacgcagctttttcccgtctccttctgggttctacacttctacttctttccccacctcgccttcgttccgcccgccaccaaatcgcgaggcagcggagccagcgacgccgttcctttcgttgtgcttccttgggttcttgctgccggccgccggcgatttggcgaggtccgtttgggcggcaggtagaggtaggtagaggcgatcgtttcttggcggctggtggaatggatagccacgccgctgtgtcgagttccgtcggatccggggatggcgccgcgcagcccaggaggaactccaggaagcccaaattccaagtttacgcagcaggagcttccagcttgcaagccgattcttactccaaaatgggttatttcagtatttgttcttgttggtgtgatttttgtcccgatcggtattgtttcgctgcgagcttcacatcaagttgtcgagatcgttgatcggtatgatgacgcatgcatccctgctaatgtcactgagaagcttgcttacatccagaatgatagtataccaaaaacctgcacaagaaatctgacgattacaaaggatatgaaacaaccgatttttgtatattatcagctggataacttttaccagaatcataggaggtatgtcaagagccgtaacgacgcacaactaagagataaaagtaaggcgagtgacactaccaattgtgatcccgaggccaaaacagtagatggaaagccaattgtgccttgcggtcttattgcatggagcctgttcaatgatacatataccctcatccacaacaataaaaccttgagagtggacaagaaagacatctcttggaagagtgacagagaccacaagtttgggagtgatgtcttccccacgaacttccagaaaggacctcttcaaggtggaaaaatacttaatccaaaaatcccgttgagtgaacaagaggaccttattgtttggatgcggactgcagcgcttccaacattcagaaagctgtatggtaggatacatgttgatctcaaggaaaacgatacaattacagttcagttggagaacaactacaacacctatagcttcagtggcaagaagaagctggtgctttctactgcaacctggattggtggaaagaacgattttctgggccttgcatatctcactgttggtggaatctgcttcgttttggcatttgcattcaccttgctatacttgataaaaccaaggaaaatgggagataacaactacttgtcatggaacagacccactttaggtcgctgatatggttttgaagttaaatgtttacacggacaacaaattcatttatggttcagatgtatcttgtaccacatcgaatttttattcatgagcattggtgtagaatacatacagagtaggcatgtgtatacgtgcgacaactttggatccatccttgcacagattgtacattaaactgaaacagatagctttatgttctccaaaattgtataatcagaagttaatgtcagtttcgatgctttgctcttctt

SEQ ID NO: 54098 - DNA, 203 bp, Zea Mays
gttgagttacaatagacctgatggacttacatgtaatcggaggaagttgtagtaactatttactaatgaggtatagacacttgttgcccaaacggccgtttagtcggtttaaacgctatgtggtggtacattgtctccatttcatcagtcatttatcccatttacgtttaaacacctgtttcgcccatttaaatgactttagc

SEQ ID NO: 54099 - DNA, 2204 bp, Zea Mays
cagcgcaacaagagaagaagctagctaagctactacacgagctagctagcagcagtcgggcacgcagcatctatcaggcagcaggcagcaccacaagggcaagccctggtcctcgttctccgcgccccgcgcgaaccctattccttgttcttgaatctctcatccccaatcccacgccagtacacacgccacacacacaccctgcagctagctgcggctgagagaggagaggagagagaattaattcgggagatctctctagagagagagaaggagatagaggaggttcgtgtgcgaggcgcggggagaatagtagacagaatgttcccttccaagaaggccactagtagcgcagccgcagccgcagccgccgtgagctcaaatgatagcaggcagcaggcgatgtgcgtgcaggccgactcggggtcgggcctcgtcctcaccaccgaccccaagccccgcctccgctggaccgtcgagctccacgagcgcttcgtcgacgccgtcacgcagctcggtggccccgacaaggcgactcccaagaccatcatgagggtcatgggagtcaaggggcttaccctctaccacctcaagagccatcttcagaaattcaggttagggaagcagccgcacaaggagttcaacgagcactcggttaaggacgcaatggagatgcaacggaacgccgcctcttcttcaggcatgatgggaagaagcatgaacgaccgcagcgtgcacatgaacgaggctatcaggatgcaaatggaagtccagagaaggctacatgaacagctagaggtgcaaaggcatctccagatgaggatcgaagcccagggcaagtacatgcagtccatcctggagaaagcctaccagaccatcgccaccggcgacctggctgcgtgcagcccggtggctgcagggtacaaatccctgctaggtaacccgcaggcgatgctggacgtctgctcgctcaaggacatggccccgtccatgggcttcccttcgctgcaagacctgcacatgtacggcggcggcggcggccactgcctggacctgcagcagcagatggagcggccgatggaggccttcttcgccagctgcgacatcgggtcgctggccaagaagaggcccgtcagcccttacgccgacgacgacggcggcaagagcccgatgctgtggggcgaggacgacgagggcaagggcatcgtcgaccatttccagatggcgccgccgatgatggacgccgccggcatcgacgtcatggactccatcgccgacgtgtacggcgacgccaagcacatgaccatgtccagcgactccacggggagcaagggcggcggcttcgacgtcaggctcgagcggccatcgctgcggcggccgcacatgggcggcagcccgtcggtgctcggcggaggccagacgaggaacctgtcctacgggtaactagctcgtcgctctgatgatgattaaccatccgatccggcgtgcttaattaattaactcgcagtgaaactaaaattaattaaagcaggcgattattattaaccggtgcaaaacggctacaaataaataagtaaagctagcgctggagcaggcatgcataatataatggcggagatacatatatatatttatagcataagtgtcattaattcatgatcacgagattgatgatcttaccgtggcgcatcacttgctggatgatgctccaagataatctattttgagcgagaggagatgtatgttccatgtaattgtagtgctgttgatgggtgtaaatgcatgtgcaacttattaattggtaattttgcatgctgaggaaacaatctttctttggtctgaggcatcatatatatatatatatatatatatatttgcattgtatggagctagctagctgatgaggaacatgcatgctaataatggattaactgtctgataccttaagcttctttgtattattgtactgatgattagttctttttggtttatctgtacaatgtatttccatgtgacttttttcatgtaatgtaaatgacattctcacaacgtactatatatgtaaccttgacattcattaaccaagctcactcggcatatgtacatatacatgcattaagctagataaattgtacagttttgcttgtacaaattcatatcgctagggcattattatagctgcctttggctgcgtttggttggag

SEQ ID NO: 54100 - DNA, 2208 bp, Zea Mays
ctcagcgcaacaagagaagaagctagctaagctactacacgagctagctagcagcagtcgggcacgcagcatctatcaggcagcaggcagcaccacaagggcaagccctggtcctcgttctccgcgccccgcgcgaaccctattccttgttcttgaatctctcatccccaatcccacgccagtacacacgccacacacacaccctgcagctagctgcggctgagagaggagaggagagagaattaattcgggagatctctctagagagagagaaggagatagaggaggttcgtgtgcgaggcgcggggagaatagtagacagaatgttcccttccaagaaggccactagtagcgcagccgcagccgcagccgccgtgagctcaaatgatagcaggcagcaggcgatgtgcgtgcaggccgactcggggtcgggcctcgtcctcaccaccgaccccaagccccgcctccgctggaccgtcgagctccacgagcgcttcgtcgacgccgtcacgcagctcggtggccccgacaaggcgactcccaagaccatcatgagggtcatgggagtcaaggggcttaccctctaccacctcaagagccatcttcagaaattcaggttagggaagcagccgcacaaggagttcaacgagcactcggttaaggacgcggccgcagcaatggagatgcaacggaacgccgcctcttcttcaggcatgatgggaagaagcatgaacgaccgcagcgtgcacatgaacgaggctatcaggatgcaaatggaagtccagagaaggctacatgaacagtgcaaaggcatctccagatgaggatcgaagcccagggcaagtacatgcagtccatcctggagaaagcctaccagaccatcgccaccggcgacctggctgcgtgcagcccggtggctgcagggtacaaatccctgctaggtaacccgcaggcgatgctggacgtctgctcgctcaaggacatggccccgtccatgggcttcccttcgctgcaagacctgcacatgtacggcggcggcggcggccactgcctggacctgcagcagcagatggagcggccgatggaggccttcttcgccagctgcgacatcgggtcgctggccaagaagaggcccgtcagcccttacgccgacgacgacggcggcaagagcccgatgctgtggggcgaggacgacgagggcaagggcatcgtcgaccatttccagatggcgccgccgatgatggacgccgccggcatcgacgtcatggactccatcgccgacgtgtacggcgacgccaagcacatgaccatgtccagcgactccacggggagcaagggcggcggcttcgacgtcaggctcgagcggccatcgctgcggcggccgcacatgggcggcagcccgtcggtgctcggcggaggccagacgaggaacctgtcctacgggtaactagctcgtcgctctgatgatgattaaccatccgatccggcgtgcttaattaattaactcgcagtgaaactaaaattaattaaagcaggcgattattattaaccggtgcaaaacggctacaaataaataagtaaagctagcgctggagcaggcatgcataatataatggcggagatacatatatatatttatagcataagtgtcattaattcatgatcacgagattgatgatcttaccgtggcgcatcacttgctggatgatgctccaagataatctattttgagcgagaggagatgtatgttccatgtaattgtagtgctgttgatgggtgtaaatgcatgtgcaacttattaattggtaattttgcatgctgaggaaacaatctttctttggtctgaggcatcatatatatatatatatatatatatatttgcattgtatggagctagctagctgatgaggaacatgcatgctaataatggattaactgtctgataccttaagcttctttgtattattgtactgatgattagttctttttggtttatctgtacaatgtatttccatgtgacttttttcatgtaatgtaaatgacattctcacaacgtactatatatgtaaccttgacattcattaaccaagctcactcggcatatgtacatatacatgcattaagctagataaattgtacagttttgcttgtacaaattcatatcgctagggcattattatagctgcctttggctgcgtttggttggag

SEQ ID NO: 54101 - DNA, 150 bp, Zea Mays
atgggatcgaggaacgggaacgtggtacgcggaacgctacaaaaactaggatttaacactactggaacaagattgttcccacgttcccagaacggaacgaacgttcccggaacgaggaacgtggccaagttcccagttcccggttactaa

SEQ ID NO: 54102 - DNA, 1886 bp, Zea Mays
cgaaggggagcgtgacatgtttcataatgtcaaaaatgtcgggtcctaaaaatcaattttctcctcggggactccactcggttgccggccatggcggagaatttggcccccgagaagcgccacaccttcgtgcacaacgggcagaaggtgttcgagtgggaccagacgctagaggaggtgaacatgtacatcgagctccccaagggcgtgcccaccaagctcttccactgcaccatccaggccagccacgtcgaggtcggcatccgcggcaacccgccatatctcaaccatgacctgatgcaccccgtgaagaccgactcgtcgttctggacaataggtgtggccgaactcatcgctcttgagcacctcatcattttttttcttctaaaccacaccttttctttttctgagcctgtactgtagatattgatttctgtagtatttctgacatcttcgtgagaagtgttcttgaaattgctgttcggttggtacaagctgtttgcgcttataattgttaaactggcacgatgcttttaccaattaatacaatggagagttgatgaaagcaattctcctgcttcgctgatgcaaataaactacttagcagccatactgataatcattggatagtattgggtggctttagtttttgccagggttagttgagagctagatagcagacattgttgatgagtacaactgtacagctgctcctgatttggtacccttttgtgttttactagtcactttagacaacaaaatatgtctccagcacacatctttgacctttatagtcttacttttgctgtatagttatcaacttatcataattataatgatatggatatatctttcatggcgaatgcgatattagttccattccgatgatcttatcaagttatcagtctgtatagtttattgtagaaacttgctagcatcaagtattcgttgttgttgactgtttttttatataatctgagttagtgcagaactagagcaaaagtaccaaacttagggctgtaggaaaatacgtagtttctgccaatctacagatcaagtgaatttgacaacatgctttgctagaatcaacaattaggatgcttctgaggtgtgatgattttttgaacagccagtaaaaacttagtgtgaggctgtgagctagtgataacatgagattatgcataagggcattctagcatgtgctactcacatgaaatttagtactatggatattgggatatgtctgtaacgatatctgagtcatatacatcttattcaactataatttttaacatgggcaatggtgatgacaatacagaggatgctgagatgcatataacactgcaaaaaagagagaaggggaaaacatggtcatccccaatacaagggcaagggattttggatccatatgctgcagatcaagagcaaaagcggcttatgctccaaaggtttcaggaagagaacccagggttcgacttttcgcaggctcagttcagtggaacctgccctgacccaagaaccttcatgggaggaatacgctctgagtgaagctccctacctgcccatgttggtgttgtattcccggttggtgtctatcatggaaataatcgtgatgtgtaaccattttgtgtgcaagctcattaattggctgtaaacccttttggcaacctttgcgtgctaaattctagttatagttgtgatcgtcattcagtgttcgtttttagatgtatattaataatatttaggaagagttgatggcaacctctgcatgctaaattctagttatagttgtgatcatcattcagtgctagactgctcgttttttgatgtatttatatttgggggtgagctcatgactaaggctatcttcaaccattctccctcca

SEQ ID NO: 54103 - DNA, 3616 bp, Zea Mays
cttttcacgcccgttgcttgctcccccacgcttgacgctcccccatccctcctccgctgcctttctctcacttcgccgccactcccagtctctctctatctctccactccttacagctagattctagaagccaacaaaaacagacgggggcagagcgtaaggggagaatcgtgctccgggaaagcaaacctcagagaatccacctctcccccaccctctctctctctctagatctacgcaagccgcctcggtatccgcgatcgccaccgcccgcggcggctgatgcgtccgtgctgctgcgcggaggtggcgctgcgctgttagctggcgcgagagttcgtccggcccccgaccgagtgatgggggcggcggggggcggccggtgcgtccgcctcggggcggcgccggtcctcgtcctgctgctgatcgccgctgccacattgccgcggctggcgcgcgcggtcaccgacgccggcgacgtttctgctataaatggactttatgttgcacttggatcaccaaagctgccaggatggtctgctagtgctggagatccctgtggtgagagctggcagggtgtcacatgtaccggctcaagtataacctcaatagttttcaatgctgcaaatctgggaggacagctaggcagcctggggaacttcacttcaataactgaaataaatcttagcaacaacaatatcggtggaaccataccagaagatctacctgtcacactgcagaatctgtttctctcagataaccaactaactggaagcattccaatgtcattatcagaactccatagtctaacagccatgtcactgaatgataaccatctagatggaaagctaccagatgcatttgattccctcacgggacttgtaaatctggatatttcttccaacaacttcagtggtccattaccaccttcattgggaagcttgacatcactgactacattgcacatgcaagataatcaactatctggtacccttaatgtcttgcaggatctccccctcaaagacttaaatgtagagaataatatgttttctggaccagttcctccgaagctgctgaacataccaaacttcaagctctagaccaacacaaacaccatcgtcttcttcatccccttcaggatctccgccaccatctagtgcagcatcaaactcttctagtggatctactgctcgaaatagcaactctccatcatccaagaagaacaagtcttcacccctcagaactgttggatatgttcttcttgctattgtactattcatagttctagtgctgttggtaatcttttgcctgtccaagtatcaagaaagacagtctagacgtgattattccacgtctcaattaggtagggtgcaccagagggttgaggagccaaaaagcaagcaagcttcggtgcagtctaaacatgaagccaaaaaaggttcatctgaggttcctgaaagaaagaagccccgagaaataaatttagctgtaccagttgccattgagaagcctcctgaaaagagaaaagagcgtgtaattaatttggaacgaacagaatcagagatctttgctgcagcaccacctccacctccacctccgcccccaccaccaccgcccccaacaccgccaccgccacctccgcctccacgactgccatcaccacctcctgttgaaaaagtaactgtaaatcccattgtacttccagaaaaaagagttagcaccccgccaaggactggtccctcgacatctgcaacatccttttcggtggcatcacttcagcaatatacaaatagttttcaagagcaaaatttgataagggagagtagattggggaaagtgtatttggcagaacttcctgaaggcaaattactggaagttatgaagattgataatgctaatggaagaataccagtagatgactttctagagttggttgctcgtatatcagatattagacaccctaacattcttgaattagttggatattgtgctgaatatgaacagcggttactcgtgtataactacttcagtagaaaaacattacatgatgtactacatgaaggggaggatctagatgaaccattatcctggaatgctcgcctccacattgttcttcatgcagcaaaagccttagagtatctccatgacacctgtgaacctcctgtagtacaccagaattttgaaccagccaacgtgctcctcgacaatagatgctcagtgcgtgttgctgaatgtgggctggcacaattgatggcgtctggttctgttacacagctatcaggccgtatgagagctctactcaattatgaagcacctgaaatccatgaatctgagccttttactcgtcaaagcgacgtatatagtttgggtgtggtgatgctagaacttcttactggtcgtaagccatatgacagttctcgtccacgtgatgaacaacatcttgttcgatgggctaattctcagcttcatgacatggagtccctgtcaaagatggttgatccttctatccgaggagagtgttctgtgatactgttgtcacgttttgcagacatcatcagtcagtgtattcagccgggaccagaattcaggccagcaatgtctcaaatcgtccaagacctagctaggattgtaggtgctagtggtgcggtatcagagtgacagataaagggggaacagtaaacatctagcttgactgtatgcacttgtggagacgccagaacgtttgtttcctttatctaaaaaaaaggtaaaacatctagcctcagtcgtgtggccagtgaagattcatacatcctcagcgcagtgccaggggcactctcagtatttatgttggacgatattgcggctagtgtacatgccattttggagccccatttgcttctggaaaggtgtagtggtactgtggtagtatggcacaaccagtgagatatggcttctcattgttgctagcagatattcctgagctcctctagacatgataatttcacctgcaggcagtgtatctcttgtaactaattccaattttttattactttattattacattatagctagttatgtcaaatatggtgcttttagcttgtcttgagacctatgtttctcctgggaaaagaactggcttgctgattctttgcagaggcaaagcaacctttttctgacctgtacatgaagattctcctccttgaagcgaaagcacctctgctaggtatgcgtggtgtgcttggttcctgacttttcttcgtgtggtttcttcaagatgtagaataagttatgacagtgttcaactatgctgattggggattagataaacttttgtattgatccgttcttaactgatagatggcaccctgtggttgattgcaagcttgatctgtcatgttgcgtcttgtagcatgcactgtcaggttctggatttctggctgttgtctgttgaacacttttttagcttatttcttcttcgtttccccaggttacactggtaacagaaaactcgattctagttaccactgcccaggagtatattttggcttacagttttgtatgcttgaactgatagtatcatcttttgccttttgggctttaagcagggcaaatgctttgtatcacaaaatctaga

SEQ ID NO: 54104 - DNA, 3704 bp, Zea Mays
ctctccatcttttcacgcccgttgcttgctcccccacgcttgacgctcccccatccctcctccgctgcctttctctcacttcgccgccactcccagtctctctctatctctccactccttacagctagattctagaagccaacaaaaacagacgggggcagagcgtaaggggagaatcgtgctccgggaaagcaaacctcagagaatccacctctcccccaccctctctctctctctagatctacgcaagccgcctcggtatccgcgatcgccaccgcccgcggcggctgatgcgtccgtgctgctgcgcggaggtggcgctgcgctgttagctggcgcgagagttcgtccggcccccgaccgagtgatgggggcggcggggggcggccggtgcgtccgcctcggggcggcgccggtcctcgtcctgctgctgatcgccgctgccacattgccgcggctggcgcgcgcggtcaccgacgccggcgacgtttctgctataaatggactttatgttgcacttggatcaccaaagctgccaggatggtctgctagtgctggagatccctgtggtgagagctggcagggtgtcacatgtaccggctcaagtataacctcaatagttttcaatgctgcaaatctgggaggacagctaggcagcctggggaacttcacttcaataactgaaataaatcttagcaacaacaatatcggtggaaccataccagaagatctacctgtcacactgcagaatctgtttctctcagataaccaactaactggaagcattccaatgtcattatcagaactccatagtctaacagccatatcctcttttaccaggtcactgaatgataaccatctagatggaaagctaccagatgcatttgattccctcacgggacttgtaaatctggatatttcttccaacaacttcagtggtccattaccaccttcattgggaagcttgacatcactgactacattgcacatgcaagataatcaactatctggtacccttaatgtcttgcaggatctccccctcaaagacttaaatgtagagaataatatgttttctggaccagttcctccgaagctgctgaacataccaaacttcaaaaatgatgggaatccttttaataccagcatagctccctctacctcaccctcttcaacacctacaggctctagaccaacacaaacaccatcgtcttcttcatccccttcaggatctccgccaccatctagtgcagcatcaaactcttctagtggatctactgctcgaaatagcaactctccatcatccaagaagaacaagtcttcacccctcagaactgttggatatgttcttcttgctattgtactattcatagttctagtgctgttggtaatcttttgcctgtccaagtatcaagaaagacagtctagacgtgattattccacgtctcaattaggtagggtgcaccagagggttgaggagccaaaaagcaagcaagcttcggtgcagtctaaacatgaagccaaaaaaggttcatctgaggttcctgaaagaaagaagccccgagaaataaatttagctgtaccagttgccattgagaagcctcctgaaaagagaaaagagcgtgtaattaatttggaacgaacagaatcagagatctttgctgcagcaccacctccacctccacctccgcccccaccaccaccgcccccaacaccgccaccgccacctccgcctccacgactgccatcaccacctcctgttgaaaaagtaactgtaaatcccattgtacttccagaaaaaagagttagcaccccgccaaggactggtccctcgacatctgcaacatccttttcggtggcatcacttcagcaatatacaaatagttttcaagagcaaaatttgataagggagagtagattggggaaagtgtatttggcagaacttcctgaaggcaaattactggaagttatgaagattgataatgctaatggaagaataccagtagatgactttctagagttggttgctcgtatatcagatattagacaccctaacattcttgaattagttggatattgtgctgaatatgaacagcggttactcgtgtataactacttcagtagaaaaacattacatgatgtactacatgaaggggaggatctagatgaaccattatcctggaatgctcgcctccacattgttcttcatgcagcaaaagccttagagtatctccatgacacctgtgaacctcctgtagtacaccagaattttgaaccagccaacgtgctcctcgacaatagatgctcagtgcgtgttgctgaatgtgggctggcacaattgatggcgtctggttctgttacacagctatcaggccgtatgagagctctactcaattatgaagcacctgaaatccatgaatctgagccttttactcgtcaaagcgacgtatatagtttgggtgtggtgatgctagaacttcttactggtcgtaagccatatgacagttctcgtccacgtgatgaacaacatcttgttcgatgggctaattctcagcttcatgacatggagtccctgtcaaagatggttgatccttctatccgaggagagtgttctgtgatactgttgtcacgttttgcagacatcatcagtcagtgtattcagccgggaccagaattcaggccagcaatgtctcaaatcgtccaagacctagctaggattgtaggtgctagtggtgcggtatcagagtgacagataaagggggaacagtaaacatctagcttgactgtatgcacttgtggagacgccagaacgtttgtttcctttatctaaaaaaaaggtaaaacatctagcctcagtcgtgtggccagtgaagattcatacatcctcagcgcagtgccaggggcactctcagtatttatgttggacgatattgcggctagtgtacatgccattttggagccccatttgcttctggaaaggtgtagtggtactgtggtagtatggcacaaccagtgagatatggcttctcattgttgctagcagatattcctgagctcctctagacatgataatttcacctgcaggcagtgtatctcttgtaactaattccaattttttattactttattattacattatagctagttatgtcaaatatggtgcttttagcttgtcttgagacctatgtttctcctgggaaaagaactggcttgctgattctttgcagaggcaaagcaacctttttctgacctgtacatgaagattctcctccttgaagcgaaagcacctctgctaggtatgcgtggtgtgcttggttcctgacttttcttcgtgtggtttcttcaagatgtagaataagttatgacagtgttcaactatgctgattggggattagataaacttttgtattgatccgttcttaactgatagatggcaccctgtggttgattgcaagcttgatctgtcatgttgcgtcttgtagcatgcactgtcaggttctggatttctggctgttgtctgttgaacacttttttagcttatttcttcttcgtttccccaggttacactggtaacagaaaactcgattctagttaccactgcccaggagtatattttggcttacagttttgtatgcttgaactgatagtatcatcttttgccttttgggctttaagcagggcaaatgctttgtatcacaaaatctaga

SEQ ID NO: 54105 - DNA, 3725 bp, Zea Mays
ctctctccatcttttcacgcccgttgcttgctcccccacgcttgacgctcccccatccctcctccgctgcctttctctcacttcgccgccactcccagtctctctctatctctccactccttacagctagattctagaagccaacaaaaacagacgggggcagagcgtaaggggagaatcgtgctccgggaaagcaaacctcagagaatccacctctcccccaccctctctctctctctagatctacgcaagccgcctcggtatccgcgatcgccaccgcccgcggcggctgatgcgtccgtgctgctgcgcggaggtggcgctgcgctgttagctggcgcgagagttcgtccggcccccgaccgagtgatgggggcggcggggggcggccggtgcgtccgcctcggggcggcgccggtcctcgtcctgctgctgatcgccgctgccacattgccgcggctggcgcgcgcggtcaccgacgccggcgacgtttctgctataaatggactttatgttgcacttggatcaccaaagctgccaggatggtctgctagtgctggagatccctgtggtgagagctggcagggtgtcacatgtaccggctcaagtataacctcaatagttttcaatgctgcaaatctgggaggacagctaggcagcctggggaacttcacttcaataactgaaatgtaagggcatggtctttacaattttttaccaatgaaatcttagcaacaacaatatcggtggaaccataccagaagatctacctgtcacactgcagaatctgtttctctcagataaccaactaactggaagcattccaatgtcattatcagaactccatagtctaacagccatgtcactgaatgataaccatctagatggaaagctaccagatgcatttgattccctcacgggacttgtaaatctggatatttcttccaacaacttcagtggtccattaccaccttcattgggaagcttgacatcactgactacattgcacatgcaagataatcaactatctggtacccttaatgtcttgcaggatctccccctcaaagacttaaatgtagagaataatatgttttctggaccagttcctccgaagctgctgaacataccaaacttcaaaaatgatgggaatccttttaataccagcatagctccctctacctcaccctcttcaacacctacaggctctagaccaacacaaacaccatcgtcttcttcatccccttcaggatctccgccaccatctagtgcagcatcaaactcttctagtggatctactgctcgaaatagcaactctccatcatccaagaagaacaagtcttcacccctcagaactgttggatatgttcttcttgctattgtactattcatagttctagtgctgttggtaatcttttgcctgtccaagtatcaagaaagacagtctagacgtgattattccacgtctcaattaggtagggtgcaccagagggttgaggagccaaaaagcaagcaagcttcggtgcagtctaaacatgaagccaaaaaaggttcatctgaggttcctgaaagaaagaagccccgagaaataaatttagctgtaccagttgccattgagaagcctcctgaaaagagaaaagagcgtgtaattaatttggaacgaacagaatcagagatctttgctgcagcaccacctccacctccacctccgcccccaccaccaccgcccccaacaccgccaccgccacctccgcctccacgactgccatcaccacctcctgttgaaaaagtaactgtaaatcccattgtacttccagaaaaaagagttagcaccccgccaaggactggtccctcgacatctgcaacatccttttcggtggcatcacttcagcaatatacaaatagttttcaagagcaaaatttgataagggagagtagattggggaaagtgtatttggcagaacttcctgaaggcaaattactggaagttatgaagattgataatgctaatggaagaataccagtagatgactttctagagttggttgctcgtatatcagatattagacaccctaacattcttgaattagttggatattgtgctgaatatgaacagcggttactcgtgtataactacttcagtagaaaaacattacatgatgtactacatgaaggggaggatctagatgaaccattatcctggaatgctcgcctccacattgttcttcatgcagcaaaagccttagagtatctccatgacacctgtgaacctcctgtagtacaccagaattttgaaccagccaacgtgctcctcgacaatagatgctcagtgcgtgttgctgaatgtgggctggcacaattgatggcgtctggttctgttacacagctatcaggccgtatgagagctctactcaattatgaagcacctgaaatccatgaatctgagccttttactcgtcaaagcgacgtatatagtttgggtgtggtgatgctagaacttcttactggtcgtaagccatatgacagttctcgtccacgtgatgaacaacatcttgttcgatgggctaattctcagcttcatgacatggagtccctgtcaaagatggttgatccttctatccgaggagagtgttctgtgatactgttgtcacgttttgcagacatcatcagtcagtgtattcagccgggaccagaattcaggccagcaatgtctcaaatcgtccaagacctagctaggattgtaggtgctagtggtgcggtatcagagtgacagataaagggggaacagtaaacatctagcttgactgtatgcacttgtggagacgccagaacgtttgtttcctttatctaaaaaaaaggtaaaacatctagcctcagtcgtgtggccagtgaagattcatacatcctcagcgcagtgccaggggcactctcagtatttatgttggacgatattgcggctagtgtacatgccattttggagccccatttgcttctggaaaggtgtagtggtactgtggtagtatggcacaaccagtgagatatggcttctcattgttgctagcagatattcctgagctcctctagacatgataatttcacctgcaggcagtgtatctcttgtaactaattccaattttttattactttattattacattatagctagttatgtcaaatatggtgcttttagcttgtcttgagacctatgtttctcctgggaaaagaactggcttgctgattctttgcagaggcaaagcaacctttttctgacctgtacatgaagattctcctccttgaagcgaaagcacctctgctaggtatgcgtggtgtgcttggttcctgacttttcttcgtgtggtttcttcaagatgtagaataagttatgacagtgttcaactatgctgattggggattagataaacttttgtattgatccgttcttaactgatagatggcaccctgtggttgattgcaagcttgatctgtcatgttgcgtcttgtagcatgcactgtcaggttctggatttctggctgttgtctgttgaacacttttttagcttatttcttcttcgtttccccaggttacactggtaacagaaaactcgattctagttaccactgcccaggagtatattttggcttacagttttgtatgcttgaactgatagtatcatcttttgccttttgggctttaagcagggcaaatgctttgtatcacaaaatctaga

SEQ ID NO: 54106 - DNA, 3664 bp, Zea Mays
ctttctctctccatcttttcacgcccgttgcttgctcccccacgcttgacgctcccccatccctcctccgctgcctttctctcacttcgccgccactcccagtctctctctatctctccactccttacagctagattctagaagccaacaaaaacagacgggggcagagcgtaaggggagaatcgtgctccgggaaagcaaacctcagagaatccacctctcccccaccctctctctctctctagatctacgcaagccgcctcggtatccgcgatcgccaccgcccgcggcggctgatgcgtccgtgctgctgcgcggaggtggcgctgcgctgttagctggcgcgagagttcgtccggcccccgaccgagtgatgggggcggcggggggcggccggtgcgtccgcctcggggcggcgccggtcctcgtcctgctgctgatcgccgctgccacattgccgcggctggcgcgcgcggtcaccgacgccggcgacgtttctgctataaatggactttatgttgcacttggatcaccaaagctgccaggatggtctgctagtgctggagatccctgtggtgagagctggcagggtgtcacatgtaccggctcaagtataacctcaatctaggcagcctggggaacttcacttcaataactgaaataaatcttagcaacaacaatatcggtggaaccataccagaagatctacctgtcacactgcagaatctgtttctctcagataaccaactaactggaagcattccaatgtcattatcagaactccatagtctaacagccatgtcactgaatgataaccatctagatggaaagctaccagatgcatttgattccctcacgggacttgtaaatctggatatttcttccaacaacttcagtggtccattaccaccttcattgggaagcttgacatcactgactacattgcacatgcaagataatcaactatctggtacccttaatgtcttgcaggatctccccctcaaagacttaaatgtagagaataatatgttttctggaccagttcctccgaagctgctgaacataccaaacttcaaaaatgatgggaatccttttaataccagcatagctccctctacctcaccctcttcaacacctacaggctctagaccaacacaaacaccatcgtcttcttcatccccttcaggatctccgccaccatctagtgcagcatcaaactcttctagtggatctactgctcgaaatagcaactctccatcatccaagaagaacaagtcttcacccctcagaactgttggatatgttcttcttgctattgtactattcatagttctagtgctgttggtaatcttttgcctgtccaagtatcaagaaagacagtctagacgtgattattccacgtctcaattaggtagggtgcaccagagggttgaggagccaaaaagcaagcaagcttcggtgcagtctaaacatgaagccaaaaaaggttcatctgaggttcctgaaagaaagaagccccgagaaataaatttagctgtaccagttgccattgagaagcctcctgaaaagagaaaagagcgtgtaattaatttggaacgaacagaatcagagatctttgctgcagcaccacctccacctccacctccgcccccaccaccaccgcccccaacaccgccaccgccacctccgcctccacgactgccatcaccacctcctgttgaaaaagtaactgtaaatcccattgtacttccagaaaaaagagttagcaccccgccaaggactggtccctcgacatctgcaacatccttttcggtggcatcacttcagcaatatacaaatagttttcaagagcaaaatttgataagggagagtagattggggaaagtgtatttggcagaacttcctgaaggcaaattactggaagttatgaagattgataatgctaatggaagaataccagtagatgactttctagagttggttgctcgtatatcagatattagacaccctaacattcttgaattagttggatattgtgctgaatatgaacagcggttactcgtgtataactacttcagtagaaaaacattacatgatgtactacatgaaggggaggatctagatgaaccattatcctggaatgctcgcctccacattgttcttcatgcagcaaaagccttagagtatctccatgacacctgtgaacctcctgtagtacaccagaattttgaaccagccaacgtgctcctcgacaatagatgctcagtgcgtgttgctgaatgtgggctggcacaattgatggcgtctggttctgttacacagctatcaggccgtatgagagctctactcaattatgaagcacctgaaatccatgaatctgagccttttactcgtcaaagcgacgtatatagtttgggtgtggtgatgctagaacttcttactggtcgtaagccatatgacagttctcgtccacgtgatgaacaacatcttgttcgatgggctaattctcagcttcatgacatggagtccctgtcaaagatggttgatccttctatccgaggagagtgttctgtgatactgttgtcacgttttgcagacatcatcagtcagtgtattcagccgggaccagaattcaggccagcaatgtctcaaatcgtccaagacctagctaggattgtaggtgctagtggtgcggtatcagagtgacagataaagggggaacagtaaacatctagcttgactgtatgcacttgtggagacgccagaacgtttgtttcctttatctaaaaaaaaggtaaaacatctagcctcagtcgtgtggccagtgaagattcatacatcctcagcgcagtgccaggggcactctcagtatttatgttggacgatattgcggctagtgtacatgccattttggagccccatttgcttctggaaaggtgtagtggtactgtggtagtatggcacaaccagtgagatatggcttctcattgttgctagcagatattcctgagctcctctagacatgataatttcacctgcaggcagtgtatctcttgtaactaattccaattttttattactttattattacattatagctagttatgtcaaatatggtgcttttagcttgtcttgagacctatgtttctcctgggaaaagaactggcttgctgattctttgcagaggcaaagcaacctttttctgacctgtacatgaagattctcctccttgaagcgaaagcacctctgctaggtatgcgtggtgtgcttggttcctgacttttcttcgtgtggtttcttcaagatgtagaataagttatgacagtgttcaactatgctgattggggattagataaacttttgtattgatccgttcttaactgatagatggcaccctgtggttgattgcaagcttgatctgtcatgttgcgtcttgtagcatgcactgtcaggttctggatttctggctgttgtctgttgaacacttttttagcttatttcttcttcgtttccccaggttacactggtaacagaaaactcgattctagttaccactgcccaggagtatattttggcttacagttttgtatgcttgaactgatagtatcatcttttgccttttgggctttaagcagggcaaatgctttgtatcacaaaatctaga

SEQ ID NO: 54107 - DNA, 3749 bp, Zea Mays
caccctttctctctccatcttttcacgcccgttgcttgctcccccacgcttgacgctcccccatccctcctccgctgcctttctctcacttcgccgccactcccagtctctctctatctctccactccttacagctagattctagaagccaacaaaaacagacgggggcagagcgtaaggggagaatcgtgctccgggaaagcaaacctcagagaatccacctctcccccaccctctctctctctctagatctacgcaagccgcctcggtatccgcgatcgccaccgcccgcggcggctgatgcgtccgtgctgctgcgcggaggtggcgctgcgctgttagctggcgcgagagttcgtccggcccccgaccgagtgatgggggcggcggggggcggccggtgcgtccgcctcggggcggcgccggtcctcgtcctgctgctgatcgccgctgccacattgccgcggctggcgcgcgcggtcaccgacgccggcgacgtttctgctataaatggactttatgttgcacttggatcaccaaagctgccaggatggtctgctagtgctggagatccctgtggtgagagctggcagggtgtcacatagttttcaatgctgcaaatctgggaggacagctaggcagcctggggaacttcacttcaataactgaaataaatcttagcaacaacaatatcggtggaaccataccagaagatctacctgtcacactgcagaatctgtttctctcagataaccaactaactggaagcattccaatgtcattatcagaactccatagtctaacagccatgtcactgaatgataaccatctagatggaaagctaccagatgcatttgattccctcacgggacttgtaaatctggatatttcttccaacaacttcagtggtccattaccaccttcattgggaagcttgacatcactgactacattgtaattctacaactgtttcttctatttttaccctcttaccttgtacttactcttccaggatgttctattgcacaggcacatgcaagataatcaactatctggtacccttaatgtcttgcaggatctccccctcaaagacttaaatgtagagaataatatgttttctggaccagttcctccgaagctgctgaacataccaaacttcaaaaatgatgggaatccttttaataccagcatagctccctctacctcaccctcttcaacacctacaggctctagaccaacacaaacaccatcgtcttcttcatccccttcaggatctccgccaccatctagtgcagcatcaaactcttctagtggatctactgctcgaaatagcaactctccatcatccaagaagaacaagtcttcacccctcagaactgttggatatgttcttcttgctattgtactattcatagttctagtgctgttggtaatcttttgcctgtccaagtatcaagaaagacagtctagacgtgattattccacgtctcaattaggtagggtgcaccagagggttgaggagccaaaaagcaagcaagcttcggtgcagtctaaacatgaagccaaaaaaggttcatctgaggttcctgaaagaaagaagccccgagaaataaatttagctgtaccagttgccattgagaagcctcctgaaaagagaaaagagcgtgtaattaatttggaacgaacagaatcagagatctttgctgcagcaccacctccacctccacctccgcccccaccaccaccgcccccaacaccgccaccgccacctccgcctccacgactgccatcaccacctcctgttgaaaaagtaactgtaaatcccattgtacttccagaaaaaagagttagcaccccgccaaggactggtccctcgacatctgcaacatccttttcggtggcatcacttcagcaatatacaaatagttttcaagagcaaaatttgataagggagagtagattggggaaagtgtatttggcagaacttcctgaaggcaaattactggaagttatgaagattgataatgctaatggaagaataccagtagatgactttctagagttggttgctcgtatatcagatattagacaccctaacattcttgaattagttggatattgtgctgaatatgaacagcggttactcgtgtataactacttcagtagaaaaacattacatgatgtactacatgaaggggaggatctagatgaaccattatcctggaatgctcgcctccacattgttcttcatgcagcaaaagccttagagtatctccatgacacctgtgaacctcctgtagtacaccagaattttgaaccagccaacgtgctcctcgacaatagatgctcagtgcgtgttgctgaatgtgggctggcacaattgatggcgtctggttctgttacacagctatcaggccgtatgagagctctactcaattatgaagcacctgaaatccatgaatctgagccttttactcgtcaaagcgacgtatatagtttgggtgtggtgatgctagaacttcttactggtcgtaagccatatgacagttctcgtccacgtgatgaacaacatcttgttcgatgggctaattctcagcttcatgacatggagtccctgtcaaagatggttgatccttctatccgaggagagtgttctgtgatactgttgtcacgttttgcagacatcatcagtcagtgtattcagccgggaccagaattcaggccagcaatgtctcaaatcgtccaagacctagctaggattgtaggtgctagtggtgcggtatcagagtgacagataaagggggaacagtaaacatctagcttgactgtatgcacttgtggagacgccagaacgtttgtttcctttatctaaaaaaaaggtaaaacatctagcctcagtcgtgtggccagtgaagattcatacatcctcagcgcagtgccaggggcactctcagtatttatgttggacgatattgcggctagtgtacatgccattttggagccccatttgcttctggaaaggtgtagtggtactgtggtagtatggcacaaccagtgagatatggcttctcattgttgctagcagatattcctgagctcctctagacatgataatttcacctgcaggcagtgtatctcttgtaactaattccaattttttattactttattattacattatagctagttatgtcaaatatggtgcttttagcttgtcttgagacctatgtttctcctgggaaaagaactggcttgctgattctttgcagaggcaaagcaacctttttctgacctgtacatgaagattctcctccttgaagcgaaagcacctctgctaggtatgcgtggtgtgcttggttcctgacttttcttcgtgtggtttcttcaagatgtagaataagttatgacagtgttcaactatgctgattggggattagataaacttttgtattgatccgttcttaactgatagatggcaccctgtggttgattgcaagcttgatctgtcatgttgcgtcttgtagcatgcactgtcaggttctggatttctggctgttgtctgttgaacacttttttagcttatttcttcttcgtttccccaggttacactggtaacagaaaactcgattctagttaccactgcccaggagtatattttggcttacagttttgtatgcttgaactgatagtatcatcttttgccttttgggctttaagcagggcaaatgctttgtatcacaaaatctaga

SEQ ID NO: 54108 - DNA, 3759 bp, Zea Mays
ccaccctttctctctccatcttttcacgcccgttgcttgctcccccacgcttgacgctcccccatccctcctccgctgcctttctctcacttcgccgccactcccagtctctctctatctctccactccttacagctagattctagaagccaacaaaaacagacgggggcagagcgtaaggggagaatcgtgctccgggaaagcaaacctcagagaatccacctctcccccaccctctctctctctctagatctacgcaagccgcctcggtatccgcgatcgccaccgcccgcggcggctgatgcgtccgtgctgctgcgcggaggtggcgctgcgctgttagctggcgcgagagttcgtccggcccccgaccgagtgatgggggcggcggggggcggccggtgcgtccgcctcggggcggcgccggtcctcgtcctgctgctgatcgccgctgccacattgccgcggctggcgcgcgcggtcaccgacgccggcgacgtttctgctataaatggactttatgttgcacttggatcaccaaagctgccaggatggtctgctagtgctggagatccctgtggtgagagctggcagggtgtcacatgtaccggctcaagtataacctcaatctaggcagcctggggaacttcacttcaataactgaaataaatcttagcaacaacaatatcggtggaaccataccagaagatctacctgtcacactgcagaatctgtttctctcagataaccaactaactggaagcattccaatgtcattatcagaactccatagtctaacagccatatcctcttttaccaggtcactgaatgataaccatctagatggaaagctaccagatgcatttgattccctcacgggacttgtaaatctggatatttcttccaacaacttcagtggtccattaccaccttcattgggaagcttgacatcactgactacattgtaattctacaactgtttcttctatttttaccctcttaccttgtacttactcttccaggatgttctattgcacaggcacatgcaagataatcaactatctggtacccttaatgtcttgcaggatctccccctcaaagacttaaatgtagagaataatatgttttctggaccagttcctccgaagctgctgaacataccaaacttcaaaaatgatgggaatccttttaataccagcatagctccctctacctcaccctcttcaacacctacaggctctagaccaacacaaacaccatcgtcttcttcatccccttcaggatctccgccaccatctagtgcagcatcaaactcttctagtggatctactgctcgaaatagcaactctccatcatccaagaagaacaagtcttcacccctcagaactgttggatatgttcttcttgctattgtactattcatagttctagtgctgttggtaatcttttgcctgtccaagtatcaagaaagacagtctagacgtgattattccacgtctcaattaggtagggtgcaccagagggttgaggagccaaaaagcaagcaagcttcggtgcagtctaaacatgaagccaaaaaaggttcatctgaggttcctgaaagaaagaagccccgagaaataaatttagctgtaccagttgccattgagaagcctcctgaaaagagaaaagagcgtgtaattaatttggaacgaacagaatcagagatctttgctgcagcaccacctccacctccacctccgcccccaccaccaccgcccccaacaccgccaccgccacctccgcctccacgactgccatcaccacctcctgttgaaaaagtaactgtaaatcccattgtacttccagaaaaaagagttagcaccccgccaaggactggtccctcgacatctgcaacatccttttcggtggcatcacttcagcaatatacaaatagttttcaagagcaaaatttgataagggagagtagattggggaaagtgtatttggcagaacttcctgaaggcaaattactggaagttatgaagattgataatgctaatggaagaataccagtagatgactttctagagttggttgctcgtatatcagatattagacaccctaacattcttgaattagttggatattgtgctgaatatgaacagcggttactcgtgtataactacttcagtagaaaaacattacatgatgtactacatgaaggggaggatctagatgaaccattatcctggaatgctcgcctccacattgttcttcatgcagcaaaagccttagagtatctccatgacacctgtgaacctcctgtagtacaccagaattttgaaccagccaacgtgctcctcgacaatagatgctcagtgcgtgttgctgaatgtgggctggcacaattgatggcgtctggttctgttacacagctatcaggccgtatgagagctctactcaattatgaagcacctgaaatccatgaatctgagccttttactcgtcaaagcgacgtatatagtttgggtgtggtgatgctagaacttcttactggtcgtaagccatatgacagttctcgtccacgtgatgaacaacatcttgttcgatgggctaattctcagcttcatgacatggagtccctgtcaaagatggttgatccttctatccgaggagagtgttctgtgatactgttgtcacgttttgcagacatcatcagtcagtgtattcagccgggaccagaattcaggccagcaatgtctcaaatcgtccaagacctagctaggattgtaggtgctagtggtgcggtatcagagtgacagataaagggggaacagtaaacatctagcttgactgtatgcacttgtggagacgccagaacgtttgtttcctttatctaaaaaaaaggtaaaacatctagcctcagtcgtgtggccagtgaagattcatacatcctcagcgcagtgccaggggcactctcagtatttatgttggacgatattgcggctagtgtacatgccattttggagccccatttgcttctggaaaggtgtagtggtactgtggtagtatggcacaaccagtgagatatggcttctcattgttgctagcagatattcctgagctcctctagacatgataatttcacctgcaggcagtgtatctcttgtaactaattccaattttttattactttattattacattatagctagttatgtcaaatatggtgcttttagcttgtcttgagacctatgtttctcctgggaaaagaactggcttgctgattctttgcagaggcaaagcaacctttttctgacctgtacatgaagattctcctccttgaagcgaaagcacctctgctaggtatgcgtggtgtgcttggttcctgacttttcttcgtgtggtttcttcaagatgtagaataagttatgacagtgttcaactatgctgattggggattagataaacttttgtattgatccgttcttaactgatagatggcaccctgtggttgattgcaagcttgatctgtcatgttgcgtcttgtagcatgcactgtcaggttctggatttctggctgttgtctgttgaacacttttttagcttatttcttcttcgtttccccaggttacactggtaacagaaaactcgattctagttaccactgcccaggagtatattttggcttacagttttgtatgcttgaactgatagtatcatcttttgccttttgggctttaagcagggcaaatgctttgtatcacaaaatctaga

SEQ ID NO: 54109 - DNA, 3730 bp, Zea Mays
agcactcccacacagtacccaccctttctctctccatcttttcacgcccgttgcttgctcccccacgcttgacgctcccccatccctcctccgctgcctttctctcacttcgccgccactcccagtctctctctatctctccactccttacagctagattctagaagccaacaaaaacagacgggggcagagcgtaaggggagaatcgtgctccgggaaagcaaacctcagagaatccacctctcccccaccctctctctctctctagatctacgcaagccgcctcggtatccgcgatcgccaccgcccgcggcggctgatgcgtccgtgctgctgcgcggaggtggcgctgcgctgttagctggcgcgagagttcgtccggcccccgaccgagtgatgggggcggcggggggcggccggtgcgtccgcctcggggcggcgccggtcctcgtcctgctgctgatcgccgctgccacattgccgcggctggcgcgcgcggtcaccgacgccggcgacgtttctgctataaatggactttatgttgcacttggatcaccaaagctgccaggatggtctgctagtgctggagatccctgtggtgagagctggcagggtgtcacatgtaccggctcaagtataacctcaatagttttcaatgctgcaaatctgggaggacagctaggcagcctggggaacttcacttcaataactgaaataaatcttagcaacaacaatatcggtggaaccataccagaagatctacctgtcacactgcagaatctgtttctctcagataaccaactaactggaagcattccaatgtcattatcagaactccatagtctaacagccatgtcactgaatgataaccatctagatggaaagctaccagatgcatttgattccctcacgggacttgtaaatctggatatttcttccaacaacttcagtggtccattaccaccttcattgggaagcttgacatcactgactacattgcacatgcaagataatcaactatctggtacccttaatgtcttgcaggatctccccctcaaagacttaaatgtagagaataatatgttttctggaccagttcctccgaagctgctgaacataccaaacttcaaaaatgatgggaatccttttaataccagcatagctccctctacctcaccctcttcaacacctacaggctctagaccaacacaaacaccatcgtcttcttcatccccttcaggatctccgccaccatctagtgcagcatcaaactcttctagtggatctactgctcgaaatagcaactctccatcatccaagaagaacaagtcttcacccctcagaactgttggatatgttcttcttgctattgtactattcatagttctagtgctgttggtaatcttttgcctgtccaagtatcaagaaagacagtctagacgtgattattccacgtctcaattaggtagggtgcaccagagggttgaggagccaaaaagcaagcaagcttcggtgcagtctaaacatgaagccaaaaaagtttgactaacaggttcatctgaggttcctgaaagaaagaagccccgagaaataaatttagctgtaccagttgccattgagaagcctcctgaaaagagaaaagagcgtgtaattaatttggaacgaacagaatcagagatctttgctgcagcaccacctccacctccacctccgcccccaccaccaccgcccccaacaccgccaccgccacctccgcctccacgactgccatcaccacctcctgttgaaaaagtaactgtaaatcccattgtacttccagaaaaaagagttagcaccccgccaaggactggtccctcgacatctgcaacatccttttcggtggcatcacttcagcaatatacaaatagttttcaagagcaaaatttgataagggagagtagattggggaaagtgtatttggcagaacttcctgaaggcaaattactggaagttatgaagattgataatgctaatggaagaataccagtagatgactttctagagttggttgctcgtatatcagatattagacaccctaacattcttgaattagttggatattgtgctgaatatgaacagcggttactcgtgtataactacttcagtagaaaaacattacatgatgtactacatgaaggggaggatctagatgaaccattatcctggaatgctcgcctccacattgttcttcatgcagcaaaagccttagagtatctccatgacacctgtgaacctcctgtagtacaccagaattttgaaccagccaacgtgctcctcgacaatagatgctcagtgcgtgttgctgaatgtgggctggcacaattgatggcgtctggttctgttacacagctatcaggccgtatgagagctctactcaattatgaagcacctgaaatccatgaatctgagccttttactcgtcaaagcgacgtatatagtttgggtgtggtgatgctagaacttcttactggtcgtaagccatatgacagttctcgtccacgtgatgaacaacatcttgttcgatgggctaattctcagcttcatgacatggagtccctgtcaaagatggttgatccttctatccgaggagagtgttctgtgatactgttgtcacgttttgcagacatcatcagtcagtgtattcagccgggaccagaattcaggccagcaatgtctcaaatcgtccaagacctagctaggattgtaggtgctagtggtgcggtatcagagtgacagataaagggggaacagtaaacatctagcttgactgtatgcacttgtggagacgccagaacgtttgtttcctttatctaaaaaaaaggtaaaacatctagcctcagtcgtgtggccagtgaagattcatacatcctcagcgcagtgccaggggcactctcagtatttatgttggacgatattgcggctagtgtacatgccattttggagccccatttgcttctggaaaggtgtagtggtactgtggtagtatggcacaaccagtgagatatggcttctcattgttgctagcagatattcctgagctcctctagacatgataatttcacctgcaggcagtgtatctcttgtaactaattccaattttttattactttattattacattatagctagttatgtcaaatatggtgcttttagcttgtcttgagacctatgtttctcctgggaaaagaactggcttgctgattctttgcagaggcaaagcaacctttttctgacctgtacatgaagattctcctccttgaagcgaaagcacctctgctaggtatgcgtggtgtgcttggttcctgacttttcttcgtgtggtttcttcaagatgtagaataagttatgacagtgttcaactatgctgattggggattagataaacttttgtattgatccgttcttaactgatagatggcaccctgtggttgattgcaagcttgatctgtcatgttgcgtcttgtagcatgcactgtcaggttctggatttctggctgttgtctgttgaacacttttttagcttatttcttcttcgtttccccaggttacactggtaacagaaaactcgattctagttaccactgcccaggagtatattttggcttacagttttgtatgcttgaactgatagtatcatcttttgccttttgggctttaagcagggcaaatgctttgtatcacaaaatctaga

SEQ ID NO: 54110 - DNA, 3068 bp, Zea Mays
atgccggcgggaggggccattgtggtcgtggaggtggtgcaggtggtcgtgccgggggcagtggccaagccgccagggagcaaggaagaggcggccgcgtcgacggggatgaagagcgggctcgcgcgcttggtccggcgcacgggcggcgcggagaggccgacgtcggcgtggtctgttgctggcgggcgcgtgctctgggctcgagccgccatccccttgccggcgacgcagatcccgatgggggggggctggctcgacaatggcggcacgcagattcggcacggggcggcgccgcgaccaggcggaggagggaggcgagcggcgcattggcgggtccacgaccgagggggaggagagccagtggaggcggaagacgagtggaggttcgccagagtgacgtggaggctgacggtaacggctgttggccttaacaccgaatggggtttattaatggccagcatttcagaagacaacaatgaagaaactcctctgcaggtgcggttgaatggagtagcaacattcataggtattgcaggcctttctgttgctgctatggtcctcgtagtcctctttgcaagatattttacaggacatactacagattcagatggctctgttcaatttgttaagaggcacactagtgtgaaatctgcaatatttggttcaataaagatactaactgttgcggtaactattgttgtcgtcgctgtacctgagggcttaccactggctgtcacactaactctggcttattccatgcgaaaaatgatggccgacaaagcactggttcggaggctttctgcctgtgaaacaatgggttcagcgacaactatttgtagtgacaagactggtacattaacattaaaccagatgactgttatgcaatcgattgtcggtgaagtaaagctgcaacctcctgctaatgttgataaactgtcatctactgtagcctcacttctacttgaaggaattgcacagaatacttcaggcagtgtgtttgaggcacaggatggtagcgtcgaggtaactggttcaccaacagaaaaggctatcctatcttggggtcttgatcttcgtatgaaatttgctgaggagagatcacgatcttctataattcatgtctctcctttcaactccgaaaaaaagcgcgctggggttgcagtggttgcgagagattcaaatgttcatgtacactggaaaggagctgctgaaattgttcttgccttgtgcacaagttggctcaatgtggatggctcaacacatgaaatgacacctgataaggctaatcaactcaagaaacttatagaagatatggctgagcaaagtcttcgatgtattgcttttgcttatcgaaatcttgatatgaaggatgttccaagtgaggagcaaagaatcaactggcaattgccagataatgaattgactcttattggaatcatagggatgaaggatccttgtcgccctgaagtaagagacgctgtcgaactgtgcaaaaaggctggtgttaaggtacgaatggtaactggagataatctgaagacagctaaagcaatagctcttgagtgtggaatactcgatgactcagaggcatctgcacaagctataatagagggaagagttttccgtgcttacgatgatactgaaagggagaatgttgctgacaagatttctgtgatggcacgatcctctcctaatgacaaacttctcctagtaaaagctcttaagaaaataggccatgttgtagctgttactggtgatggaacgaatgatgctcctgcattgcatgaggcagatattggtctttctatgggcatccaaggaacagaagtagccaaagagagctcagacataataattctggatgacaatttttcttctgttgtgaaggtggttcgctggggtcgctctgtttatgcaaatatccaaaagtttattcagttccagcttaccgtaaatgttgcagctcttgtcatcaatgttgttgctgctgtttcctcaggaaatgttcctctaaatgctgttcagcttctctgggttaatctcatcatggacacactcggtgctcttgctttggctactgaaccaccaacagatcaacttatgaggcggccaccagttggacggagagaacctcttgtgactaatatcatgtggagaaacttgtttattcaggctgtctttcaagttgctgttcttctgactctcaactttaggggtcgggatcttttgcatttgactcatgacacactaggacactctagtaaagtgaaaaatacacttatattcaacacatttgtattgtgccaggtgtttaatgaggtcaattctcgtaaaccagaagaactgaacatcttttccggagtttcaagaaatcatcttttcttggcagtagtgagcataactgttgtgatgcaggtgataattattgagttcctcgggaaatttacatcaacagtgagactcaactggaagctttggcttgtttctgtagttattgcttttctaagttggcccttggcttttgttggaaaattcattccagttccgaggactgaattgaaggatctcattgtaaggtgttggcctaaacgtggcgagagtgcagcacaacagactcaggatgacagaatggaagtaccagtgtgaagctgttcttgagcaacttctcgaaattatcaggtgttagtgttggtgcacatagatggtgttggctaattttgggtgctgatttttctaaccatcctaccttgttgcctggctatgaattctatggctgtagtcagcaatcggggaggtaaacctctgctgactcgtgatctagaatttgaacactgtaaacaaaatatgtttattgtagcctaacgaaggtcaggacctccagtggtttattgcacaagttgtgcagtcggtcccagaatcatttggggaaggcgctataaacagtttttcttggcaggagtggagtgtagctccttttcgctaatatcatttttacttttagatgcaatcaagaacattttgtcaaacactctaatagtaattggctgattttgttaaaaaacaaa

SEQ ID NO: 54111 - DNA, 4272 bp, Zea Mays
cacaagtgccagcgccagcgcgtggttcctgggcgggcgggccccgtctccctctccggcttcctttctccgtttctcgctcgcctcttctctctcccggcgtccgcgcccgccgaaacactctcgaaaggaaaccgatctgtcacccaaaccgcgcctccccgcggtgatctcgactcgagcgcgtttaaagcaccgcatcaaaaggaaaagagaagcgcgcgagcgagcgaggatccgggagcgtgaagcgcgaaaaaaaagcaggggagggagcgagcgaggaagcaacgcggaaacgggaaagcgagcgagacaagcgcccgatttggtcccccgcccgcttcgtttcctccgccgcacgtcttctcccccactaccactaggccactaccccacctcccctccagtcccctcgccttcccgccacgccacccgccgcgtcgccggagccctgtagctttcaccgcgcgcgcgtccgtccgtccgtcggcccgcccgcccgccccgagatcggggaggggcgcggtgtcatctctcctgagcaagcggcgcggcgatggcaggggggcaggcgcccgaggcgtcgcccgggcggtaccagcggcggcgcgacgagatcgacgacgacgactgcgccgacgtgctgggcatcgacgtgcgtgggcccgacgctgacccattcgacatccccgccaagcgcgcccccgtcgagcggctgcggcgctggaggcaagctgcacttgtcctgaatgcttctcgacgattcagatacacccttgacctaaaaaaggaggaggagaaggaacaaataagaaggaagataagggcccatgcccaagtcatacgggccgctttacttttcaaagaggctggggaaaagcagactcatgaaacagagttaccagaaattctcccacgagattttggaattggagaggagcagctgacagtgatgactagggatcataattattctgctctgcaagaatatggaggggtcatagggctcgcaaatttactgaaaaccaacctagagaagggaattcatggcgatgaggcagatttgtcatgcagggcaaatgcttttgggcctaacagatatcctcgcaagaaaggaaggagcttttgggtttttctttgggaggcctgccaggatatgacgctagttatccttatcatagctgcagtaatttctttagtactgggcattgcaactgagggcacaaaagaaggctggtatgatggcactagtattgcatttgcagtctttcttgtgatagtcgttactgctgttagtgactacaagcagtcgctgcagttccaacacctcaatgaggagaagcaaaacatacaagtggaggttattaggggtggtagaaggatacaagtatcaatatttgatattgtagtcggtgatatcgtggctttaaaaattggtgatcaggtctcagctgatggtgttgtaatcagtggtcattctcttgccattgatgagtctagtatgactggggaaagcaagattgttatgaaagatcagaagtcaccctttttaatggctggatcaaaagttgctgatggttatggcaccatgttggtaacggctgttggccttaacaccgaatggggtttattaatggccagcatttcagaagacaacaatgaagaaactcctctgcaggtgcggttgaatggagtagcaacattcataggtattgcaggcctttctgttgctgctatggtcctcgtagtcctctttgcaagaaattttttctttgcttccagatattttacaggacatactacagattcagatggctctgttcaatttgttaagaggcacactagtgtgaaatctgcaatatttggttcaataaagatactaactgttgcggtaactattgttgtcgtcgctgtacctgagggcttaccactggctgtcacactaactctggcttattccatgcgaaaaatgatggccgacaaagcactggttcggaggctttctgcctgtgaaacaatgggttcagcgacaactatttgtagtgacaagactggtacattaacattaaaccagatgactgttatgcaatcgattgtcggtgaagtaaagctgcaacctcctgctaatgttgataaactgtcatctactgtagcctcacttctacttgaaggaattgcacagaatacttcaggcagtgtgtttgaggcacaggatggtagcgtcgaggtaactggttcaccaacagaaaaggctatcctatcttggggtcttgatcttcgtatgaaatttgctgaggagagatcacgatcttctataattcatgtctctcctttcaactccgaaaaaaagcgcgctggggttgcagtggttgcgagagattcaaatgttcatgtacactggaaaggagctgctgaaattgttcttgccttgtgcacaagttggctcaatgtggatggctcaacacatgaaatgacacctgataaggctaatcaactcaagaaacttatagaagatatggctgagcaaagtcttcgatgtattgcttttgcttatcgaaatcttgatatgaaggatgttccaagtgaggagcaaagaatcaactggcaattgccagataatgaattgactcttattggaatcatagggatgaaggatccttgtcgccctgaagtaagagacgctgtcgaactgtgcaaaaaggctggtgttaaggtacgaatggtaactggagataatctgaagacagctaaagcaatagctcttgagtgtggaatactcgatgactcagaggcatctgcacaagctataatagagggaagagttttccgtgcttacgatgatactgaaagggagaatgttgctgacaagatttctgtgatggcacgatcctctcctaatgacaaacttctcctagtaaaagctcttaagaaaataggccatgttgtagctgttactggtgatggaacgaatgatgctcctgcattgcatgaggcagatattggtctttctatgggcatccaaggaacagaagtagccaaagagagctcagacataataattctggatgacaatttttcttctgttgtgaaggtggttcgctggggtcgctctgtttatgcaaatatccaaaagtttattcagttccagcttaccgtaaatgttgcagctcttgtcatcaatgttgttgctgctgtttcctcaggaaatgttcctctaaatgctgttcagcttctctgggttaatctcatcatggacacactcggtgctcttgctttggctactgaaccaccaacagatcaacttatgaggcggccaccagttggacggagagaacctcttgtgactaatatcatgtggagaaacttgtttattcaggctgtctttcaagttgctgttcttctgactctcaactttaggggtcgggatcttttgcatttgactcatgacacactaggacactctagtaaagtgaaaaatacacttatattcaacacatttgtattgtgccaggtgtttaatgaggtcaattctcgtaaaccagaagaactgaacatcttttccggagtttcaagaaatcatcttttcttggcagtagtgagcataactgttgtgatgcaggtgataattattgagttcctcgggaaatttacatcaacagtgagactcaactggaagctttggcttgtttctgtagttattgcttttctaagttggcccttggcttttgttggaaaattcattccagttccgaggactgaattgaaggatctcattgtaaggtgttggcctaaacgtggcgagagtgcagcacaacagactcaggatgacagaatggaagtaccagtgtgaagctgttcttgagcaacttctcgaaattatcaggtgttagtgttggtgcacatagatggtgttggctaattttgggtgctgatttttctaaccatcctaccttgttgcctggctatgaattctatggctgtagtcagcaatcggggaggtaaacctctgctgactcgtgatctagaatttgaacactgtaaacaaaatatgtttattgtagcctaacgaaggtcaggacctccagtggtttattgcacaagttgtgcagtcggtcccagaatcatttggggaaggcgctataaacagtttttcttggcaggagtggagtgtagctccttttcgctaatatcatttttacttttagatgcaatcaagaacattttgtcaaacactctaatagtaattggctgattttgttaaaaaacaaa

SEQ ID NO: 54112 - DNA, 4271 bp, Zea Mays
ctcactctagtcgccaccctcacaagtgccagcgccagcgcgtggttcctgggcgggcgggccccgtctccctctccggcttcctttctccgtttctcgctcgcctcttctctctcccggcgtccgcgcccgccgaaacactctcgaaaggaaaccgatctgtcacccaaaccgcgcctccccgcggtgatctcgactcgagcgcgtttaaagcaccgcatcaaaaggaaaagagaagcgcgcgagcgagcgaggatccgggagcgtgaagcgcgaaaaaaaagcaggggagggagcgagcgaggaagcaacgcggaaacgggaaagcgagcgagacaagcgcccgatttggtcccccgcccgcttcgtttcctccgccgcacgtcttctcccccactaccactaggccactaccccacctcccctccagtcccctcgccttcccgccacgccacccgccgcgtcgccggagccctgtagctttcaccgcgcgcgcgtccgtccgtccgtcggcccgcccgcccgccccgagatcggggaggggcgcggtgtcatctctcctgagcaagcggcgcggcgatggcaggggggcaggcgcccgaggcgtcgcccgggcggtaccagcggcggcgcgacgagatcgacgacgacgactgcgccgacgtgctgggcatcgacgtgcgtgggcccgacgctgacccattcgacatccccgccaagcgcgcccccgtcgagcggctgcggcgctggaggcaagctgcacttgtcctgaatgcttctcgacgattcagatacacccttgacctaaaaaaggaggaggagaaggaacaaataagaaggaagataagggcccatgcccaagtcatacgggccgctttacttttcaaagaggctggggaaaagcagactcatgaaacagagttaccagaaattctcccacgagattttggaattggagaggagcagctgacagtgatgactagggatcataattattctgctctgcaagaatatggaggggtcatagggctcgcaaatttactgaaaaccaacctagagaagggaattcatggcgatgaggcagatttgtcatgcagggcaaatgcttttgggcctaacagatatcctcgcaagaaaggaaggagcttttgggtttttctttgggaggcctgccaggatatgacgctagttatccttatcatagctgcagtaatttctttagtactgggcattgcaactgagggcacaaaagaaggctggtatgatggcactagtattgcatttgcagtctttcttgtgatagtcgttactgctgttagtgactacaagcagtcgctgcagttccaacacctcaatgaggagaagcaaaacatacaagtggaggttattaggggtggtagaaggatacaagtatcaatatttgatattgtagtcggtgatatcgtggctttaaaaattggtgatcaggtctcagctgatggtgttgtaatcagtggtcattctcttgccattgatgagtctagtatgactggggaaagcaagattgttatgaaagatcagaagtcaccctttttaatggctggatcaaaagttgctgatggttatggcaccatgttggtaacggctgttggccttaacaccgaatggggtttattaatggccagcatttcagaagacaacaatgaagaaactcctctgcaggtgcggttgaatggagtagcaacattcataggtattgcaggcctttctgttgctgctatggtcctcgtagtcctctttgcaagatattttacaggacatactacagattcagatggctctgttcaatttgttaagaggcacactagtgtgaaatctgcaatatttggttcaataaagatactaactgttgcggtaactattgttgtcgtcgctgtacctgagggcttaccactggctgtcacactaactctggcttattccatgcgaaaaatgatggccgacaaagcactggttcggaggctttctgcctgtgaaacaatgggttcagcgacaactatttgtagtgacaagactggtacattaacattaaaccagatgactgttatgcaatcgattgtcggtgaagtaaagctgcaacctcctgctaatgttgataaactgtcatctactgtagcctcacttctacttgaaggaattgcacagaatacttcaggcagtgtgtttgaggcacaggatggtagcgtcgaggtaactggttcaccaacagaaaaggctatcctatcttggggtcttgatcttcgtatgaaatttgctgaggagagatcacgatcttctataattcatgtctctcctttcaactccgaaaaaaagcgcgctggggttgcagtggttgcgagagattcaaatgttcatgtacactggaaaggagctgctgaaattgttcttgccttgtgcacaagttggctcaatgtggatggctcaacacatgaaatgacacctgataaggctaatcaactcaagaaacttatagaagatatggctgagcaaagtcttcgatgtattgcttttgcttatcgaaatcttgatatgaaggatgttccaagtgaggagcaaagaatcaactggcaattgccagataatgaattgactcttattggaatcatagggatgaaggatccttgtcgccctgaagtaagagacgctgtcgaactgtgcaaaaaggctggtgttaaggtacgaatggtaactggagataatctgaagacagctaaagcaatagctcttgagtgtggaatactcgatgactcagaggcatctgcacaagctataatagagggaagagttttccgtgcttacgatgatactgaaagggagaatgttgctgacaagatttctgtgatggcacgatcctctcctaatgacaaacttctcctagtaaaagctcttaagaaaataggccatgttgtagctgttactggtgatggaacgaatgatgctcctgcattgcatgaggcagatattggtctttctatgggcatccaaggaacagaagtagccaaagagagctcagacataataattctggatgacaatttttcttctgttgtgaaggtggttcgctggggtcgctctgtttatgcaaatatccaaaagtttattcagttccagcttaccgtaaatgttgcagctcttgtcatcaatgttgttgctgctgtttcctcaggaaatgttcctctaaatgctgttcagcttctctgggttaatctcatcatggacacactcggtgctcttgctttggctactgaaccaccaacagatcaacttatgaggcggccaccagttggacggagagaacctcttgtgactaatatcatgtggagaaacttgtttattcaggctgtctttcaagttgctgttcttctgactctcaactttaggggtcgggatcttttgcatttgactcatgacacactaggacactctagtaaagtgaaaaatacacttatattcaacacatttgtattgtgccaggtgtttaatgaggtcaattctcgtaaaccagaagaactgaacatcttttccggagtttcaagaaatcatcttttcttggcagtagtgagcataactgttgtgatgcaggtgataattattgagttcctcgggaaatttacatcaacagtgagactcaactggaagctttggcttgtttctgtagttattgcttttctaagttggcccttggcttttgttggaaaattcattccagttccgaggactgaattgaaggatctcattgtaaggtgttggcctaaacgtggcgagagtgcagcacaacagactcaggatgacagaatggaagtaccagtgtgaagctgttcttgagcaacttctcgaaattatcaggtgttagtgttggtgcacatagatggtgttggctaattttgggtgctgatttttctaaccatcctaccttgttgcctggctatgaattctatggctgtagtcagcaatcggggaggtaaacctctgctgactcgtgatctagaatttgaacactgtaaacaaaatatgtttattgtagcctaacgaaggtcaggacctccagtggtttattgcacaagttgtgcagtcggtcccagaatcatttggggaaggcgctataaacagtttttcttggcaggagtggagtgtagctccttttcgctaatatcatttttacttttagatgcaatcaagaacattttgtcaaacactctaatagtaattggctgattttgttaaaaaacaaa

SEQ ID NO: 54113 - DNA, 1607 bp, Zea Mays
ggagcaaagaatcaactggcaattgccagataatgaattgactcttattggaatcatagggatgaaggatccttgtcgccctgaagtaagagacgctgtcgaactgtgcaaaaaggctggtgttaaggtacgaatggtaactggagataatctgaagacagctaaagcaatagctcttgagtgtggaatactcgatgactcagaggcatctgcacaagctataatagagggaagagttttccgtgcttacgatgatactgaaagggagaatgttgctgacaagatttctgtgatggcacgatcctctcctaatgacaaacttctcctagtaaaagctcttaagaaaataggccatgttgtagctgttactggtgatggaacgaatgatgctcctgcattgcatgaggcagatattggtctttctatgggcatccaaggaacagaagtagccaaagagagctcagacataataattctggatgacaatttttcttctgttgtgaaggtggttcgctggggtcgctctgtttatgcaaatatccaaaagtttattcagttccagcttaccgtaaatgttgcagctcttgtcatcaatgttgttgctgctgtttcctcaggaaatgttcctctaaatgctgttcagcttctctgggttaatctcatcatggacacactcggtgctcttgctttggctactgaaccaccaacagatcaacttatgaggcggccaccagttggacggaggtgtttaatgaggtcaattctcgtaaaccagaagaactgaacatcttttccggagtttcaagaaatcatcttttcttggcagtagtgagcataactgttgtgatgcaggtgataattattgagttcctcgggaaatttacatcaacagtgagactcaactggaagctttggcttgtttctgtagttattgcttttctaagttggcccttggcttttgttggaaaattcattccagttccgaggactgaattgaaggatctcattgtaaggtgttggcctaaacgtggcgagagtgcagcacaacagactcaggatgacagaatggaagtaccagtgtgaagctgttcttgagcaacttctcgaaattatcaggtgttagtgttggtgcacatagatggtgttggctaattttgggtgctgatttttctaaccatcctaccttgttgcctggctatgaattctatggctgtagtcagcaatcggggaggtaaacctctgctgactcgtgatctagaatttgaacactgtaaacaaaatatgtttattgtagcctaacgaaggtcaggacctccagtggtttattgcacaagttgtgcagtcggtcccagaatcatttggggaaggcgctataaacagtttttcttggcaggagtggagtgtagctccttttcgctaatatcatttttacttttagatgcaatcaagaacattttgtcaaacactctaatagtaattggctgattttgttagagttgcctttgctatgccataattgtatttcagaaattgactggtggtatgtattgcgagtgtaaatccactattattggcggtatgtgataacaaaaatatttatggtgccc

SEQ ID NO: 54114 - DNA, 3026 bp, Zea Mays
atgccggcgggaggggccattgtggtcgtggaggtggtgcaggtggtcgtgccgggggcagtggccaagccgccagggagcaaggaagaggcggccgcgtcgacggggatgaagagcgggctcgcgcgcttggtccggcgcacgggcggcgcggagaggccgacgtcggcgtggtctgttgctggcgggcgcgtgctctgggctcgagccgccatccccttgccggcgacgcagatcccgatgggggggggctggctcgacaatggcggcacgcagattcggcacggggcggcgccgcgaccaggcggaggagggaggcgagcggcgcattggcgggtccacgaccgagggggaggagagccagtggaggcggaagacgagtggaggttcgccagagtgacgtggaggctgacggtaacggctgttggccttaacaccgaatggggtttattaatggccagcatttcagaagacaacaatgaagaaactcctctgcaggtgcggttgaatggagtagcaacattcataggtattgcaggcctttctgttgctgctatggtcctcgtagtcctctttgcaagaaattttttctttgcttccagatattttacaggacatactacagattcagatggctctgttcaatttgttaagaggcacactagtgtgaaatctgcaatatttggttcaataaagatactaactgttgcggtaactattgttgtcgtcgctgtacctgagggcttaccactggctgtcacactaactctggcttattccatgcgaaaaatgatggccgacaaagcactggttcggaggctttctgcctgtgaaacaatgggttcagcgacaactatttgtagtgacaagactggtacattaacattaaaccagatgactgttatgcaatcgattgtcggtgaagtaaagctgcaacctcctgctaatgttgataaactgtcatctactgtagcctcacttctacttgaaggaattgcacagaatacttcaggcagtgtgtttgaggcacaggatggtagcgtcgaggtaactggttcaccaacagaaaaggctatcctatcttggggtcttgatcttcgtatgaaatttgctgaggagagatcacgatcttctataattcatgtctctcctttcaactccgaaaaaaagcgcgctggggttgcagtggttgcgagagattcaaatgttcatgtacactggaaaggagctgctgaaattgttcttgccttgtgcacaagttggctcaatgtggatggctcaacacatgaaatgacacctgataaggatccttgtcgccctgaagtaagagacgctgtcgaactgtgcaaaaaggctggtgttaaggtacgaatggtaactggagataatctgaagacagctaaagcaatagctcttgagtgtggaatactcgatgactcagaggcatctgcacaagctataatagagggaagagttttccgtgcttacgatgatactgaaagggagaatgttgctgacaagatttctgtgatggcacgatcctctcctaatgacaaacttctcctagtaaaagctcttaagaaaataggccatgttgtagctgttactggtgatggaacgaatgatgctcctgcattgcatgaggcagatattggtctttctatgggcatccaaggaacagaagtagccaaagagagctcagacataataattctggatgacaatttttcttctgttgtgaaggtggttcgctggggtcgctctgtttatgcaaatatccaaaagtttattcagttccagcttaccgtaaatgttgcagctcttgtcatcaatgttgttgctgctgtttcctcaggaaatgttcctctaaatgctgttcagcttctctgggttaatctcatcatggacacactcggtgctcttgctttggctactgaaccaccaacagatcaacttatgaggcggccaccagttggacggagagaacctcttgtgactaatatcatgtggagaaacttgtttattcaggctgtctttcaagttgctgttcttctgactctcaactttaggggtcgggatcttttgcatttgactcatgacacactaggacactctagtaaagtgaaaaatacacttatattcaacacatttgtattgtgccaggtgtttaatgaggtcaattctcgtaaaccagaagaactgaacatcttttccggagtttcaagaaatcatcttttcttggcagtagtgagcataactgttgtgatgcaggtgataattattgagttcctcgggaaatttacatcaacagtgagactcaactggaagctttggcttgtttctgtagttattgcttttctaagttggcccttggcttttgttggaaaattcattccagttccgaggactgaattgaaggatctcattgtaaggtgttggcctaaacgtggcgagagtgcagcacaacagactcaggatgacagaatggaagtaccagtgtgaagctgttcttgagcaacttctcgaaattatcaggtgttagtgttggtgcacatagatggtgttggctaattttgggtgctgatttttctaaccatcctaccttgttgcctggctatgaattctatggctgtagtcagcaatcggggaggtaaacctctgctgactcgtgatctagaatttgaacactgtaaacaaaatatgtttattgtagcctaacgaaggtcaggacctccagtggtttattgcacaagttgtgcagtcggtcccagaatcatttggggaaggcgctataaacagtttttcttggcaggagtggagtgtagctccttttcgctaatatcatttttacttttagatgcaatcaagaacattttgtcaaacactctaatagtaattggctgattttgttagagttgcctttgctatgccataattgtatttcagaaattgactggtggtatgtattgcgagtgtaaatccactattattggcggtatgtgataacaaaaatatttatggtgccc

SEQ ID NO: 54115 - DNA, 1430 bp, Zea Mays
atgccggcgggaggggccattgtggtcgtggaggtggtgcaggtggtcgtgccgggggcagtggccaagccgccagggagcaaggaagaggcggccgcgtcgacggggatgaagagcgggctcgcgcgcttggtccggcgcacgggcggcgcggagaggccgacgtcggcgtggtctgttgctggcgggcgcgtgctctgggctcgagccgccatccccttgccggcgacgcagatcccgatgggggggggctggctcgacaatggcggcacgcagattcggcacggggcggcgccgcgaccaggcggaggagggaggcgagcggcgcattggcgggtccacgaccgagggggaggagagccagtggaggcggaagacgagtggaggttcgccagagtgacgtggaggctgacggtaacggctgttggccttaacaccgaatggggtttattaatggccagcatttcagaagacaacaatgaagaaactcctctgcaggtgcggttgaatggagtagcaacattcataggtattgcaggcctttctgttgctgctatggtcctcgtagtcctctttgcaagatattttacaggacatactacagattcagatggctctgttcaatttgttaagaggcacactagtgtgaaatctgcaatatttggttcaataaagatactaactgttgcggtaactattgttgtcgtcgctgtacctgagggcttaccactggctgtcacactaactctggcttattccatgcgaaaaatgatggccgacaaagcactggttcggaggctttctgcctgtgaaacaatgggttcagcgacaactatttgtagtgacaagactggtacattaacattaaaccagatgactgttatgcaatcgattgtcggtgaagtaaagctgcaacctcctgctaatgttgataaactgtcatctactgtagcctcacttctacttgaaggaattgcacagaatacttcaggcagtgtgtttgaggcacaggatggtagcgtcgaggtaactggttcaccaacagaaaaggctatcctatcttggggtcttgatcttcgtatgaaatttgctgaggagagatcacgatcttctataattcatgtctctcctttcaactccgaaaaaaagcgcgctggggttgcagtggttgcgagagattcaaatgttcatgtacactggaaaggagctgctgaaattgttcttgccttgtgcacaagttggctcaatgtggatggctcaacacatgaaatgacacctgataaggaccctgtagaagagcaacaacaaggcacacatatagaagactataacttcacctagagccttcatccgtttaattattgttcttgggtcgttctttaagctactccataatgttacattcagtcataaaaacatgtcgttttgga

SEQ ID NO: 54116 - DNA, 2503 bp, Zea Mays
gcgccagcgcgtggttcctgggcgggcgggccccgtctccctctccggcttcctttctccgtttctcgctcgcctcttctctctcccggcgtccgcgcccgccgaaacactctcgaaaggaaaccgatctgtcacccaaaccgcgcctccccgcggtgatctcgactcgagcgcgtttaaagcaccgcatcaaaaggaaaagagaagcgcgcgagcgagcgaggatccgggagcgtgaagcgcgaaaaaaaagcaggggagggagcgagcgaggaagcaacgcggaaacgggaaagcgagcgagacaagcgcccgatttggtcccccgcccgcttcgtttcctccgccgcacgtcttctcccccactaccactaggccactaccccacctcccctccagtcccctcgccttcccgccacgccacccgccgcgtcgccggagccctgtagctttcaccgcgcgcgcgtccgtccgtccgtcggcccgcccgcccgccccgagatcggggaggggcgcggtgtcatctctcctgagcaagcggcgcggcgatggcaggggggcaggcgcccgaggcgtcgcccgggcggtaccagcggcggcgcgacgagatcgacgacgacgactgcgccgacgtgctgggcatcgacgtgcgtgggcccgacgctgacccattcgacatccccgccaagcgcgcccccgtcgagcggctgcggcgctggaggcaagctgcacttgtcctgaatgcttctcgacgattcagatacacccttgacctaaaaaaggaggaggagaaggaacaaataagaaggaagataagggcccatgcccaagtcatacgggccgctttacttttcaaagaggctggggaaaagcagactcatgaaacagagttaccagaaattctcccacgagattttggaattggagaggagcagctgacagtgatgactagggatcataattattctgctctgcaagaatatggaggggtcatagggctcgcaaatttactgaaaaccaacctagagaagggaattcatggcgatgaggcagatttgtcatgcagggcaaatgcttttgggcctaacagatatcctcgcaagaaaggaaggagcttttgggtttttctttgggaggcctgccaggatatgacgctagttatccttatcatagctgcagtaatttctttagtactgggcattgcaactgagggcacaaaagaaggctggtatgatggcactagtattgcatttgcagtctttcttgtgatagtcgttactgctgttagtgactacaagcagtcgctgcagttccaacacctcaatgaggagaagcaaaacatacaagtggaggttattaggggtggtagaaggatacaagtatcaatatttgatattgtagtcggtgatatcgtggctttaaaaattggtgatcaggtctcagctgatggtgttgtaatcagtggtcattctcttgccattgatgagtctagtatgactggggaaagcaagattgttatgaaagatcagaagtcaccctttttaatggctggatcaaaagttgctgatggttatggcaccatgttggtaacggctgttggccttaacaccgaatggggtttattaatggccagcatttcagaagacaacaatgaagaaactcctctgcaggtgcggttgaatggagtagcaacattcataggtattgcaggcctttctgttgctgctatggtcctcgtagtcctctttgcaagatattttacaggacatactacagattcagatggctctgttcaatttgttaagaggcacactagtgtgaaatctgcaatatttggttcaataaagatactaactgttgcggtaactattgttgtcgtcgctgtacctgagggcttaccactggctgtcacactaactctggcttattccatgcgaaaaatgatggccgacaaagcactggttcggaggctttctgcctgtgaaacaatgggttcagcgacaactatttgtagtgacaagactggtacattaacattaaaccagatgactgttatgcaatcgattgtcggtgaagtaaagctgcaacctcctgctaatgttgataaactgtcatctactgtagcctcacttctacttgaaggaattgcacagaatacttcaggcagtgtgtttgaggcacaggatggtagcgtcgaggtaactggttcaccaacagaaaaggctatcctatcttggggtcttgatagagattcaaatgttcatgtacactggaaaggagctgctgaaattgttcttgccttgtgcacaagttggctcaatgtggatggctcaacacatgaaatgacacctgataaggaccctgtagaagagcaacaacaaggcacacatatagaagactataacttcacctagagccttcatccgtttaattattgttcttgggtcgttctttaagctactccataatgttacattcagtcataaaaacatgtcgttttgga

SEQ ID NO: 54117 - DNA, 2671 bp, Zea Mays
gtgaggtcacccacgaccgcgactggactcgagcgtctctcactctagtcgccaccctcacaagtgccagcgccagcgcgtggttcctgggcgggcgggccccgtctccctctccggcttcctttctccgtttctcgctcgcctcttctctctcccggcgtccgcgcccgccgaaacactctcgaaaggaaaccgatctgtcacccaaaccgcgcctccccgcggtgatctcgactcgagcgcgtttaaagcaccgcatcaaaaggaaaagagaagcgcgcgagcgagcgaggatccgggagcgtgaagcgcgaaaaaaaagcaggggagggagcgagcgaggaagcaacgcggaaacgggaaagcgagcgagacaagcgcccgatttggtcccccgcccgcttcgtttcctccgccgcacgtcttctcccccactaccactaggccactaccccacctcccctccagtcccctcgccttcccgccacgccacccgccgcgtcgccggagccctgtagctttcaccgcgcgcgcgtccgtccgtccgtcggcccgcccgcccgccccgagatcggggaggggcgcggtgtcatctctcctgagcaagcggcgcggcgatggcaggggggcaggcgcccgaggcgtcgcccgggcggtaccagcggcggcgcgacgagatcgacgacgacgactgcgccgacgtgctgggcatcgacgtgcgtgggcccgacgctgacccattcgacatccccgccaagcgcgcccccgtcgagcggctgcggcgctggaggcaagctgcacttgtcctgaatgcttctcgacgattcagatacacccttgacctaaaaaaggaggaggagaaggaacaaataagaaggaagataagggcccatgcccaagtcatacgggccgctttacttttcaaagaggctggggaaaagcagactcatgaaacagagttaccagaaattctcccacgagattttggaattggagaggagcagctgacagtgatgactagggatcataattattctgctctgcaagaatatggaggggtcatagggctcgcaaatttactgaaaaccaacctagagaagggaattcatggcgatgaggcagatttgtcatgcagggcaaatgcttttgggcctaacagatatcctcgcaagaaaggaaggagcttttgggtttttctttgggaggcctgccaggatatgacgctagttatccttatcatagctgcagtaatttctttagtactgggcattgcaactgagggcacaaaagaaggctggtatgatggcactagtattgcatttgcagtctttcttgtgatagtcgttactgctgttagtgactacaagcagtcgctgcagttccaacacctcaatgaggagaagcaaaacatacaagtggaggttattaggggtggtagaaggatacaagtatcaatatttgatattgtagtcggtgatatcgtggctttaaaaattggtgatcaggtctcagctgatggtgttgtaatcagtggtcattctcttgccattgatgagtctagtatgactggggaaagcaagattgttatgaaagatcagaagtcaccctttttaatggctggatcaaaagttgctgatggttatggcaccatgttggtaacggctgttggccttaacaccgaatggggtttattaatggccagcatttcagaagacaacaatgaagaaactcctctgcaggtgcggttgaatggagtagcaacattcataggtattgcaggcctttctgttgctgctatggtcctcgtagtcctctttgcaagatattttacaggacatactacagattcagatggctctgttcaatttgttaagaggcacactagtgtgaaatctgcaatatttggttcaataaagatactaactgttgcggtaactattgttgtcgtcgctgtacctgagggcttaccactggctgtcacactaactctggcttattccatgcgaaaaatgatggccgacaaagcactggttcggaggctttctgcctgtgaaacaatgggttcagcgacaactatttgtagtgacaagactggtacattaacattaaaccagatgactgttatgcaatcgattgtcggtgaagtaaagctgcaacctcctgctaatgttgataaactgtcatctactgtagcctcacttctacttgaaggaattgcacagaatacttcaggcagtgtgtttgaggcacaggatggtagcgtcgaggtaactggttcaccaacagaaaaggctatcctatcttggggtcttgatcttcgtatgaaatttgctgaggagagatcacgatcttctataattcatgtctctcctttcaactccgaaaaaaagcgcgctggggttgcagtggttgcgagagattcaaatgttcatgtacactggaaaggagctgctgaaattgttcttgccttgtgcacaagttggctcaatgtggatggctcaacacatgaaatgacacctgataaggaccctgtagaagagcaacaacaaggcacacatatagaagactataacttcacctagagccttcatccgtttaattattgttcttgggtcgttctttaagctactccataatgttacattcagtcataaaaacatgtcgttttgga

SEQ ID NO: 54118 - DNA, 2191 bp, Zea Mays
gcgccagcgcgtggttcctgggcgggcgggccccgtctccctctccggcttcctttctccgtttctcgctcgcctcttctctctcccggcgtccgcgcccgccgaaacactctcgaaaggaaaccgatctgtcacccaaaccgcgcctccccgcggtgatctcgactcgagcgcgtttaaagcaccgcatcaaaaggaaaagagaagcgcgcgagcgagcgaggatccgggagcgtgaagcgcgaaaaaaaagcaggggagggagcgagcgaggaagcaacgcggaaacgggaaagcgagcgagacaagcgcccgatttggtcccccgcccgcttcgtttcctccgccgcacgtcttctcccccactaccactaggccactaccccacctcccctccagtcccctcgccttcccgccacgccacccgccgcgtcgccggagccctgtagctttcaccgcgcgcgcgtccgtccgtccgtcggcccgcccgcccgccccgagatcggggaggggcgcggtgtcatctctcctgagcaagcggcgcggcgatggcaggggggcaggcgcccgaggcgtcgcccgggcggtaccagcggcggcgcgacgagatcgacgacgacgactgcgccgacgtgctgggcatcgacgtgcgtgggcccgacgctgacccattcgacatccccgccaagcgcgcccccgtcgagcggctgcggcgctggaggcaagctgcacttgtcctgaatgcttctcgacgattcagatacacccttgacctaaaaaaggaggaggagaaggaacaaataagaaggaagataagggcccatgcccaagtcatacgggccgctttacttttcaaagaggctggggaaaagcagactcatgaaacagagttaccagaaattctcccacgagattttggaattggagaggagcagctgacagtgatgactagggatcataattattctgctctgcaagaatatggaggggtcatagggctcgcaaatttactgaaaaccaacctagagaagggaattcatggcgatgaggcagatttgtcatgcagggcaaatgcttttgggcctaacagatatcctcgcaagaaaggaaggagcttttgggtttttctttgggaggcctgccaggatatgacgctagttatccttatcatagctgcagtaatttctttagtactgggcattgcaactgagggcacaaaagaaggctggtatgatggcactagtattgcatttgcagtctttcttgtgatagtcgttactgctgttagtgactacaagcagtcgctgcagttccaacacctcaatgaggagaagcaaaacatacaagtggaggttattaggggtggtagaaggatacaagtatcaatatttgatattgtagtcggtgatatcgtggctttaaaaattggtgatcaggtctcagctgatggtgttgtaatcagtggtcattctcttgccattgatgagtctagtatgactggggaaagcaagattgttatgaaagatcagaagtcaccctttttaatggctggatcaaaagttgctgatggttatggcaccatgttggtgagtgattgtattctgcctccttactccttgcttgttttttgttttgttctggaaactacatgttttttgaagaaaaagaagctaggctcagtttatattgtataagtgtatgtttacccactcctgagaatatttctagtgggttacttgtgttaagaactaacaccattgactattataccttaacaacttgcaattataaagggtatcctattgttagagtggacgcactaaccagttcaacccaaaagcttaagctgttgggagaaggtagacaattcacttatacacttcaacaccctactcacgtgcatccagagagaaaggcgcaaacgtggaaacatagttgttaaggcagtaaggtgaggtaagctggccgatccccttttacctttttagcggtaaggagtaaagcgaggcgacgccttactaatatataaatatgtagggataatagtaccaaataggagtacaagtttaacataaaccaacataatagacttaaaatccaacgtaactaatagacagtagaagattaggaaaaaataaatacataactaatagatttactggtttaatagagacgtaaaaagaaaaataaa

SEQ ID NO: 54119 - DNA, 351 bp, Zea Mays
ccagttagcagccgtccaaggaggaggagatccaatcggcgtgcgggcgtccgcggtccatccatcgatccaattccaatctgcagggaaaggaatattgtagaacacgttaacaaaattgctccaaggttccaggagggaatcaaggccttcttaggcagcccaattgttggggaggtgcacatctaaatgagaaaattcttacttttacatacttcagaggatcctttcttcttgtttatactgatacattggttgctcctccatacagatacgcggtctgggactgatacttggaactgaatttgtcgacaacaaatctccaaatgatccatttccagctgaatgggg

SEQ ID NO: 54120 - DNA, 2060 bp, Zea Mays
gtctgcttgactctgctccagcctcaggccggccttcgcctctaaaagtttcattacatacccagcttgtagctgtatgctgcaaccctagtctgcgttgtcttctcaaaccttaacgtaattcgtaggagcatcattatttatagaatacgatctactttatagctgatgacaatgtctgcttctactgctgcaattcgtactgcgaatacaaatggaaaccatgcagtaagttcggattcacattctagccaagatgctaggcagcgaacagctggtattacaaaaagaaaagcattgccttcgattcttcaaaaaattcctagcaatgatctgagtcatactatccgaggagaatcagttcttcaaaagtcaaattattcttctgaaggaagaaaagatgtggttgcttcagcaactgctgaacgccaaaacaaaaacactacaaatgtggttgcttcagcagctgctgtacgccaaaagaaaagccctactaaacaagaaaacgccaactgggtaactgccttaagtgtgctggtgaagctgtgtcttcttatttcagctactgcttggatggggcaggtgttctggagatggcaaagtggtgaattatcatttacaacactggatatggagaacaggctatccagggtggaagggttcaagaagacagccaagatgcttcagctacagttggatgttttggataaaaagctagaaaatgagattgacaaagcaaaaggggtcattgctaagcaatttgaggataagggtaataagatagagaaaaagatgaagattttggaagacaaaactgacaagttggacaagtcactggctgagcttagtgacatgggatttctttctaaaaatgagtttgaggagattttgagccagttgaagaaaaagaagggattcggtggtacagatgatgaaataagcttggatgatataaggctatatgccaaagatgtggttgagatggagatagcaaggcattccgcagatggccttggtatggtggattatgcattgggatctggtggtgctaaagtggtaagtcactcagagcctttcatgaatggcaagaactatttacctggtcgcagcaatgtgcacacaacagcccaaaagatgctggagccaagttttgggcagccaggagagtgttttgcagtgaaaggaagtagtgggtttgtgaaggtgaagctaagaacagcaataattcctgaagccgtcactctagaacatgttgacaagagtgtggcctatgatagatcaagtgctccaaaggatttccaggtccgtggatggtaccaaggaccacatgatgattcagaaaaggattcaaatgtgatgtctactttaggagagttctcttatgaccttgacaagagcaatgctcagaccttccaactagagagaaccgctcaatcacgtgttgtcaacatggttcagcttgatatctcctcaaaccatgggaacttggaacttacatgcatctatcgcttcagggtgcatggcagaaagcccgtctcccccagcactggaggatgaagccctgagctgtgacatgcgtgccaaagcgcgacaacattcttgcagcatttctgcctataggagctttggttcagcggttagcggttagtcggagcatttcagccagcgccgctgcaccagtgttgataatgttgattctattctcgcacattgttgtgaacagctcggaaataccttgcgaggtttccttaagctgttcctagtttggcatcaagttcgcctgttttctctgctcctcctcccctcctgttaagactgcagcttagtattccgtttgaaattggtcgtctcatttcaccaggactcgctcttaaaaagaagactttgccattatatggcctactcagctagggaggaaaagaaggggaatgctggggccaactgccaagctagttatgcacttatatctaatctattgatttgaatatgagagcatgccaagctagttatgcacttatatctaatctattgatttgaatatgagagcacgcaagttcttc

SEQ ID NO: 54121 - DNA, 2191 bp, Zea Mays
tcttccacttcccgaatcccgatccatccgcatagcactgagggcggcggccgcttcctctcctccgcggccgaggtcgctcccccgcccgccgcctcttgcccgcggccgatctcttccctccgctcgcagcgtcgcagcccgtaacgagaccgcgctcggttgagcaccacctggggcccagcgccccagcgtcctcgtgaccacctcggcgcggcatccgccctctgcagccccggtgtctccgcgaccggctccggagcatcattatttatagaatacgatctactttatagctgatgacaatgtctgcttctactgctgcaattcgtactgcgaatacaaatggaaaccatgcagtaagttcggattcacattctagccaagatgctaggcagcgaacagctggtattacaaaaagaaaagcattgccttcgattcttcaaaaaattcctagcaatgatctgagtcatactatccgaggagaatcagttcttcaaaagtcaaattattcttctgaaggaagaaaagatgtggttgcttcagcaactgctgaacgccaaaacaaaaacactacaaatgtggttgcttcagcagctgctgtacgccaaaagaaaagccctactaaacaagaaaacgccaactgggtaactgccttaagtgtgctggtgaagctgtgtcttcttatttcagctactgcttggatggggcaggtgttctggagatggcaaagtggtgaattatcatttacaacactggatatggagaacaggctatccagggtggaagggttcaagaagacagccaagatgcttcagctacagttggatgttttggataaaaagctagaaaatgagattgacaaagcaaaaggggtcattgctaagcaatttgaggataagggtaataagatagagaaaaagatgaagattttggaagacaaaactgacaagttggacaagtcactggctgagcttagtgacatgggatttctttctaaaaatgagtttgaggagattttgagccagttgaagaaaaagaagggattcggtggtacagatgatgaaataagcttggatgatataaggctatatgccaaagatgtggttgagatggagatagcaaggcattccgcagatggccttggtatggtggattatgcattgggatctggtggtgctaaagtggtaagtcactcagagcctttcatgaatggcaagaactatttacctggtcgcagcaatgtgcacacaacagcccaaaagatgctggagccaagttttgggcagccaggagagtgttttgcagtgaaaggaagtagtgggtttgtgaaggtgaagctaagaacagcaataattcctgaagccgtcactctagaacatgttgacaagagtgtggcctatgatagatcaagtgctccaaaggatttccaggtccgtggatggtaccaaggaccacatgatgattcagaaaaggattcaaatgtgatgtctactttaggagagttctcttatgaccttgacaagagcaatgctcagaccttccaactagagagaaccgctcaatcacgtgttgtcaacatggttcagcttgatatctcctcaaaccatgggaacttggaacttacatgcatctatcgcttcagggtgcatggcagaaagcccgtctcccccagcactggaggatgaagccctgagctgtgacatgcgtgccaaagcgcgacaacattcttgcagcatttctgcctataggagctttggttcagcggttagcggttagtcggagcatttcagccagcgccgctgcaccagtgttgataatgttgattctattctcgcacattgttgtgaacagctcggaaataccttgcgaggtttccttaagctgttcctagtttggcatcaagttcgcctgttttctctgctcctcctcccctcctgttaagactgcagcttagtattccgtttgaaattggtcgtctcatttcaccaggactcgctcttaaaaagaagactttgccattatatggcctactcagctagggaggaaaagaaggggaatgctggggccaactgccaagctagttatgcacttatatctaatctattgatttgaatatgagagcatgccaagctagttatgcacttatatctaatctattgatttgaatatgagagcacgcaagttcttc

SEQ ID NO: 54122 - DNA, 2120 bp, Zea Mays
atggaaacaagaggtcacaaagatatatacgaacagacatttggacggattcagaactcaatggctggtccagcaccatactcgcaggacagtcatggaaatatgcagatgcaattgtttttaacacttgctgtcaatcctagttcgctgtatgcttcggaaagcaatcccacgcgcaaccggcaaccgcctcggagtcggaggatcatctcggtcgctcgtctggagaattcaaaattttccccacttcgtcaccagcaacgcaaccgaaagtccgcaacaccgcactctccctcggcagttggcagtcggcagcggcactcgtctccgcgcttccactcgccaatgaaagcctccgcagccgcggcctctccgccgcctcctcctcctcgtgggtggctctccggcctcgtctccggcgccggccgcctcctcgccgccattctcgacccggaatcctccgcctccgacacaacgtcctcctccccagagtcgtcgcagtcaccaccgcgccgcgatcaggcaactgccggtcatggtattgggaagtgctttccttctgacagccatcagttaaatttgagtggcaaggagattgttttgaaagattccggtgaaggttcacttgcaattgtctcagaggtacatccaaaggatgctgtaaagcagttgcttatgcaggaaacctactcatggtcggagtgtgatgcattaataaagataattcaagagcgagttgtggactcagacgatgaacctgctgctattcttccaattgcttggcatgctaacacacagctacatcctgttgcacactcttcaaacccgaacaccaccgctgtccctgcagtttctaatcctgcttgtcgtctagagtttgacaacattgttgagaaagaatggctgaagaaaagttcagctgttgctgaaaatcgttgcaccaatagccatgaccaaattcagcatgctatgaaaagaagttactctaacacaggggatactattgaagagtctcgaagaatcaggccaaagcgaaacagatcaaattctcttaggaatcagggaggtatcaatgttcaaggaatcgctaattaagtgacattggggattatcttctttgaccagcttcaaattgatttttctgtttcttatgacaactgcagcttcgtccaaagaggccgccaccaatgctagtagtgcacgaagggaatttccagaaggtttcaggacactatttaaagataatcctcttcttgggactaataacctgacattttcggacttggtttcaaagggtctgttcgatgatgaaccttctgtagctgctgctgctgaacacttcacttcaacctcttgtcaagctgactgggacaaacgtggatctggcatgtcatatccgtattctagtcagaatcagatggagatgtctcgtgtcaaggcagaacttatcgatgaacctgtcgctcttgagactgacatgacaaatatggtgcaaaagaatgataaactcatagtgcgcaatggctcttgttctgtcccaaacaaaactgtgtttcaaggtgacattgaggctgcaccgagacagaaaagagctccagaaattgcacgaggggattcaacttgcagaacattccgacgaagagaaggtcacctgccagcagaaatcttccctcaaacaacgggaatgggaagacggtgagatcatggaatgggcctccacggcaaagcaattcggcggcgggacaggaatcggagatggggcgcgttaaggcgaagaggccagttggaaggccgaggaaagtgcggaggtctcaaaaggcgaacgatacaattgtaatgggcacccgagattacagctaacatcaggtaattgttgatgccgtatatatttaggtccataaaaaagaaaaccgaaatgttctgtgtagtaaggagcacagttggaacttgaacttgcagtgagtgtatgctgtgttgggttcgcacgtgttgccccacccttggtggtgtgattcatccgattactgtttgctcttcaatttcatattcaattctcagggaacattgatacaaatcgtaccactatgtatcagtctacctccatcagagcagattctcag

SEQ ID NO: 54123 - DNA, 1978 bp, Zea Mays
ccaaggggaaatggaaacaagaggtcacaaagatatatacgaacagacatttggacggattcagaactcaatggctggtccagcaccatactcgcaggacagtcatggaaatatgcagatgcaattgtttttaacacttgctgtcaatcctagttcgctgtatgcttcggaaagcaatcccacgcgcaaccggcaaccgcctcggagtcggaggatcatctcggtcgctcgtctggagaattcaaaattttccccacttcgtcaccagcaacgcaaccgaaagtccgcaacaccgcactctccctcggcagttggcagtcggcagcggcactcgtctccgcgcttccactcgccaatgaaagcctccgcagccgcggcctctccgccgcctcctcctcctcgtgggtggctctccggcctcgtctccggcgccggccgcctcctcgccgccattctcgacccggaatcctccgcctccgacacaacgtcctcctccccagagtcgtcgcagtcaccaccgcgccgcgatcaggcaactgccggtcatggtattgggaagtgctttccttctgacagccatcagttaaatttgagtggcaaggagattgttttgaaagattccggtgaaggttcacttgcaattgtctcagaggtacatccaaaggatgctgtaaagcagttgcttatgcaggaaacctactcatggtcggagtgtgatgcattaataaagataattcaagagcgagttgtggactcagacgatgaacctgctgctattcttccaattgcttggcatgctaacacacagctacatcctgttgcacactcttcaaacccgaacaccaccgctgtccctgcagtttctaatcctgcttgtcgtctagagtttgacaacattgttgagaaagaatggctgaagaaaagttcagctgttgctgaaaatcgttgcaccaatagccatgaccaaattcagcatgctatgaaaagaagttactctaacacaggggatactattgaagagtctcgaagaatcaggccaaagcgaaacagatcaaattctcttaggaatcagggagcttcgtccaaagaggccgccaccaatgctagtagtgcacgaagggaatttccagaagggtctgttcgatgatgaaccttctgtagctgctgctgctgaacacttcacttcaacctcttgtcaagctgactgggacaaacgtggatctggcatgtcatatccgtattctagtcagaatcagatggagatgtctcgtgtcaaggcagaacttatcgatgaacctgtcgctcttgagactgacatgacaaatatggtgcaaaagaatgataaactcatagtgcgcaatggctcttgttctgtcccaaacaaaactgtgtttcaaggtgacattgaggctgcaccgagctcaccaatgggcttgcagacagaaaagagctccagaaattgcacgaggggattcaacttgcagaacattccgacgaagagaaggtcacctgccagcagaaatcttccctcaaacaacgggaatgggaagacggtgagatcatggaatgggcctccacggcaaagcaattcggcggcgggacaggaatcggagatggggcgcgttaaggcgaagaggccagttggaaggccgaggaaagtgcggaggtctcaaaaggcgaacgatacaattgtaatgggcacccgagattacagctaacatcaggtaattgttgatgccgtatatatttaggtccataaaaaagaaaaccgaaatgttctgtgtagtaaggagcacagttggaacttgaacttgcagtgagtgtatgctgtgttgggttcgcacgtgttgccccacccttggtggtgtgattcatccgattactgtttgctcttcaatttcatattcaattctcagggaacattgatacaaatcgtaccactatgtatcagtctacctccatcagagcagattctcag

SEQ ID NO: 54124 - DNA, 907 bp, Zea Mays
gggatctgttagtggcggcctggcctggtccaagttccaccatggttacctgaacgaccccgagtcgacgaagaacaccatcgacaaggacggctggctgcacaccggagacatcggctacgtggacgacgacgacgagatcttcatcgtcgacaggctcaaggagatcatcaagtacaagggcttccaggtgccgccggcggagctggaggcgctcctcatcacgcacccggagatcaaggacgccgccgtcgtatcaatgaacgatgaccttgctggtgaaatcccggtcgccttcatcgtgcggaccgaaggttctcaagtcaccgaggatgagatcaagcaattcgtcgccaaggaggtggttttctacaagaagatccacaaggtcttcttcaccgaatccatccccaagaacccgtcgggcaagatcctgaggaaggacttgagagccaggctcgccgccggtgttcactgaggcccgtatgcagcttcttctcggacggccaccacgctgctgcgaaaaaaaaggcgatgtaatggcggtaacactactattcatgaactggcaacagaagggacacgtattcctgtggaacacatgttgccagaaagaggttttagtttgtctgtttgttggccctgtgtgtaatgttcataaacgatatagacgtcgtctctatgttgtttttgacccaaagaacaagcctgattacggcaatacagctacggagtaccgtgtttcatatgcctagatgtttgtcataagttattatagccggagatggcgatgggcctcgatctctccttcactaggactagtttggcaacgaggagagaaaaatcccttgaaaattaatctaggaggggattttagatgccaccttatttcccccctcttcggtgt

SEQ ID NO: 54125 - DNA, 1031 bp, Zea Mays
atcactttcacatgccattagcgccaccagccaaccaagctgcgggcacgccacgcctctgacgccgtcctggcgcttgaggcgacctcggcgcactgccacgtgggccaatgtggtgctcgtgcgcgcgtgcaccgccacgcggggccccgcgtggcttgggtacaggttacctgaacgaccccgagtcgacgaagaacaccatcgacaaggacggctggctgcacaccggagacatcggctacgtggacgacgacgacgagatcttcatcgtcgacaggctcaaggagatcatcaagtacaagggcttccaggtgccgccggcggagctggaggcgctcctcatcacgcacccggagatcaaggacgccgccgtcgtatcaatgaacgatgaccttgctggtgaaatcccggtcgccttcatcgtgcggaccgaaggttctcaagtcaccgaggatgagatcaagcaattcgtcgccaaggaggtggttttctacaagaagatccacaaggtcttcttcaccgaatccatccccaagaacccgtcgggcaagatcctgaggaaggacttgagagccaggctcgccgccggtgttcactgaggcccgtatgcagcttcttctcggacggccaccacgctgctgcgaaaaaaaaggcgatgtaatggcggtaacactactattcatgaactggcaacagaagggacacgtattcctgtggaacacatgttgccagaaagaggttttagtttgtctgtttgttggccctgtgtgtaatgttcataaacgatatagacgtcgtctctatgttgtttttgacccaaagaacaagcctgattacggcaatacagctacggagtaccgtgtttcatatgcctagatgtttgtcataagttattatagccggagatggcgatgggcctcgatctctccttcactaggactagtttggcaacgaggagagaaaaatcccttgaaaattaatctaggaggggattttagatgccaccttatttcccccctcttcggtgt

SEQ ID NO: 54126 - DNA, 513 bp, Zea Mays
gtcgtgctcgtgcatgcacgcgctgctggtggccctgcaacctgctggtggtcagagcggcacgtgccagttttgtagacgtcgctggctcactcactcgtgcagttgcaactgcatcgggtgcggacgtgcggtggatgcgcgtacatggtgttcgcgacgacggtggcggcgctgcaggcgtgcttcgtggggctgctcggcgtcgacgccctgcagtggagcaagctctgcaacatctacacccgcttctgcgagcaggcggccgccggcatggtctgcagcctgctggccgccgccggcatggccgtcctctccgcgttctcggctcgggacctcttccgccgcccctgctccccggagtatagatgaattccagtagtacaagaaacctcaccaagatatatagccacactttctgatgtgtaagaattggcgcttgggctttgatcaagttcataagaaaaatgagaaacagatctttatggaataatactttaattgcttctaaga

SEQ ID NO: 54127 - DNA, 685 bp, Zea Mays
agagagtgcctcgcgttgcgcttgcgccgaggaaaacagaaggaagctgaagctagcggccggcctaccgcacgcaacgcaagcagagtgcagaggaggattacagatcgaggcgtacggacgtcgagcgaggagtggtacatatggcagcgggaccgccgtcgtcggtgagggcggagcgcgtcctgcgggcggcgtgcgcggccatggcggcggcgggggcgctgctgctggggttcagcgcgcagaccaagaccgtgctcttcatccagaagaaggccgtccccaaggacgtgcaggccctctgggatgcgcgtacatggtgttcgcgacgacggtggcggcgctgcaggcgtgcttcgtggggctgctcggcgtcgacgccctgcagtggagcaagctctgcaacatctacacccgcttctgcgagcaggcggccgccggcatggtctgcagcctgctggccgccgccggcatggccgtcctctccgcgttctcggctcgggacctcttccgccgcccctgctccccggagtatagatgaattccagtagtacaagaaacctcaccaagatatatagccacactttctgatgtgtaagaattggcgcttgggctttgatcaagttcataagaaaaatgagaaacagatctttatggaataatactttaattgcttctaaga

SEQ ID NO: 54128 - DNA, 1163 bp, Zea Mays
caccactttacccaaatgtgtcagagctcttatggccttctatagatgtatagggatgcagctggactttaaaactgtttgctgatgcattggtaaagaaagcatatgataactggatgtatgtcattgaatatgatggcaaaggtctattgaaccttaaaccaaagaaaaaggctgcatccactggtcaagctgagacgcatgcttctgcgggtggttcgacttcgtatcaacaacacctctcctcaacgagcatgccagggtcatcaccatcaggtggaactgattccgtagggtatggtgtcgaccaatcagcaacacatctatctcaactccagagttcatccaccaatctccagacgccatacgatgacacattttcgttcctaccacctaacctgctgacagggtctgcaaacgatgccatgggtctggaactgggccagttgcaccaagtaatttctcagggccagccaattcagccagcaaacgtgggatacgttgactggcccaggaaccgcgacagccagtacgccgacgacttcacagaggacattcgcgtgaagagccaccagatgctcgagagcgaggacatgcagcagctgctgagggtcttcagcatgggtggagcctccgggagtttgtcagacgacacgttcaacttccagccctacatgccctctcccttgcccaaccccgggttcgaaagcgagcgcagccattcatccggcaaagctgtcgtcggctggctcaagatcaaggcggcaatgaggtgggggatcttcgtcaggaagaaagctgccgagagacgggcgcagctcgtcgagctggaggattagcgtcgtcgtggctttacaacggtcaaggctgcgttgtaaattactagtagtcatctgtgcccccacataccctcttgataccccattgaaacaggtttctgaaactgttctgaaatgtacaacgagtagttctgctatcttgtacagattacagaattctccttgcttgcttgtgttagtggtgtaacatagctctgctaagtttgacacatgactggaccagcttgtgtatctttattttttcccttccctagctcttcagtgcagaatataccgttacagtgcgaattaatccagagattgtgtgtgtgttgctttttctat

SEQ ID NO: 54129 - DNA, 2312 bp, Zea Mays
aactgtgtgcgcggtcggtcgcttcccttcccttttgtccgcgatctgggctggccctcgtggcctcgtcccgtctccgattccggcgtccgaaccagattcgcccgggccttcgtgccagcgatgaaggagaagcgtgggctcgaggacgccggcgggggcgccggcgacggacgtcctgatgccaagaggtcgcggcctccggcactggccagtgttattgttgaagctttaaagatggatagtctgcagaggctctgctcatcactggaaccaattcttcgtagagtagtcagtgaagaagtggagcgcgcactgggcagacttggccctgcaacaatcgggggaaggtcttccccaaagcgaattgaaggtccagatggaagagctctgcaactccaattccggacaaggctgtcacttccccttttcaccggaggaaaagttgaaggggagcagggagctgcaattcatgttgttttgcttgatgctggcactggtggtgttgtatcatctggaccagagtcgtctgccaaacttgacattgttgttctcgaaggtgatttcaacaatgaagatgaggagggctggacaggggaagagtttgacagccatgttgtgaaagagcgcgagggaaaacggcctattttaaccggcgatctacaagtcacactaaaagaaggtgtcgggacaattggggagcttacgttcacagataactctagctggataaggagtaggaagttcaggcttggcttgaagcttgcctcaggattttgtgagggtgttcgcattcgtgaagcaaaaacggaagccttcatggttaaggaccatagaggagaatattcatttacctagtgtacaagaagcactatccacctacgctaaaagatgaggtctggaggttggaaaaaataggaaaggatggctcattccataagaggctgaacaaatctggaatatctacagttgaggatttccttaggctcgtagttcgggacccacagaaattgcgcagtatacttggaagtggtatgtccaacaaaatgtgggatgcccttgtggaacatgcaaagacttgtgtcttaagtgggaaatattacatatactattctgatgagagcagaagtattggtgctattttcaacaacatctatgcattctgtgggttgatttctggcgaacagttctattcatccgagagtcttgatgatagccaaaagctgtttgctgatgcattggtaaagaaagcatatgataactggatgtatgtcattgaatatgatggcaaaggtctattgaaccttaaaccaaagaaaaaggctgcatccactggtcaagctgagacgcatgcttctgcgggtggttcgacttcgtatcaacaacacctctcctcaacgagcatgccagggtcatcaccatcaggtggaactgattccgtagggtatggtgtcgaccaatcagcaacacatctatctcaactccagagttcatccaccaatctccagacgccatacgatgacacattttcgttcctaccacctaacctgctgacagggtctgcaaacgatgccatgggtctggaactgggccagttgcaccaagtaatttctcagggccagccaattcagccagcaaacgtgggatacgttgactggcccaggaaccgcgacagccagtacgccgacgacttcacagaggacattcgcgtgaagagccaccagatgctcgagagcgaggacatgcagcagctgctgagggtcttcagcatgggtggagcctccgggagtttgtcagacgacacgttcaacttccagccctacatgccctctcccttgcccaaccccgggttcgaaagcgagcgcagccattcatccggcaaagctgtcgtcggctggctcaagatcaaggcggcaatgaggtgggggatcttcgtcaggaagaaagctgccgagagacgggcgcagctcgtcgagctggaggattagcgtcgtcgtggctttacaacggtcaaggctgcgttgtaaattactagtagtcatctgtgcccccacataccctcttgataccccattgaaacaggtttctgaaactgttctgaaatgtacaacgagtagttctgctatcttgtacagattacagaattctccttgcttgcttgtgttagtggtgtaacatagctctgctaagtttgacacatgactggaccagcttgtgtatctttattttttcccttccctagctcttcagtgcagaatataccgttacagtgcgaattaatccagagattgtgtgtgtgttgctttttctat

SEQ ID NO: 54130 - DNA, 2387 bp, Zea Mays
cagtgatcgatttgcgatggacgagtcgatggccgggtgcgaagtgtcgggcagtaatgtatactatagtatataggttcatttcccctaccacacatcgaactgtgtgcgcggtcggtcgcttcccttcccttttgtccgcgatctgggctggccctcgtggcctcgtcccgtctccgattccggcgtccgaaccagattcgcccgggccttcgtgccagcgatgaaggagaagcgtgggctcgaggacgccggcgggggcgccggcgacggacgtcctgatgccaagaggtcgcggcctccggcactggccagtgttattgttgaagctttaaagatggatagtctgcagaggctctgctcatcactggaaccaattcttcgtagagtagtcagtgaagaagtggagcgcgcactgggcagacttggccctgcaacaatcgggggaaggtcttccccaaagcgaattgaaggtccagatggaagagctctgcaactccaattccggacaaggctgtcacttccccttttcaccggaggaaaagttgaaggggagcagggagctgcaattcatgttgttttgcttgatgctggcactggtggtgttgtatcatctggaccagagtcgtctgccaaacttgacattgttgttctcgaaggtgatttcaacaatgaagatgaggagggctggacaggggaagagtttgacagccatgttgtgaaagagcgcgagggaaaacggcctattttaaccggcgatctacaagtcacactaaaagaaggtgtcgggacaattggggagcttacgttcacagataactctagctggataaggagtaggaagttcaggcttggcttgaagcttgcctcaggattttgtgagggtgttcgcattcgtgaagcaaaaacggaagccttcatggttaaggaccatagaggagaattgtacaagaagcactatccacctacgctaaaagatgaggtctggaggttggaaaaaataggaaaggatggctcattccataagaggctgaacaaatctggaatatctacagttgaggatttccttaggctcgtagttcgggacccacagaaattgcgcagttggtatgtccaacaaaatgtgggatgcccttgtggaacatgcaaagacttgtgtcttaagtgggaaatattacatatactattctgatgagagcagaagtattggtgctattttcaacaacatctatgcattctgtgggttgatttctggcgaacagttctattcatccgagagtcttgatgatagccaaaagctgtttgctgatgcattggtaaagaaagcatatgataactggatgtatgtcattgaatatgatggcaaaggtctattgaaccttaaaccaaagaaaaaggctgcatccactggtcaagctgagacgcatgcttctgcgggtggttcgacttcgtatcaacaacacctctcctcaacgagcatgccagggtcatcaccatcaggtggaactgattccgtagggtatggtgtcgaccaatcagcaacacatctatctcaactccagagttcatccaccaatctccagacgccatacgatgacacattttcgttcctaccacctaacctgctgacagggtctgcaaacgatgccatgggtctggaactgggccagttgcaccaagtaatttctcagggccagccaattcagccagcaaacgtgggatacgttgactggcccaggaaccgcgacagccagtacgccgacgacttcacagaggacattcgcgtgaagagccaccagatgctcgagagcgaggacatgcagcagctgctgagggtcttcagcatgggtggagcctccgggagtttgtcagacgacacgttcaacttccagccctacatgccctctcccttgcccaaccccgggttcgaaagcgagcgcagccattcatccggcaaagctgtcgtcggctggctcaagatcaaggcggcaatgaggtgggggatcttcgtcaggaagaaagctgccgagagacgggcgcagctcgtcgagctggaggattagcgtcgtcgtggctttacaacggtcaaggctgcgttgtaaattactagtagtcatctgtgcccccacataccctcttgataccccattgaaacaggtttctgaaactgttctgaaatgtacaacgagtagttctgctatcttgtacagattacagaattctccttgcttgcttgtgttagtggtgtaacatagctctgctaagtttgacacatgactggaccagcttgtgtatctttattttttcccttccctagctcttcagtgcagaatataccgttacagtgcgaattaatccagagattgtgtgtgtgttgctttttctat

SEQ ID NO: 54131 - DNA, 1185 bp, Zea Mays
atgtggcgtgggcggtgtgccccggggatcggcgtggcggcgctggccctgctcgccgtcgcggctgccgcaggagccgccgcggggatcccgatcccgacgacctcgagcgcgcgtaagtgtctccgctctgcgacgccggcggaagcaagggaggccctggatgcctggacttcgacttctcgtctcgctactcgtaaccttcggtcgctgcgatgtcgtctgcccatgagcacagacctgccacccaaagttctgaccctccctgcccacgtcgcagcgggggaggcagttgcagctttcgcggggatatggggcttgcgcagagcgggaggcgggggcatagaaaatggtctacactattgtcttaatagttagtagagattgcattcgttgggaggacaatagaaagcatcaaactccagaaacacagaacatcagtggattgaacaatgaacacaaaacttggtcatctcactaatccataaattccaaaaattgggaatgcaaggtgattcagggaacattatgcaaaactagcactgtaccatatcaaatataaaatttccactgtgccaactgcacaaaggagcatccaaaccatggtttgcaatagaaggtaacatgtgtcagttgttaaatataccatatttaccacatgcaaaaatatatctgaaaattatgcaggatgcacagatacaagcacaccatatatttccattgtctatctctatcagcagaattcagaccttcatattctttaatcaaaccccgaatgatctaaaaggcacccagactagccagtcactgtgtttcacatagttaacaaatgggttattctctgttttttgtttatgagcattgatagcagcaaaaacatagtgaatgtagaaagcatgaacaggctagcataactccaaccaggatctacactgtgtgactatatgtcaattgcattaccgcacagcaacagtgaataggaaacgtcaggaatgattctacaatctacatgcaaacaaatgcagtccgaacaaattatcaactgccctctcatttttttaaacaaaacactgttcttgccacagttaaatgatgccatatagatggagagaattgcatatttgggactctaaatatcgcgcttcgcacaaatgccattcgaaagattgtattcgtaaaaaaggg

SEQ ID NO: 54132 - DNA, 1805 bp, Zea Mays
atttaaatcctccctccaaatcacccaccaataaacaacaaatcgtccactagtcactggtaactggtcactcactgctcaccactcaccagtccgtccggcgtccacaccacacccccgccccgcgtctccggcttgccaacagacagagcgcctgcacggctgcactgcaccgcgcgctactgcagcctcgtctcgtcaggccacgcccgctcggggatggcgaccgtcccaaaccccaagacgaccagggccaggagggagccggcgctgcgtccccgaagcaacaacgtcgcggcggctccggctccggctccggccgtggcgagcgtcaggcgcgggccggcggcatccgccgagaaggagaaccagccgcccaagagcctcggccacgggaaggcggcggctgcggcgacggccgccgagccgccgaagcccgcggagccggcgccggttgtagcgccacctccgccgccgctgaggccgtcgtcgctgcagctccgcatgaaggacgaggcggcggcggcggcgctgcccgcgttcgtcgtcgggcccaggggcagggagctgctcccgccgccgtcctccaactacgaggcgtgggacctctccgacagcgagtccgcgccggcctcctcctgggccacgctccccaacagggcgctgctgtgccggcctctgcctcaggacgtcggacggtgcacgtgcgtcatcgccagggaggcggccaccggcgccagaggcgtcgcgctctactccctctataccaatgaggggcaggggcggcaggaccgcaagctggcggtggcgcggcaccggaggaggaggggcaggtccgagttcgtcgtggcgcagaaccaggacggcatcttctgcaccgccgacaccagcttcctcggcgcggtgcgcgccaacctggtcggatccaagtaccgaatctggggccaggtttgcccccaccatcaccacgctcaccgggagtttcaggagcttgagggcatggatccccaagaaccagtccatgcagctcaaggcaaacagttctgctcagatccagcatgtcagtgggctcccaaaggattggcaggagaagaagagcagagctgaccagttgtgctcaagagccccgttctacaaccatatgacaaagcgctacgaactggacttcagagaaagggcaggaaggatggggtacaaggtgcaaacatcggtcaagaattttcagatgactttggaggaaaatgggaggcagacggtgttgcagcttggtagggttggcaaatccaagtacataatggactttagatacccgctgaccggctaccaagcgttctgcatctgcctggcatcgatcgacgcgaagttgtgctgcaccctgtgaaatagggagccgttcgaggaagaagtgtttgtttgttatgctgcactctgtacttgcagcttctccccttgagaaggcaattgaataatagaccatgctataatgtgcgattatccttttgcaacttctgttgcttaatcggtcaagcagtatttaccatacttgaggacagcgtgtcgcaaacacatcgtcagtttgtaatcccccttttacactgacgaaagcaccgatgggaaggcacacctgtagcatttctatactgaatgtaaggcaacatgtaacattgcacagataaaccaattcaaatgactgtcagctccatatcaactctgagtagtccactcggaacttccaatcttggtcaatgtggctcagatgttgacgaaaggctgccaaggttcaaaagaaagatagtttacaagaa

SEQ ID NO: 54133 - DNA, 4246 bp, Zea Mays
ggccgccagacggtagtttggtccacttttctattcagccccctcatctcttcgtctctccacccatgttaatgatactgctcgtcgtcaatctcccctctcacacggagcagtagaaaaatcccatccatcccggtttcttattcagcctagtcccttcggagaccgaatcaaacccattcgtgatcggtggattgcttcccgcctctcggaggtcggttccatctgttaatcaacaaatcccaaacttctcgcccgacaaatccgtgcgggcttggtgaagcggggtaaattggtccagtagacgtcggtccaacgaagtccccgtccctcgccggaattccaggccgttcttgttggggcagttgaggatttggtgcgtctgatcggaggcgtgggggagataaggcctcggcggacgttggctcgtgctctttttcgacgggcggaggctatcccgtcggagaggttaaagagttcggtgtttcgtgtttggtggtacggtagaactgtagattaatctgtactgtgtgaagaaaaagaagaagaagattcggttttggagtggaattgtgggctgtagtcgaatcgcgaggaagatgagttccgggtcggcggtgacaggcggtggtgcggaggaggcggcggcggtgccgctggggcagaagttgatggtgcacgtggcggagaacggccacaccttggagttccagtgcggcggcgacacgcttgtcgaggccatccagcactccatccaccacctctgtgtcataccgcccagcgaccagctcctcctctgcggcaacacctccctcgacggcgccaacgcgctagcctactacaagcttccgcgtgacgaccgtgaggtcttcctctacaacaaggcccgcctccttgcggactcccgccccccggcgccggagtccatctacatccctgagccaaatattccaccaccaccgccccggccgcaggactcatcacctgtgggcgcatctgcagacccggctctgaaggctctggtatcttatgaaacaagattcagataccacttccaggtcgccaatgcggtgtaccaatctagcttggcaaaatttgagctgtgcaggcggcttctgcgggaggggcaggtgcaggagcgagcgctggacacagcacggagcaacctagagcacacgttccggaagctctcacagcggtactcagaattcctgcggtgcttcacgcagcagcaccgttcacatgttgagatgctggccaatttcgagagagatgtgcagaagctgcgtgctgttaggctgcacccagcgctgcaaagcgaggggaggcattgcttgatggaccttctcaaggagaatgacctgaggaaactggctgacggatgcttgagctcacataagaagtttgaggtcaaggtgtcacagctgaaggcaaacttcttggagctgaagaagagggtggaaggcttattcaatgccatgaactcaggtgggtgcaaggatgttgagaagcttataaaggagcatcagggagtcattggtgaccagaagatcatcatgcaggctctaagtaaagatgtggacacctcaaagaagcttgtcgatgactgctcaagttgccagctatctgcttctctccgtcctcatgatgcagtctcagccgttggccgtatctatgaaatacatgaaaatgataacttgcccagcatacagaattttgatcacagtctaacaaaattgcttgagaaatgcaaggacaagaagaatgaaatgaatactttggtccatgtttgcatgcaaagagtaaaatcttctcagattagcatcaaaggcatgatgagtgagctcattgcgttccaagaggtgatgggtcatcaagaagattttgataatctgaaaatagtcagtggcttgggttatgcatatagagcttgtgttgccgaggtagccaggaggaaatcatattttaagctgtatactggatttgctggaaaacatgccgaaaagttggcaatcgagtgtcaaaacgagaaaacaagacgagaggatttccataggacatggagcaggtacattccagatggtgtcatgtgttccatggggctctttgattctccaagccagtgtgatgtaaaagtcgctccttttgattgtgatcttcttcccattgatgttgatgatgtggaaaagcttgctccccagtctatactggggtcttttctgaaatctgagagatcacagatagcaaagcctttgctaagcaattctagtatcagtggaaatttgaacaaatctgagcaaaattctctgagcgctgacgataagatggatttccaagattttctggggggctatgatactattgacattgcaggaactagtaagttagaagtggaaaatgccaggttaaaagcagaacttgcttctgcaattgcagttctctgcaatatcagtgctgaatatggatacgagtctattgacgaagggcaaattgatgctgcattgaaaaaagcaagggaaaaaacagctgaggcacttgctgcaaaggatgagtttgcttaccagcttcagtcattgctcactgcaaagcaggaaaaatgcctggcatatgagaagcggatccaggatcttgaggaacgcttagccaaccagtacattaaaggtcacatggtgtcaggaagcaaagacacttctggttccctgctttcagcatttaaaagtaatgactgcaacctggatgtatctggaggaaggcaaacccaaatacgtgatgaatcaagtgtggccatggatgaggcctcttcaacatctgaacagccatctaaacaagcagaaggtggcgatgagaatatgactgacatttcaggtgcactgaacttgcagttgcttgattcagcagcatgtactaatctggatgctttcatgacagaattgccacgtgataatgaacataagattgtaaacattgataaggaagggcacatgttgacacaacttactatggctgatacttctgatgtccgtatagaagatcctcttagcatcttaaactcaagaactaatgagcatcacaccttagagttgaggaataaggagctccttgtgtcagagctgcaaagtaccctagatcaaaagtcaaagcagttgggtgaaactgaaattaaacttagcgctatgatggatgaggttaactccctgatgaaagaacttgaacaaatccggggtcttcttgatgaatctcagagaagaggcccgaacaaacaaatgctcatctgacagaagggctgttgagtatgatgctctgcggtcatctgctttgaggatacatggtttattcgaaaggctaaataattgtgtcactgcaccaggcatgactggttttgcagagtcactgcgttctctggctctttccttggcaagctctgtaaagaaggacgaagctgataccactgtacagtttcaacaatgcatcaagatcctggcagacaaagtttatttactgacacgacagagtgctgagctgctagaacgctattcagctatgcaggcggtacatggagatatcacaaaagagttggatttgaagaaagtgctgattaagaatctctacaataaacttcaacaagaaaaacaggccagcaaggagaagatatcatttggtcggtttgaagtccatgagcttgctgtcttttttcgaaactctgctgggcactacgaggcgatcaaccggaactacccaaactactttctgtctgaggaatctgtcgccttgttcaccgagcaccacctgcggtacccagcgtacataatcgggcagatcgttcacatcgagcggcacatagcgcacccaggccaaatgagaggagctccacgccctgatagcagtggcggccgtcggtcgcccgcagccatgctcaccccctacaacctacctgggggccgtgagtacttcgtggtgactgttgccatgctgcctaatgctgcccgttgaaacaaaacaccttcctgatcctgcctgacaatggtctgctgaaatgatgggggaaaactttcaactgtatatatactgaaatttattactatactctcaattctcagttgcttcctcaagttatgtttgtatatatgatcatcttcacggtgtaaaaagactcggctactgatgctaggcatctcttcgttcaagcagactgaatattctttcagctagcatcacattattgttccttcaattggatctatctttt

SEQ ID NO: 54134 - DNA, 4369 bp, Zea Mays
caataattcacgcgcacgtcaattcatgagtcttcaaggatctccccgcaaaaaatctgcaatttttttatttatacatacactacaccttcccctacgccctccgggctgcggagtccggccgccagacggtagtttggtccacttttctattcagccccctcatctcttcgtctctccacccatgttaatgatactgctcgtcgtcaatctcccctctcacacggagcagtagaaaaatcccatccatcccggtttcttattcagcctagtcccttcggagaccgaatcaaacccattcgtgatcggtggattgcttcccgcctctcggaggtcggttccatctgttaatcaacaaatcccaaacttctcgcccgacaaatccgtgcgggcttggtgaagcggggtaaattggtccagtagacgtcggtccaacgaagtccccgtccctcgccggaattccaggccgttcttgttggggcagttgaggatttggtgcgtctgatcggaggcgtgggggagataaggcctcggcggacgttggctcgtgctctttttcgacgggcggaggctatcccgtcggagaggttaaagagttcggtgtttcgtgtttggtggtacggtagaactgtagattaatctgtactgtgtgaagaaaaagaagaagaagattcggttttggagtggaattgtgggctgtagtcgaatcgcgaggaagatgagttccgggtcggcggtgacaggcggtggtgcggaggaggcggcggcggtgccgctggggcagaagttgatggtgcacgtggcggagaacggccacaccttggagttccagtgcggcggcgacacgcttgtcgaggccatccagcactccatccaccacctctgtgtcataccgcccagcgaccagctcctcctctgcggcaacacctccctcgacggcgccaacgcgctagcctactacaagcttccgcgtgacgaccgtgaggtcttcctctacaacaaggcccgcctccttgcggactcccgccccccggcgccggagtccatctacatccctgagccaaatattccaccaccaccgccccggccgcaggactcatcacctgtgggcgcatctgcagacccggctctgaaggctctggtatcttatgaaacaagattcagataccacttccaggtcgccaatgcggtgtaccaatctagcttggcaaaatttgagctgtgcaggcggcttctgcgggaggggcaggtgcaggagcgagcgctggacacagcacggagcaacctagagcacacgttccggaagctctcacagcggtactcagaattcctgcggtgcttcacgcagcagcaccgttcacatgttgagatgctggccaatttcgagagagatgtgcagaagctgcgtgctgttaggctgcacccagcgctgcaaagcgaggggaggcattgcttgatggaccttctcaaggagaatgacctgaggaaactggctgacggatgcttgagctcacataagaagtttgaggtcaaggtgtcacagctgaaggcaaacttcttggagctgaagaagagggtggaaggcttattcaatgccatgaactcaggtgggtgcaaggatgttgagaagcttataaaggagcatcagggagtcattggtgaccagaagatcatcatgcaggctctaagtaaagatgtggacacctcaaagaagcttgtcgatgactgctcaagttgccagctatctgcttctctccgtcctcatgatgcagtctcagccgttggccgtatctatgaaatacatgaaaatgataacttgcccagcatacagaattttgatcacagtctaacaaaattgcttgagaaatgcaaggacaagaagaatgaaatgaatactttggtccatgtttgcatgcaaagagtaaaatcttctcagattagcatcaaaggcatgatgagtgagctcattgcgttccaagaggtgatgggtcatcaagaagattttgataatctgaaaatagtcagtggcttgggttatgcatatagagcttgtgttgccgaggtagccaggaggaaatcatattttaagctgtatactggatttgctggaaaacatgccgaaaagttggcaatcgagtgtcaaaacgagaaaacaagacgagaggatttccataggacatggagcaggtacattccagatggtgtcatgtgttccatggggctctttgattctccaagccagtgtgatgtaaaagtcgctccttttgattgtgatcttcttcccattgatgttgatgatgtggaaaagcttgctccccagtctatactggggtcttttctgaaatctgagagatcacagatagcaaagcctttgctaagcaattctagtatcagtggaaatttgaacaaatctgagcaaaattctctgagcgctgacgataagatggatttccaagattttctggggggctatgatactattgacattgcaggaactagtaagttagaagtggaaaatgccaggttaaaagcagaacttgcttctgcaattgcagttctctgcaatatcagtgctgaatatggatacgagtctattgacgaagggcaaattgatgctgcattgaaaaaagcaagggaaaaaacagctgaggcacttgctgcaaaggatgagtttgcttaccagcttcagtcattgctcactgcaaagcaggaaaaatgcctggcatatgagaagcggatccaggatcttgaggaacgcttagccaaccagtacattaaaggtcacatggtgtcaggaagcaaagacacttctggttccctgctttcagcatttaaaagtaatgactgcaacctggatgtatctggaggaaggcaaacccaaatacgtgatgaatcaagtgtggccatggatgaggcctcttcaacatctgaacagccatctaaacaagcagaaggtggcgatgagaatatgactgacatttcaggtgcactgaacttgcagttgcttgattcagcagcatgtactaatctggatgctttcatgacagaattgccacgtgataatgaacataagattgtaaacattgataaggaagggcacatgttgacacaacttactatggctgatacttctgatgtccgtatagaagatcctcttagcatcttaaactcaagaactaatgagcatcacaccttagagttgaggaataaggagctccttgtgtcagagctgcaaagtaccctagatcaaaagtcaaagcagttgggtgaaactgaaattaaacttagcgctatgatggatgaggttaactccctgatgaaagaacttgaacaaatccggggtcttcttgatgaatctcagcaagagaagaggcccgaacaaacaaatgctcatctgacagaagggctgttgagtatgatgctctgcggtcatctgctttgaggatacatggtttattcgaaaggctaaataattgtgtcactgcaccaggcatgactggttttgcagagtcactgcgttctctggctctttccttggcaagctctgtaaagaaggacgaagctgataccactgtacagtttcaacaatgcatcaagatcctggcagacaaagtttatttactgacacgacagagtgctgagctgctagaacgctattcagctatgcaggcggtacatggagatatcacaaaagagttggatttgaagaaagtgctgattaagaatctctacaataaacttcaacaagaaaaacaggccagcaaggagaagatatcatttggtcggtttgaagtccatgagcttgctgtcttttttcgaaactctgctgggcactacgaggcgatcaaccggaactacccaaactactttctgtctgaggaatctgtcgccttgttcaccgagcaccacctgcggtacccagcgtacataatcgggcagatcgttcacatcgagcggcacatagcgcacccaggccaaatgagaggagctccacgccctgatagcagtggcggccgtcggtcgcccgcagccatgctcaccccctacaacctacctgggggccgtgagtacttcgtggtgactgttgccatgctgcctaatgctgcccgttgaaacaaaacaccttcctgatcctgcctgacaatggtctgctgaaatgatgggggaaaactttcaactgtatatatactgaaatttattactatactctcaattctcagttgcttcctcaagttatgtttgtatatatgatcatcttcacggtgtaaaaagactcggctactgatgctaggcatctcttcgttcaagcagactgaatattctttcagctagcatcacattattgttccttcaattggatctatctttt

SEQ ID NO: 54135 - DNA, 2840 bp, Zea Mays
ttgcgccgcggcagcagaacaccttcctgacccgaattcaatccgtgcgcaggcaccctccgccggcgatggctcacgcatcgctcggcgcccgccccacgtccccgaggcgacgaccggcacaacgcgccctcgcggcgctacccgacacctgcgacgaaacgcgccaagttcaggagcgcgtcgacacaggggctcgggaacacggtgtcgccatcgcggaaccctagcgagatcgtcgggaaggtccgaaggtgagcacgtgtttgtgtaacctttggctccggttcgcaatggtggacggcgatggtgacagggaacaccagcaatagccggttgtggcagctgccgccgcgtcacatagcgccgagttggaggggcacatcacgtgaatagatctgcgcagtctcgcatcatggcagtgccggcggcctcccgggcatggcgactctccccagtcgaccaggcacctcttcgtcctttgggcccgtaccctccgcttcctcgggcgtgtccgccggccatttggacgccgtcaaaccggttggccgtgtccgggtcatctccgcgcccctcctccaaatggccaaaccctaccttgttgtagctagcctacccctccagacgccattatcttcttggtcagtcctgcccactactcgtctcatcagccaatgggcatggttttgcctggtgtggttggattcaagttgagtgggaagttataggatggtgtcactactactgacattgttcttactatgacccaaatgctaaggaagcacggtgctattggcaaattcgttgaattctatggtaagaatagtagagaagcatggtttacatcgttgggagcataatttatcttattcatatatctttcaacattttttctctttagttctcttttgcatttaggtgttggtgtgggcgagctatctttgcctgctagggccacaattgccaacatgtctccagaatatggagctaccatgggcttcttccttgtagacaagtagcattggactatctcaaattgacaggccgaagcgatgaaactgtatatttcactatgtgcagactactcttttaccatacccgttccatcattctgatatgtatatatttttattaataaagcaaagttgtatatattgcattaaatgtgattcaggtgtcgatgattgaagcatacctgcgagctaacaaaatgtttgtggacaagcatgagcctgagacggaacgagttttctcttcatatctggagctggaccttagtgaggtggagccttgcgtttcaggccccaaaaggcctcatgatcgtgtccctttgaaggaaatgaagtcagactggcatgcttgcctggacaacgaagttggtttcaaggtgaagccatgggtaaagacaagccttacccctggatctgtggttgctactgagtacttgaaacatagatatcgttgctgctgcggtgctgtatcctactacctgctcaaccttggggacagcatcaccacggaccacatctcctactcggggaagatccccgagggcacacctgcggccaagtatctgctcgagtatggcgtggagcccaagaacttcagctcctatggtggccgccgcgggaacaatgaggtggtgatgaggggagcgtttgccaatatgaggatcgtgaataagcttcttaatggcgaggctggtccctggacaatccatgttcctaccggggagaagctctacgtttacgacgcggcaatgaaatggaaggagatgctgtcagttttacccaattatcgagtgaaggagtatatgaagaaactttacaagacatctgtacaaccctagatgagttgcagtagattccacccattaaggacaaatggacaataatccatcatcgaagccaaatcataagctaaaaggttgagaagatggtgcttctggcatgtggatggcgctatacgattactgtttgtgactcaagtaatctatacacttatggttggcgcaaatacgttcaactaggacatattgattttgaagatgatttagttccacataaactagaagcattgaaagatagcactatatctcaggtaataccttttacaaacattccatgacatggtttcaaaacttcaatttcgcttttctaggatacttacaaagactagttccatacttctatgcacatgttgacatcgacataccttatactgatggctataatctactttttacatattggtatatgtagtcaggtttacattaaaagtttaggaaactcacaaacaaataggaatatatctaatgctacttagcccaaagccccatacaaaaatatccctgccagaattaattagcatgtcctcagatgggacataccagtatttcataaaaatgattgtctctccaattgtcagcagacttacttccagcaaagttcctaagaagataagttcttttgacagatacaaaatctagcattactctattcttttttatatatctatatgacactcatgatgtcacaatgtgaggtgttcaactgtgtctaactaataattattgtcttctcctatttgttgtacaggaaaagatagaatggaactcaaattttggtggttacactggtgtggagacttgaattcatgtatacacttagttagactcaatgttagtgcaaacagttgatgaccaagttttttaattagtattttagtttggatgtatagtacacttatgtatgagttatttgacaatgcttatttatgagatattgaatgacacttgtctatgttatattaattataatgttattaaatatatgggcatc

SEQ ID NO: 54136 - DNA, 3211 bp, Zea Mays
ttgcgccgcggcagcagaacaccttcctgacccgaattcaatccgtgcgcaggcaccctccgccggcgatggctcacgcatcgctcggcgcccgccccacgtccccgaggcgacgaccggcacaacgcgccctcgcggcgctacccgacacctgcgacgaaacgcgccaagttcaggagcgcgtcgacacaggggctcgggaacacggtgtcgccatcgcggaaccctagcgagatcgtcgggaaggtccgaaggtgagcacgtgtttgtgtaacctttggctccggttcgcaatggtggacggcgatggtgacagggaacaccagcaatagccggttgtggcagctgccgccgcgtcacatagcgccgagttggaggggcacatcacgtgaatagatctgcgcagtctcgcatcatggcagtgccggcggcctcccgggcatggcgactctccccagtcgaccaggcacctcttcgtcctttgggcccgtaccctccgcttcctcgggcgtgtccgccggccatttggacgccgtcaaaccggttggccgtgtccgggtcatctccgcgcccctcctccaaatggccaaaccctaccttgttgtagctagcctacccctccagacgccattatcttcttggtcagtcctgcccactactcgtctcatcaggtaacactttgtatatggcagtcaacaaggaaactctagtcagtgcaaagctagccttaacacaactttctgctccgataagtttagcaacacataaatgctgacttcttgtctatggatttcaattaacccctaagttggtgtattgtgcagccaatgggcatggttttgcctggtgtggttggattcaagttgagtgggaagttataggatggtgtcactactactgacattgttcttactatgacccaaatgctaaggaagcacggtgctattggcaaattcgttgaattctatgttctcttttgcatttaggtgttggtgtgggcgagctatctttgcctgctagggccacaattgccaacatgtctccagaatatggagctaccatgggcttcttccttgtagacaagtagcattggactatctcaaattgacaggccgaagcgatgaaactgtatatttcactatgtgcagactactcttttaccatacccgttccatcattctgatatgtatatatttttattaataaagcaaagttgtatatattgcattaaatgtgattcaggtgtcgatgattgaagcatacctgcgagctaacaaaatgtttgtggacaagcatgagcctgagacggaacgagttttctcttcatatctggagctggaccttagtgaggtggagccttgcgtttcaggccccaaaaggcctcatgatcgtgtccctttgaaggaaatgaagtcagactggcatgcttgcctggacaacgaagttggtttcaagggctatgcggtgccaaaggaacagcaaggcaaagttgtgaaattcaacttccatggaaggccagctgaaatcaagcatggcagtgttgttcttgcagcaatatgcagctccacaaacacatcaaatcctagcttcatgattggtgctggccttgtggaagaaagcatgcgaattgggccttgaggtgaagccatgggtaaagacaagccttacccctggatctgtggttgctactgagtacttgaaacatagtggccttcaagattatctgaaccagcaagggttccatgtcgctgcgcatggctgcgccacttgtgtgggcaactctggtgacctggatggatctgtatccgctgctatcatagaaaatgatatcgttgctgctgcggtgctgtatcctactacctgctcaaccttggggacagcatcaccacggaccacatctcctactcggggaagatccccgagggcacacctgcggccaagtatctgctcgagtatggcgtggagcccaagaacttcagctcctatggtggccgccgcgggaacaatgaggtggtgatgaggggagcgtttgccaatatgaggatcgtgaataagcttcttaatggcgaggctggtccctggacaatccatgttcctaccggggagaagctctacgtttacgacgcggcaatgaaatggaaggagatgctgtcagttttacccaattatcgagtgaaggagtatatgaagaaactttacaagacatctgtacaaccctagatgagttgcagtagattccacccattaaggacaaatggacaataatccatcatcgaagccaaatcataagctaaaaggttgagaagatggtgcttctggcatgtggatggcgctatacgattactgtttgtgactcaagtaatctatacacttatggttggcgcaaatacgttcaactaggacatattgattttgaagatgatttagttccacataaactagaagcattgaaagatagcactatatctcaggtaataccttttacaaacattccatgacatggtttcaaaacttcaatttcgcttttctaggatacttacaaagactagttccatacttctatgcacatgttgacatcgacataccttatactgatggctataatctactttttacatattggtatatgtagtcaggtttacattaaaagtttaggaaactcacaaacaaataggaatatatctaatgctacttagcccaaagccccatacaaaaatatccctgccagaattaattagcatgtcctcagatgggacataccagtatttcataaaaatgattgtctctccaattgtcagcagacttacttccagcaaagttcctaagaagataagttcttttgacagatacaaaatctagcattactctattcttttttatatatctatatgacactcatgatgtcacaatgtgaggtgttcaactgtgtctaactaataattattgtcttctcctatttgttgtacaggaaaagatagaatggaactcaaattttggtggttacactggtgtggagacttgaattcatgtatacacttagttagactcaatgttagtgcaaacagttgatgaccaagttttttaattagtattttagtttggatgtatagtacacttatgtatgagttatttgacaatgcttatttatgagatattgaatgacacttgtctatgttatattaattataatgttattaaatatatgggcatc

SEQ ID NO: 54137 - DNA, 2951 bp, Zea Mays
ttgcgccgcggcagcagaacaccttcctgacccgaattcaatccgtgcgcaggcaccctccgccggcgatggctcacgcatcgctcggcgcccgccccacgtccccgaggcgacgaccggcacaacgcgccctcgcggcgctacccgacacctgcgacgaaacgcgccaagttcaggagcgcgtcgacacaggggctcgggaacacggtgtcgccatcgcggaaccctagcgagatcgtcgggaaggtccgaaggtgagcacgtgtttgtgtaacctttggctccggttcgcaatggtggacggcgatggtgacagggaacaccagcaatagccggttgtggcagctgccgccgcgtcacatagcgccgagttggaggggcacatcacgtgaatagatctgcgcagtctcgcatcatggcagtgccggcggcctcccgggcatggcgactctccccagtcgaccaggcacctcttcgtcctttgggcccgtaccctccgcttcctcgggcgtgtccgccggccatttggacgccgtcaaaccggttggccgtgtccgggtcatctccgcgcccctcctccaaatggccaaaccctaccttgttgtagctagcctacccctccagacgccattatcttcttggtcagtcctgcccactactcgtctcatcaggaagcacggtgctattggcaaattcgttgaattctatgttctcttttgcatttaggtgttggtgtgggcgagctatctttgcctgctagggccacaattgccaacatgtctccagaatatggagctaccatgggcttcttccttgtagacaagtagcattggactatctcaaattgacaggccgaagcgatgaaactgtatatttcactatgtgcagactactcttttaccatacccgttccatcattctgatatgtatatatttttattaataaagcaaagttgtatatattgcattaaatgtgattcaggtgtcgatgattgaagcatacctgcgagctaacaaaatgtttgtggacaagcatgagcctgagacggaacgagttttctcttcatatctggagctggaccttagtgaggtggagccttgcgtttcaggccccaaaaggcctcatgatcgtgtccctttgaaggaaatgaagtcagactggcatgcttgcctggacaacgaagttggtttcaagggctatgcggtgccaaaggaacagcaaggcaaagttgtgaaattcaacttccatggaaggccagctgaaatcaagcatggcagtgttgttcttgcagcaatatgcagctccacaaacacatcaaatcctagcttcatgattggtgctggccttgtggaagaaagcatgcgaattgggccttgaggtgaagccatgggtaaagacaagccttacccctggatctgtggttgctactgagtacttgaaacatagtggccttcaagattatctgaaccagcaagggttccatgtcgctgcgcatggctgcgccacttgtgtgggcaactctggtgacctggatggatctgtatccgctgctatcatagaaaatgatatcgttgctgctgcggtgctgtatcctactacctgctcaaccttggggacagcatcaccacggaccacatctcctactcggggaagatccccgagggcacacctgcggccaagtatctgctcgagtatggcgtggagcccaagaacttcagctcctatggtggccgccgcgggaacaatgaggtggtgatgaggggagcgtttgccaatatgaggatcgtgaataagcttcttaatggcgaggctggtccctggacaatccatgttcctaccggggagaagctctacgtttacgacgcggcaatgaaatggaaggagatgctgtcagttttacccaattatcgagtgaaggagtatatgaagaaactttacaagacatctgtacaaccctagatgagttgcagtagattccacccattaaggacaaatggacaataatccatcatcgaagccaaatcataagctaaaaggttgagaagatggtgcttctggcatgtggatggcgctatacgattactgtttgtgactcaagtaatctatacacttatggttggcgcaaatacgttcaactaggacatattgattttgaagatgatttagttccacataaactagaagcattgaaagatagcactatatctcaggtaataccttttacaaacattccatgacatggtttcaaaacttcaatttcgcttttctaggatacttacaaagactagttccatacttctatgcacatgttgacatcgacataccttatactgatggctataatctactttttacatattggtatatgtagtcaggtttacattaaaagtttaggaaactcacaaacaaataggaatatatctaatgctacttagcccaaagccccatacaaaaatatccctgccagaattaattagcatgtcctcagatgggacataccagtatttcataaaaatgattgtctctccaattgtcagcagacttacttccagcaaagttcctaagaagataagttcttttgacagatacaaaatctagcattactctattcttttttatatatctatatgacactcatgatgtcacaatgtgaggtgttcaactgtgtctaactaataattattgtcttctcctatttgttgtacaggaaaagatagaatggaactcaaattttggtggttacactggtgtggagacttgaattcatgtatacacttagttagactcaatgttagtgcaaacagttgatgaccaagttttttaattagtattttagtttggatgtatagtacacttatgtatgagttatttgacaatgcttatttatgagatattgaatgacacttgtctatgttatattaattataatgttattaaatatatgggcatc

SEQ ID NO: 54138 - DNA, 2144 bp, Zea Mays
ttgcgccgcggcagcagaacaccttcctgacccgaattcaatccgtgcgcaggcaccctccgccggcgatggctcacgcatcgctcggcgcccgccccacgtccccgaggcgacgaccggcacaacgcgccctcgcggcgctacccgacacctgcgacgaaacgcgccaagttcaggagcgcgtcgacacaggggctcgggaacacggtgtcgccatcgcggaaccctagcgagatcgtcgggaaggtccgaagccaatgggcatggttttgcctggtgtggttggattcaagttgagtgggaagttataggatggtgtcactactactgacattgttcttactatgacccaaatgctaaggaagcacggtgctattggcaaattcgttgaattctatgttctcttttgcatttaggtgttggtgtgggcgagctatctttgcctgctagggccacaattgccaacatgtctccagaatatggagctaccatgggcttcttccttgtagacaagtagcattggactatctcaaattgacaggccgaagcgatgaaactgtatatttcactatgtgcagactactcttttaccatacccgttccatcattctgatatgtatatatttttattaataaagcaaagttgtatatattgcattaaatgtgattcaggtgtcgatgattgaagcatacctgcgagctaacaaaatgtttgtggacaagcatgagcctgagacggaacgagttttctcttcatatctggagctggaccttagtgaggtggagccttgcgtttcaggccccaaaaggcctcatgatcgtgtccctttgaaggaaatgaagtcagactggcatgcttgcctggacaacgaagttggtttcaagggctatgcggtgccaaaggaacagcaaggcaaagttgtgaaattcaacttccatggaaggccagctgaaatcaagcatggcagtgttgttcttgcagcaatatgcagctccacaaacacatcaaatcctagcttcatgattggtgctggccttgtggaagaaagcatgcgaattgggccttgaggtgaagccatgggtaaagacaagccttacccctggatctgtggttgctactgagtacttgaaacatagtggccttcaagattatctgaaccagcaagggttccatgtcgctgcgcatggctgcgccacttgtgtgggcaactctggtgacctggatggatctgtatccgctgctatcatagaaaatgatatcgttgctgctgcggtgctgtatcctactacctgctcaaccttggggacagcatcaccacggaccacatctcctactcggggaagatccccgagggcacacctgcggccaagtatctgctcgagtatggcgtggagcccaagaacttcagctcctatggtggccgccgcgggaacaatgaggtggtgatgaggggagcgtttgccaatatgaggatcgtgaataagcttcttaatggcgaggctggtccctggacaatccatgttcctaccggggagaagctctacgtttacgacgcggcaatgaaatggaaggagatgctgtcagttttacccaattatcgagtgaaggagtatatgaagaaactttacaagacatctgtacaaccctagatgagttgcagtagattccacccattaaggacaaatggacaataatccatcatcgaagccaaatcataagctaaaaggttgagaagatggtgcttctggcatgtggatggcgctatacgattactgtttgtgactcaagtaatctatacacttatggttggcgcaaatacgttcaactaggacatattgattttgaagatgatttagttccacataaactagaagcattgaaagatagcactatatctcaggaaaagatagaatggaactcaaattttggtggttacactggtgtggagacttgaattcatgtatacacttagttagactcaatgttagtgcaaacagttgatgaccaagttttttaattagtattttagtttggatgtatagtacacttatgtatgagttatttgacaatgcttatttatgagatattgaatgacacttgtctatgttatattaattataatgttattaaatatatgggcatc

SEQ ID NO: 54139 - DNA, 2244 bp, Zea Mays
ttgcgccgcggcagcagaacaccttcctgacccgaattcaatccgtgcgcaggcaccctccgccggcgatggctcacgcatcgctcggcgcccgccccacgtccccgaggcgacgaccggcacaacgcgccctcgcggcgctacccgacacctgcgacgaaacgcgccaagttcaggagcgcgtcgacacaggggctcgggaacacggtgtcgccatcgcggaaccctagcgagatcgtcgggaaggtccgaaggtgagcacgtgtttgtgtaacctttggctccggttcgcaatggtggacggcgatggtgacagggaacaccagcaatagccggttgtggcagctgccgccgcgtcacatagcgccgagttggaggggcacatcacgtgaatagatctgcgcagtctcgcatcatggcagtgccggcggcctcccgggcatggcgactctccccagtcgaccaggcacctcttcgtcctttgggcccgtaccctccgcttcctcgggcgtgtccgccggccatttggacgccgtcaaaccggttggccgtgtccgggtcatctccgcgcccctcctccaaatggccaaaccctaccttgttgtagctagcctacccctccagacgccattatcttcttggtcagtcctgcccactactcgtctcatcaggtaacactttgtatatggcagtcaacaaggaaactctagtcagtgcaaagctagccttaacacaactttctgctccgataagtttagcaacacataaatgctgacttcttgtctatggatttcaattaacccctaagttggtgtattgtgcagccaatgggcatggttttgcctggtgtggttggattcaagttgagtgggaagttataggatggtgtcactactactgacattgttcttactatgacccaaatgctaaggaagcacggtgctattggcaaattcgttgaattctatgttctcttttgcatttaggtgttggtgtgggcgagctatctttgcctgctagggccacaattgccaacatgtctccagaatatggagctaccatgggcttcttccttgtgtcgatgattgaagcatacctgcgagctaacaaaatgtttgtggacaagcatgagcctgagacggaacgagttttctcttcatatctggagctggaccttagtgaggtggagccttgcgtttcaggccccaaaaggcctcatgatcgtgtccctttgaaggaaatgaagtcagactggcatgcttgcctggacaacgaagttggtttcaaggtgaagccatgggtaaagacaagccttacccctggatctgtggttgctactgagtacttgaaacatagatatcgttgctgctgcggtgctgtatcctactacctgctcaaccttggggacagcatcaccacggaccacatctcctactcggggaagatccccgagggcacacctgcggccaagtatctgctcgagtatggcgtggagcccaagaacttcagctcctatggtggccgccgcgggaacaatgaggtggtgatgaggggagcgtttgccaatatgaggatcgtgaataagcttcttaatggcgaggctggtccctggacaatccatgttcctaccggggagaagctctacgtttacgacgcggcaatgaaatggaaggagatgctgtcagttttacccaattatcgagtgaaggagtatatgaagaaactttacaagacatctgtacaaccctagatgagttgcagtagattccacccattaaggacaaatggacaataatccatcatcgaagccaaatcataagctaaaaggttgagaagatggtgcttctggcatgtggatggcgctatacgattactgtttgtgactcaagtaatctatacacttatggttggcgcaaatacgttcaactaggacatattgattttgaagatgatttagttccacataaactagaagcattgaaagatagcactatatctcaggaaaagatagaatggaactcaaattttggtggttacactggtgtggagacttgaattcatgtatacacttagttagactcaatgttagtgcaaacagttgatgaccaagttttttaattagtattttagtttggatgtatagtacacttatgtatgagttatttgacaatgcttatttatgagatattgaatgacacttgtctatgttatattaattataatgttattaaatatatgggcatc

SEQ ID NO: 54140 - DNA, 2259 bp, Zea Mays
ttgcgccgcggcagcagaacaccttcctgacccgaattcaatccgtgcgcaggcaccctccgccggcgatggctcacgcatcgctcggcgcccgccccacgtccccgaggcgacgaccggcacaacgcgccctcgcggcgctacccgacacctgcgacgaaacgcgccaagttcaggagcgcgtcgacacaggggctcgggaacacggtgtcgccatcgcggaaccctagcgagatcgtcgggaaggtccgaagccaatgggcatggttttgcctggtgtggttggattcaagttgagtgggaagttataggatggtgtcactactactgacattgttcttactatgacccaaatgctaaggaagcacggtgctattggcaaattcgttgaattctatggtaagaatagtagagaagcatggtttacatcgttgggagcataatttatcttattcatatatctttcaacattttttctctttagttctcttttgcatttaggtgttggtgtgggcgagctatctttgcctgctagggccacaattgccaacatgtctccagaatatggagctaccatgggcttcttccttgtagacaagtagcattggactatctcaaattgacaggccgaagcgatgaaactgtatatttcactatgtgcagactactcttttaccatacccgttccatcattctgatatgtatatatttttattaataaagcaaagttgtatatattgcattaaatgtgattcaggtgtcgatgattgaagcatacctgcgagctaacaaaatgtttgtggacaagcatgagcctgagacggaacgagttttctcttcatatctggagctggaccttagtgaggtggagccttgcgtttcaggccccaaaaggcctcatgatcgtgtccctttgaaggaaatgaagtcagactggcatgcttgcctggacaacgaagttggtttcaaggtgaagccatgggtaaagacaagccttacccctggatctgtggttgctactgagtacttgaaacatagatatcgttgctgctgcggtgctgtatcctactacctgctcaaccttggggacagcatcaccacggaccacatctcctactcggggaagatccccgagggcacacctgcggccaagtatctgctcgagtatggcgtggagcccaagaacttcagctcctatggtggccgccgcgggaacaatgaggtggtgatgaggggagcgtttgccaatatgaggatcgtgaataagcttcttaatggcgaggctggtccctggacaatccatgttcctaccggggagaagctctacgtttacgacgcggcaatggttgagaagatggtgcttctggcatgtggatggcgctatacgattactgtttgtgactcaagtaatctatacacttatggttggcgcaaatacgttcaactaggacatattgattttgaagatgatttagttccacataaactagaagcattgaaagatagcactatatctcaggtaataccttttacaaacattccatgacatggtttcaaaacttcaatttcgcttttctaggatacttacaaagactagttccatacttctatgcacatgttgacatcgacataccttatactgatggctataatctactttttacatattggtatatgtagtcaggtttacattaaaagtttaggaaactcacaaacaaataggaatatatctaatgctacttagcccaaagccccatacaaaaatatccctgccagaattaattagcatgtcctcagatgggacataccagtatttcataaaaatgattgtctctccaattgtcagcagacttacttccagcaaagttcctaagaagataagttcttttgacagatacaaaatctagcattactctattcttttttatatatctatatgacactcatgatgtcacaatgtgaggtgttcaactgtgtctaactaataattattgtcttctcctatttgttgtacaggaaaagatagaatggaactcaaattttggtggttacactggtgtggagacttgaattcatgtatacacttagttagactcaatgttagtgcaaacagttgatgaccaagttttttaattagtattttagtttggatgtatagtacacttatgtatgagttatttgacaatgcttatttatgagatattgaatgacacttgtctatgttatattaattataatgttattaaatatatgggcatc

SEQ ID NO: 54141 - DNA, 2223 bp, Zea Mays
ttgcgccgcggcagcagaacaccttcctgacccgaattcaatccgtgcgcaggcaccctccgccggcgatggctcacgcatcgctcggcgcccgccccacgtccccgaggcgacgaccggcacaacgcgccctcgcggcgctacccgacacctgcgacgaaacgcgccaagttcaggagcgcgtcgacacaggggctcgggaacacggtgtcgccatcgcggaaccctagcgagatcgtcgggaaggtccgaaggtgtcgatgattgaagcatacctgcgagctaacaaaatgtttgtggacaagcatgagcctgagacggaacgagttttctcttcatatctggagctggaccttagtgaggtggagccttgcgtttcaggccccaaaaggcctcatgatcgtgtccctttgaaggaaatgaagtcagactggcatgcttgcctggacaacgaagttggtttcaagggctatgcggtgccaaaggaacagcaaggcaaagttgtgaaattcaacttccatggaaggccagctgaaatcaagcatggcagtgttgttcttgcagcaatatgcagctccacaaacacatcaaatcctagcttcatgattggtgctggccttgtggaagaaagcatgcgaattgggccttgaggtgaagccatgggtaaagacaagccttacccctggatctgtggttgctactgagtacttgaaacatagtggccttcaagattatctgaaccagcaagggttccatgtcgctgcgcatggctgcgccacttgtgtgggcaactctggtgacctggatggatctgtatccgctgctatcatagaaaatgatatcgttgctgctgcggtgctgtatcctactacctgctcaaccttggggacagcatcaccacggaccacatctcctactcggggaagatccccgagggcacacctgcggccaagtatctgctcgagtatggcgtggagcccaagaacttcagctcctatggtggccgccgcgggaacaatgaggtggtgatgaggggagcgtttgccaatatgaggatcgtgaataagcttcttaatggcgaggctggtccctggacaatccatgttcctaccggggagaagctctacgtttacgacgcggcaatgaaatggaaggagatgctgtcagttttacccaattatcgagtgaaggagtatatgaagaaactttacaagacatctgtacaaccctagatgagttgcagtagattccacccattaaggacaaatggacaataatccatcatcgaagccaaatcataagctaaaaggttgagaagatggtgcttctggcatgtggatggcgctatacgattactgtttgtgactcaagtaatctatacacttatggttggcgcaaatacgttcaactaggacatattgattttgaagatgatttagttccacataaactagaagcattgaaagatagcactatatctcaggtaataccttttacaaacattccatgacatggtttcaaaacttcaatttcgcttttctaggatacttacaaagactagttccatacttctatgcacatgttgacatcgacataccttatactgatggctataatctactttttacatattggtatatgtagtcaggtttacattaaaagtttaggaaactcacaaacaaataggaatatatctaatgctacttagcccaaagccccatacaaaaatatccctgccagaattaattagcatgtcctcagatgggacataccagtatttcataaaaatgattgtctctccaattgtcagcagacttacttccagcaaagttcctaagaagataagttcttttgacagatacaaaatctagcattactctattcttttttatatatctatatgacactcatgatgtcacaatgtgaggtgttcaactgtgtctaactaataattattgtcttctcctatttgttgtacaggaaaagatagaatggaactcaaattttggtggttacactggtgtggagacttgaattcatgtatacacttagttagactcaatgttagtgcaaacagttgatgaccaagttttttaattagtattttagtttggatgtatagtacacttatgtatgagttatttgacaatgcttatttatgagatattgaatgacacttgtctatgttatattaattataatgttattaaatatatgggcatc

SEQ ID NO: 54142 - DNA, 2557 bp, Zea Mays
gcgcctgtactctgatgggccaacccactaacgttcagcggcagagcccgttatttccccacttcagcgcccacacttgcgccgcggcagcagaacaccttcctgacccgaattcaatccgtgcgcaggcaccctccgccggcgatggctcacgcatcgctcggcgcccgccccacgtccccgaggcgacgaccggcacaacgcgccctcgcggcgctacccgacacctgcgacgaaacgcgccaagttcaggagcgcgtcgacacaggggctcgggaacacggtgtcgccatcgcggaaccctagcgagatcgtcgggaaggtccgaaggtgagcacgtgtttgtgtaacctttggctccggttcgcaatggtggacggcgatggtgacagggaacaccagcaatagccggttgtggcagctgccgccgcgtcacatagcgccgagttggaggggcacatcacgtgaatagatctgcgcagtctcgcatcatggcagtgccggcggcctcccgggcatggcgactctccccagtcgaccaggcacctcttcgtcctttgggcccgtaccctccgcttcctcgggcgtgtccgccggccatttggacgccgtcaaaccggttggccgtgtccgggtcatctccgcgcccctcctccaaatggccaaaccctaccttgttgtagctagcctacccctccagacgccattatcttcttggtcagtcctgcccactactcgtctcatcagccaatgggcatggttttgcctggtgtggttggattcaagttgagtgggaagttataggatggtgtcactactactgacattgttcttactatgacccaaatgctaaggaagcacggtgctattggcaaattcgttgaattctatgttctcttttgcatttaggtgttggtgtgggcgagctatctttgcctgctagggccacaattgccaacatgtctccagaatatggagctaccatgggcttcttccttgtagacaagtagcattggactatctcaaattgacaggccgaagcgatgaaactcaaagttgtatatattgcattaaatgtgattcaggtgtcgatgattgaagcatacctgcgagctaacaaaatgtttgtggacaagcatgagcctgagacggaacgagttttctcttcatatctggagctggaccttagtgaggtggagccttgcgtttcaggccccaaaaggcctcatgatcgtgtccctttgaaggaaatgaagtcagactggcatgcttgcctggacaacgaagttggtttcaagggctatgcggtgccaaaggaacagcaaggcaaagttgtgaaattcaacttccatggaaggccagctgaaatcaagcatggcagtgttgttcttgcagcaatatgcagctccacaaacacatcaaatcctagcttcatgattggtgctggccttgtggaagaaagcatgcgaattgggccttgaggtgaagccatgggtaaagacaagccttacccctggatctgtggttgctactgagtacttgaaacatagtggccttcaagattatctgaaccagcaagggttccatgtcgctgcgcatggctgcgccacttgtgtgggcaactctggtgacctggatggatctgtatccgctgctatcatagaaaatgatatcgttgctgctgcggtgctgtatcctactacctgctcaaccttggggacagcatcaccacggaccacatctcctactcggggaagatccccgagggcacacctgcggccaagtatctgctcgagtatggcgtggagcccaagaacttcagctcctatggtggccgccgcgggaacaatgaggtggtgatgaggggagcgtttgccaatatgaggatcgtgaataagcttcttaatggcgaggctggtccctggacaatccatgttcctaccggggagaagctctacgtttacgacgcggcaatgaaatggaaggagatgctgtcagttttacccaattatcgagtgaaggagtatatgaagaaactttacaagacatctgtacaaccctagatgagttgcagtagattccacccattaaggacaaatggacaataatccatcatcgaagccaaatcataagctaaaaggttgagaagatggtgcttctggcatgtggatggcgctatacgattactgtttgtgactcaagtaatctatacacttatggttggcgcaaatacgttcaactaggacatattgattttgaagatgatttagttccacataaactagaagcattgaaagatagcactatatctcaggaaaagatagaatggaactcaaattttggtggttacactggtgtggagacttgaattcatgtatacacttagttagactcaatgttagtgcaaacagttgatgaccaagttttttaattagtattttagtttggatgtatagtacacttatgtatgagttatttgacaatgcttatttatgagatattgaatgacacttgtctatgttatattaattataatgttattaaatatatgggcatc

SEQ ID NO: 54143 - DNA, 3452 bp, Zea Mays
cctgctttcattatcctttctctctcagctgcaagctctggtttgtggtccctcgataaattgtatgcctgccatgtatttaacacgggacatatactcaggctgtcaaggatatcttcttataaggaaagaccaagagtaacataccttcccaccccttgaaataacacatcgggaatcaccagcatttgccacaacaagttgggtgtttcttattaatgctacacacgctgtactcccacatgttggcccagcaaagtcagagtgaggtccctgataaacgattatacatgtgacatactccatgaatttaataccatagtttaaacaataataaagtaaggaaaagcatggtgtagcggtgagagctgtctctccgcatctaagaaggcctatctcgatttatcccttccctagaccccactcatgtgggattgtctcggtttattcatttctcagaccccactcaggtcttgtttggttgcatgaggatcggagtggattgaggggattaaatcccctcttattcaattttgactaggaatggatttaatcccctccaatctccttcaatccactcctaaccgaacaagctcttatatggtacaagctctcatgtggtagcctacggcactggatctaccatttttttagttcaaacgataataaagacgtagacttcagaatattacatttcataattaactcatattacatcattagtaacattgcagctaccatgtttgggtgcccgttttctcttcacatggatttctttttacacaaaaattcggatgttatttgcaattcacatctgacacagcttgcaagcattcaaaagacattacctttattttaatgcaagaaaatcagatgtgcatctattttagaaaagtgaaaacagcagtagccatctaccacagacaaaatcaggatgacttccctaacaaaaacattatctatgagagattcccaaatttaatatcataattcaaacaatcatgaaaactgatacacaaactaatatttgaaaactgatttttcatatatctaaatcaactcatagtacatgtacatcattattaacaacaaaccgttcatttctagatggcaatatgttatggcaagtggagccgatagaataaggaaaaaataagttaaattgatttagttagttaggatataaaatattcggttagttaggataagggaagagataagttaaattgatttcgttaagacatttctttaggggtcaagtaagtctctctataaggagagaagatgtatcaatctaataaagcaagcattaagtaagaaaatcctttcctcttgctcggttgtggacaagatctccggccgccccccttgcgtcacctcaaccttagtcgctgccataacatccgcaataatatctggtaccaaagatctcaggttccgacactccgcaataatatatggtatcaaagatctcaggttccgacacacaataggtcgatgtactctcacggctggccaccgtgaagagccatcaggcatcctcatcggcgggtgtcatgcctgaaggctttccctacggatgttggagtacggcccaacagcgcttctaacttactcaaccaccactgccatcccccgcaagctcgattgccctgtaatttggctcacctattgtgagcaattttttcgagggcaacacacgctcgcatctgatcgtgattggcttgcatcataccatctacacggcgcgatgcagacgtggtactacattctcgaacaggatgtaaacatgacagccttcctagtagcgcttcatagagctttgcaactcacgcttcggtaccgatgagccatcaccggatccaatctccaagacgttgatcgacttcgccccatctctctaggcacgtatggtggccttagactcttgacaaccacgtcccctagaacttagtgcactgtgtgctccacccctcggagcactagttgatctggcccctagggcactccttctgccagccctcggggcaccaattcccgcctccgcagcacctgtctcgacccctagggcactggttcccaccgccagggcacctgtcctggcctcgaacacgtgttccctccgtcgaggcacctgttccgccacttggggcatctgttcccgccttcggacacctattctacccttgaggcacatgtttcggaccccaaggcacctcggcatcaacccctagggtacctcagacatcgaggatcctctcctctcggtgtggcgctgactagcagccgttcgacgagaagaaggcatggggtcccttaggcgtgcactacatagctctgccacatttcatcaccggcctccacaagggtgtctttgccgattgttgttgtgaccactcctaggtattgacactcgcgagactatgtcatgggatctaggtgagattgtacacatgtcgccatgggaacattgaaatctgcagccatgaccaacagcacaaccccgaggaagagctatgatggagtggagtagtgttatgacaagtggaaccaggggcggatctacaccccgggccacccggtccgtggcccaaggcttgatccatgtaactactctacataagtatttatttaatctagtataaaatagttaagataaaaggaagagaaggaaatttagtaggtttggcctgagtcataggaaaattctagatccacccctgagtagagccattaggatagagtaaattagattgatttagttaattagaataaggaaatatttggttagttaagataagaaaagagatgagttagattgagttggttagaatattttcttagaggtcaagtaaggctctacgtataaggagaggagatgtatcaatataatcaagcaagacttaagaagaaaaacacttccctcttgttcggctgtgggcaaggcccttagccggcccccttgtgctccctcaaccctagccgccgccataacacaaaagttctatttgcatgggtttctctttccaacgaaaagctcagctgttaaactcacaactaacacaagtatttaagattatgaaacgcctagaatctataatcgataaagaaggtggaatagatgtactgatgtacatctatgttagaaaagtgaaagcaacaggagtctgttgcatatatacctcctctgaagcccaatcatcttgttgattatttgaatcactgccccttggagaccaaatcaatccttctatcataccactaaacttgtttattttgtctccaagtgcagatagttctcgccaacctctctgtccttgcatcatttcatccattctgaagcagcacaaccacaaaattagaaattgccatcaagctgacagtaatgctataaatatttaagctgtattatatctcatgtgggatctggttcaccatatacctgaagaaag

SEQ ID NO: 54144 - DNA, 1349 bp, Zea Mays
actccgaccatttccaccaacggtctggacgggtggactgaccacaagtcgccgactcgccatccgcgtcaacaccactgcaaccaccaccgccgtgtgggaggcccaaaccacgcgcctttccccactgcaccaggcaacccaccagcaggccgcagttcacgcttggctgacgaccgacccccattcgttctagccctccctccgacactccgatccattactcgctatggacgcggcgggcggcgaccagctaagcctggccgcggtgcgcgacgcgctggtgcggctggaggactccgtggtgttcgcgctcatcgagcgcgcccggcatccgcggaacgcgccagcctacgcgcccgccgccaccgctggagaacattcgctcgtggagttcttcgtccgggaagcagaggccctcaacgcaaaggctggacattatcaaaagccagaagatgttccattcttccctcaagatctaccctcacctctctttcctacaaagccttccccaaaggtcttgcacccttttgcttcattggtcaccgtgaatgatgcaatatggaaaatgtattttgatgaattgctcccgttattcactgttgatggtgatgatggcagctatgcacaaacagttgcactggatttagcgtgtctgcaggttctatcacaaagaattcatattggtaaatatgttgctgaggtgaagttcaaagacgctcctcaagaatatagtcgactaataaaagaaaagcaattctctgatggatatgctgacattcaaggctgtggaagagaaggtcaagaagagagtagagaagaaggctaggacgttcgggcagaacgtcaccttggatgacaatgccactgctggtgacagcgagtgcaaggtcgatcccaaagtgctctccaagctgtatgatcagtgggtgatgccactgaccaaggatgtcgaagtcgagtatctcctgcgccgcctcgactgatcagtgatcacccgattagctgtagctgcgaactttatgtacgcgtgggtttcagtttgctttgcacatgccctttatggctttatcgttcaaactcaactacgagagaacgttaccaggatctggccttcgtctttgtcagcctgcttgcccgtcatctgcatgagtagtccaactgtaagtgacgcttggtatggaatgtaagaaaagtaatacaactggttacatgttatctttaatctcctgttgttcgtctgtaagtgactggcaacacagtagggtaccaattctctggttcagaaacgtattatgtttcttgcttacgtgacaaataccaaacaaaatagttacagctttgacatg

SEQ ID NO: 54145 - DNA, 2016 bp, Zea Mays
gtcctagttggtttcgattcaattagcctgatttgatgtccaggtttgatttcgattcaactgaaccggtttaatttgatggggttgtagtacctttttttttcttatcacaagagacagagcatgcatgcggcatgcctccatggccgtggctttttttcctgctttacacactgccgcctccttatctcctagatcttcacacccatggttttttttccctattttgttctgtggtcttttcagtcatgctggctgggactgctaccgatgctgctgctggtcatgagaagctagctattggccttgtagtaccggagtaaatgattggcgctactagttttttcccctatccccaaatttttcatcttgcagtggtacccttcgccttgggagctgaaagcatggggagatgctgccggccggccggccagtacactgcaacactgagaggtcatggacgaggacgactcatggtggtgggtggggtcgatcaagttcttgttgttgggtcgaaaatggagcacggagacgagccatatttagcaaggaaggtttaagtccatacccaagattgggcaaggtggcctatcatgaaaatgatgatgatggccgcaaaggtcaataagtactatgaaaggagaaaagcataatacgaaggcacgatgcaaaggctagtacagacaagcaagatgtgtagaataagccgcagctgaccagcgcatgcagtcaagaggtgggcgggcatgcttccatcatcgctgaaatcaccctgcagacttcgcattttgctatgtaaagaacagactacccagacaaggatgtgtatagttgtagtgcaaaagcaacaggatgcaccatagacagagacaagacatttttgctattttgagcacgtgtgcagatccacctcaaagtttcgaaacgatttcgggtggtggctgtgatgtcgtttgaggcaggcagctgcgtcgttcaggcacctggaacaacaaaaaaaggcaacatgttattaccttggcgccagatgtcttcgggaggaaccccttgtcttgaagggacttcactgcttcgtacaggtacccatgcactggcgtgaacttgacgccaaggtccttcagaggttggttcgtaaacttgtagcccttcttcagtgggttcacctgatccttgcacctgcaaaaacaaaacaaaaaaatagcatgctatcagtgtagtgctgcaacagcaaagagcaaatgcatttgtctcgaagcagtttgggactccagacaggcagacaccatgtatatatgttgttgttgctatatcttcaaaacaaggtgatgttttttttttcttttttgccttgaggtacccctagggtcgtccatccatgtgctgccttcaaaggaaagaataggcattgctttgcttttaaggaatcgtccaaggcaccggtcagtcggtcacacctacctcttcagtttatcagcataacatttgcaattgcaagccaagcgcagttactaaattaaaattcattcggttttttctgaccggctcgtcctattcattttttttggaaaaattgaaaaattcaatgccacatttaaagtaaaacaatatcaccgcgaaaaataacaataattataaattttttaaataagataagtcagtcaaacttagagtaaaaaatcaagcgaattataaattagaacggagagagtaagaaaagactgggccgcatgatcattcacatgactaaaatgcactccgggtttcagttttctattacgtggagtatcttggcttatctaagcatggatacccatcatctgactcgtagctaacaaagtactgtgcagcatcatcagatggacttttctatccatggagagctattcttgaccttgtccaaaggacattaactagtcgttactgagcagaccaactaggctactcgtcataaaccctcctggccatggatttcttcaaatatcatcgtgcacaagttgaatttttggagcagtccac

SEQ ID NO: 54146 - DNA, 1848 bp, Zea Mays
gtcctagttggtttcgattcaattagcctgatttgatgtccaggtttgatttcgattcaactgaaccggtttaatttgatggggttgtagtacctttttttttcttatcacaagagacagagcatgcatgcggcatgcctccatggccgtggctttttttcctgctttacacactgccgcctccttatctcctagatcttcacacccatggttttttttccctattttgttctgtggtcttttcagtcatgctggctgggactgctaccgatgctgctgctggtcatgagaagctagctattggccttgtagtaccggagtaaatgattggcgctactagttttttcccctatccccaaatttttcatcttgcagtggtacccttcgccttgggagctgaaagcatggggagatgctgccggccggccggccagtacactgcaacactgagaggttcccaaaggagtacaaactacgttggcgcgctccttctctctctctaccttctccctctctctctctgctagtttcaaggtttctttgttctttctgtgtgcaggtcatggacgaggacgactcatggtggtgggtggggtcgatcaagttcttgttgttgggtcgaaaatggagcacggagacgagccatatttagcaaggaaggtttaagtccatacccaagattgggcaaggtggcctatcatgaaaatgatgatgatggccgcaaaggtcaataagtactatgaaaggagaaaagcataatacgaaggcacgatgcaaaggctagtacagacaagcaagatgtgtagaataagccgcagctgaccagcgcatgcagtcaagaggtgggcgggcatgcttccatcatcgctgaaatcaccctgcagacttcgcattttgctatgtaaagaacagactacccagacaaggatgtgtatagttgtagtgcaaaagcaacaggatgcaccatagacagagacaagacatttttgctattttgagcacgtgtgcagatccacctcaaagtttcgaaacgatttcgggtggtggctgtgatgtcgtttgaggcaggcagctgcgtcgttcaggcacctggaacaacaaaaaaaggcaacatgttattaccttggcgccagatgtcttcgggaggaaccccttgtcttgaagggacttcactgcttcgtacaggtacccctagggtcgtccatccatgtgctgccttcaaaggaaagaataggcattgctttgcttttaaggaatcgtccaaggcaccggtcagtcggtcacacctacctcttcagtttatcagcataacatttgcaattgcaagccaagcgcagttactaaattaaaattcattcggttttttctgaccggctcgtcctattcattttttttggaaaaattgaaaaattcaatgccacatttaaagtaaaacaatatcaccgcgaaaaataacaataattataaattttttaaataagataagtcagtcaaacttagagtaaaaaatcaagcgaattataaattagaacggagagagtaagaaaagactgggccgcatgatcattcacatgactaaaatgcactccgggtttcagttttctattacgtggagtatcttggcttatctaagcatggatacccatcatctgactcgtagctaacaaagtactgtgcagcatcatcagatggacttttctatccatggagagctattcttgaccttgtccaaaggacattaactagtcgttactgagcagaccaactaggctactcgtcataaaccctcctggccatggatttcttcaaatatcatcgtgcacaagttgaatttttggagcagtccac

SEQ ID NO: 54147 - DNA, 1807 bp, Zea Mays
agagagtgagcacacggcgcgacgaacgacatagcattcatgctggctgggactgctaccgatgctgctgctggtcatgagaagctagctattggccttgtagtaccggagtaaatgattggcgctactagttttttcccctatccccaaatttttcatcttgcagtggtacccttcgccttgggagctgaaagcatggggagatgctgccggccggccggccagtacactgcaacactgagaggtcatggacgaggacgactcatggtggtgggtggggtcgatcaagttcttgttgttgggtcgaaaatggagcacggagacgagccatatttagcaaggaaggtttaagtccatacccaagattgggcaaggtggcctatcatgaaaatgatgatgatggccgcaaaggtcaataagtactatgaaaggagaaaagcataatacgaaggcacgatgcaaaggctagtacagacaagcaagatgtgtagaataagccgcagctgaccagcgcatgcagtcaagaggtgggcgggcatgcttccatcatcgctgaaatcaccctgcagacttcgcattttgctatgtaaagaacagactacccagacaaggatgtgtatagttgtagtgcaaaagcaacaggatgcaccatagacagagacaagacatttttgctattttgagcacgtgtgcagatccacctcaaagtttcgaaacgatttcgggtggtggctgtgatgtcgtttgaggcaggcagctgcgtcgttcaggcacctggaacaacaaaaaaaggcaacatgttattaccttggcgccagatgtcttcgggaggaaccccttgtcttgaagggacttcactgcttcgtacaggtacccatgcactggcgtgaacttgacgccaaggtccttcagaggttggttcgtaaacttgtagcccttcttcagtgggttcacctgatccttgcacctgcaaaaacaaaacaaaaaaatagcatgctatcagtgtagtgctgcaacagcaaagagcaaatgcatttgtctcgaagcagtttgggactccagacaggcagacaccatgtatatatgttgttgttgctatatcttcaaaacaaggtgatgttttttttttcttttttgccttgaggtacccctagggtcgtccatccatgtgctgccttcaaaggaaagaataggcattgctttgcttttaaggaatcgtccaaggcaccggtcagtcggtcacacctacctcttcagtttatcagcataacatttgcaattgcaagccaagcgcagttactaaattaaaattcattcggttttttctgaccggctcgtcctattcattttttttggaaaaattgaaaaattcaatgccacatttaaagtaaaacaatatcaccgcgaaaaataacaataattataaattttttaaataagataagtcagtcaaacttagagtaaaaaatcaagcgaattataaattagaacggagagagtaagaaaagactgggccgcatgatcattcacatgactaaaatgcactccgggtttcagttttctattacgtggagtatcttggcttatctaagcatggatacccatcatctgactcgtagctaacaaagtactgtgcagcatcatcagatggacttttctatccatggagagctattcttgaccttgtccaaaggacattaactagtcgttactgagcagaccaactaggctactcgtcataaaccctcctggccatggatttcttcaaatatcatcgtgcacaagttgaatttttggagcagtccac

SEQ ID NO: 54148 - DNA, 528 bp, Zea Mays
tttcgattcaactgaaccggtttaatttgatggggttgtagtacctttttttttcttatcacaagagacagagcatgcatgcggcatgcctccatggccgtggctttttttcctgctttacacactgccgcctccttatctcctagatcttcacacccatggttttttttccctattttgttctgtggtcttttcagtcatgctggctgggactgctaccgatgctgctgctggtcatgagaagctagctattggccttgtagtaccggagtaaatgattggcgctactagttttttcccctatccccaaatttttcatcttgcagtggtacccttcgccttgggagctgaaagcatggggagatgctgccggccggccggccagtacactgcaacactgagaggtcatggacgaggacgactcatggtggtgggtggggtcgatcaagttcttgttgttgggtcgaaaatggagcacggagacgagccatatttagcaaggaaggctagtacagacaagcaagatgt

SEQ ID NO: 54149 - DNA, 810 bp, Zea Mays
cttctccctctgtttctcgctgccgcatgggacccacgtttttcctgtttctcttcctcgccacgcatctcgggcgggtggttgagcacgcgacacctccgctaaccacgactgcacctcacctttgcttcaaaagcgggctaaggaccctcttgctttctcctttgccctctcctccttctgccgccacaagaaaaaggaaagcgccgccaccagaaatagccattgacagcaagtccggagagagtagctgggtggagatatcgccacgtctcaagtctcgggggcgaattcaggagctttggtcgcgttgaagggtctcgcgcgaggtgttgccgtgtatggtgggtgctcggctggtcgggaactcgccgccgtcgtgggatctccgtgtccggccactgcgggtcgtgccggctcacccaccatctcctcggtcgtcgacgagccagtgaccaaggatctaggtgtttagcaggtttgctgagcaggagctcattgaaggaccgagagatgatgattgagccagtgatgtggtgccaaccacaagatgcagatggtggaaccaaggaaggatgaacttaactagtggatgctcgccgagcgagtatctcccccagcaaacactatctaagtgtcaaattaaaggcaagccccggttttatgcataaccgttatatatgctattttactgcacttaatgtttgtaggcttgtactatgcacttaagtgtaggagttgtctgaaaccctagttgcatgaactcaggatacctttgagatggatactagtatgctaggtcgagtagct

SEQ ID NO: 54150 - DNA, 1035 bp, Zea Mays
agaaaaaggaaagcgccgccaccagaaatagccattgacagcaagtccggagagagtagctgggtggagatatcgccacgtctcaagtctcgggggcgaattcaggagctttggtcgcgttgaagggtctcgcgcgaggtgttgccgtgtatggtgggtgctcggctggtcgggaactcgccgccgtcgtgggatctccgtgtccggccactgcgggtcgtgccggctcacccaccatctcctcggtcgtcgacgagccagtgaccaaggatctaggtgtttagcaggtttgctgagcaggagctcattgaagatggtcaataccaggaagggaggattattagacaacagcaagcagaaatagacccttcgaatcctccaccggctaggacagatctagtggttgcagctcagatgcagatgctggaatagatggcaaatactttaacggatatgcaaactcagatgcggcaggaacgtcaagagatgcgctaggaaaggcaagagatgcatgaggaaataaggcaagagaggatggtacgacagcaacaagcaccaatgcctccaccgccaccaccagttccaccccgggacaaccaccgggagttcatgagtcacaagccaccgacattcgccagctctccagatcctctgcgcgctgatgattggctgaagtcagtggagaagatattgaatatcacccaatgctctgaccgggagaaggtgttttatgcttctggtcatcttaatggtcctgatgctgattggtgggattcttacattgctgctcatgatgctgccaataatatcacctgggcataattcaccacacagttcagaaactatcatattcctattggactgatgaagataaagaaaattatatatgtaggtagctttgtccatactgaggtcttggaattgtacattaatttaggaataaaaaaattcccaaccaaatttgagtttaaatttgaattctaaaatttgagaaaaggaaaccagaaaaaaagaaaatggaaaaccttcgatggg

SEQ ID NO: 54151 - DNA, 742 bp, Zea Mays
attgacagcaagtccggagagagtagctgggtggagatatcgccacgtctcaagtctcgggggcgaattcaggagctttggtcgcgttgaagggtctcgcgcgaggtgttgccgtgtatggtgggtgctcggctggtcgggaactcgccgccgtcgtgggatctccgtgtccggccactgcgggtcgtgccggctcacccaccatctcctcggtcgtcgacgagccagtgaccaaggatctaggtgtttagcaggtttgctgagcaggagctcattgaaggcaagagaagaaaaggtggtccaggaggagccatacaataaggagtacgagttgatctaggtggcgtctcctagtcagctttgtggcgctaaagaataatacttagttcgctttattattatcatttatttttataagacttccgctatgtaataatgacatttatgatattgtgacaatcatctctatacactttgtcattatatgtgatgttctttttttggcgcacatatgagacgcacccgactttatcccttaaatccaggtgtgacaagagtggtatatgaggaaatgttgactgtaggatgaaacctagatagaactggacaaaacccttacatacttaccttactctgattctgtgtatacttatcttgatcttgtctcaccttttgttgttctactctgactattcttacattttctattctaagacaaggatgatttcacactttggaatcc

SEQ ID NO: 54152 - DNA, 919 bp, Zea Mays
cctgtttctcttcctcgccacgcatctcgggcgggtggttgagcacgcgacacctccgctaaccacgactgcacctcacctttgcttcaaaagcgggctaaggaccctcttgctttctcctttgccctctcctccttctgccgccacaagaaaaaggaaagcgccgccaccagaaatagccattgacagcaagtccggagagagtagctgggtggagatatcgccacgtctcaagtctcgggggcgaattcaggagctttggtcgcgttgaagggtctcgcgcgaggtgttgccgtgtatggtgggtgctcggctggtcgggaactcgccgccgtcgtgggatctccgtgtccggccactgcgggtcgtgccggctcacccaccatctcctcggtcgtcgacgagccagtgaccaaggatctaggtgtttagcaggtttgctgagcaggagctcattgaaggagaagaaaaggtggtccaggaggagccatacaataaggagtacgagttgatctaggtggcgtctcctagtcagctttgtggcgctaaagaataatacttagttcgctttattattatcatttatttttataagacttccgctatgtaataatgacatttatgatattgtgacaatcatctctatacactttgtcattatatgtgatgttctttttttggcgcacatatgagacgcacccgactttatcccttaaatccaggtgtgacaagagtggtatatgaggaaatgttgactgtaggatgaaacctagatagaactggacaaaacccttacatacttaccttactctgattctgtgtatacttatcttgatcttgtctcaccttttgttgttctactctgactattcttacattttctattctaagacaaggatgatttcacactttggaatcc

SEQ ID NO: 54153 - DNA, 3102 bp, Zea Mays
gtaaaattgatcaaccaatctgacaacaaagtcttaacatttgattttgcttttagagacaatagagcaaattcaggcttgaaagattgcttccatctgccgactgattgaaccacatcttcgaagactactattttgatgacaccaaatagtttaaacagcaatttccctgaaaacaggagacccaaatatttctgttccagcagcagataacaccaggagaattcactgagatggcctgggaggggattgttggtgcggttgatgcagcaagattatcaaaacaacagatagtagagtcggagcacttgatgaaagctcttctggagcagaaggatgggctagcacgcaggatattttcaaaagcgggtgtagataacacatcagtcctgcaagctactgacgactttatttctagacagccaaaggttgtcggtgatacaactgggccaattataggatcaagttttgtgttgatattggataatgcaaagaagcataaaaaagaacatggtgatgaatttgtgtcagttgagcacatcctgcaagcattcacttcagataaaaggtttggacaacagctcttcaaagatctgaaaattgtggagaatgatcttaaagaagctatttcagcagtacggggaagccagcgagtcacagatcagaatccagaaggaaaataccaggctctagagaagtatggtattgacttgacagaatcagctcgacgtggaaaacttgatcctgttataggccgtgatgatgaagtgcgcagatgcattcagatcctatgtagaagaactaaaaacaatcctgtaatcattggcgagccaggagttggcaaaactgctattgctgaaggactggctcagcgtattgtacgaggagatgttcctgaacctctaatgaatagaaggcttatttcgttggatatgggagcattacttgctggagctaaattccgtggtgattttgaggagagattaaaggctgttctaaaggaggtcactgcttctaatggacagatcatcttgttcattgatgagatccatactgttgttggtgcaggagctgctggtggagcgatggatgctggtaacctgttgaagccaatgctaggccgtggagaactccgctgcattggagcaacaacattggatgagtacaggaagtacattgagaaggatgctgctcttgagcgtaggttccagcaggtttattgtggtgagccagcagttgaggataccatctccatattgcgcggtttgcgagaacgatatgaactgcatcatggtgttaagatatcagatggggctcttgttgctgctgcagttctatccgatcgatacatcactggacgttttttgcctgacaaagccattgatctagttgatgaagcagctgccaagctcaaaatggagataacatcaaagcctattgaattggatgaggtagacagagaaatcataaggcttgaaatggaaaagctctcattgaagaatgatacagataaggcctccaaagaacggctgagcaagcttgaagctgaactagaatctctcaagcagaagcagaaaagtctttcagaacattgggaatatgagaagtctttgatgactcgtataagatcaattaaagaagagactgacagagtgaacctggagattgaagctgctgagagagaatatgatttgaatcgtgctgctgaactgaagtatggaacacttttatcacttcagaaacagctggaagaggctgagaataaacttgttgaattccagcaatcagggaagtcaatgcttcgagaagaggtgactgacgtggacattgctgagattgtgagcaagtggactggtattccagtgtcgaaccttcaacagtctgaaagggaaaagctgctgctgctggaagatgtacttcacaagagggttattggccaagacattgcagttaaatcagtggccaatgccatccgccgttctagggcaggcctatcagatcctaaccgtccgatagcaagcttcatgtttatgggacctacaggtgtgggaaagactgagctgggtaagacactggctgaattccttttcaacactgagaatgccctaatacgaattgatatgagtgagtacatggagaagcacgccgtctcccgtttggttggtgccccacctggatatgttggttatgaggaagggggccaattgactgaatcagttcgtcggcgaccttactcagttgttctgtttgatgaaattgagaaagcacaccaggaagtctttaacatattgttgcaactgttggatgatggaagaatcactgattcacaaggcaggactgtcagcttcactaactgtgtcataatcatgacatcgaacattgggtcaccattgatccttgacacacttagaaacaccacagacagcaaggaggccgtgtatgagataatgaagaagcaggtgattgagatggcccggcaaacattccggccagaattcttgaacaggatagatgagtacattgtgttccaaccactggatacaaccgagatcaaccatatcgtggagatccagctgaatcgggttcagaaccggctgagacaacagaagattcatctccagtacactgcggaagccgttgagcttctggggtctcttggctttgaccctaactatggtgcgaggcctgtcaagagagtgattcagcagatggtggagaacgagattgcccttggtgtcctgaagggcgatttcaaagaagacgatactgtcctcgtggatgtaagttcggcggcgatcgcaaaaggactcgctccgcagaagaagcttgtccttcagagggtagaaaacggaaacgacgagttagttgctaatgactaggtcagatgggatcaccttttagcgagaatgttcaagtgtgatgaaacgcagctgttagctctgcgttttcgcgtatgagaaacttggccttttatttaggttctaccatgaagtcgtgtccagtctccggtggcaaaactcaatgttcaaatctctctgaatataatcttgagagctctacctcaagagctgtgaatatctgttcaggcaacccctatctttc

SEQ ID NO: 54154 - DNA, 3074 bp, Zea Mays
cttcgcttgacttgcagtgctagggcaggtttgcaagtgctctttctttgtgacaaaaacgtggggtgttttctcgagagtaagatatcttgttttgtatgtatatacagaaaaggaaaaaaaaatgtaacaagggagtcacaaggatcataaatcaaaagaggaggcggctaacatcatgataacaccaggagaattcactgagatggcctgggaggggattgttggtgcggttgatgcagcaagattatcaaaacaacagatagtagagtcggagcacttgatgaaagctcttctggagcagaaggatgggctagcacgcaggatattttcaaaagcgggtgtagataacacatcagtcctgcaagctactgacgactttatttctagacagccaaaggttgtcggtgatacaactgggccaattataggatcaagttttgtgttgatattggataatgcaaagaagcataaaaaagaacatggtgatgaatttgtgtcagttgagcacatcctgcaagcattcacttcagataaaaggtttggacaacagctcttcaaagatctgaaaattgtggagaatgatcttaaagaagctatttcagcagtacggggaagccagcgagtcacagatcagaatccagaaggaaaataccaggctctagagaagtatggtattgacttgacagaatcagctcgacgtggaaaacttgatcctgttataggccgtgatgatgaagtgcgcagatgcattcagatcctatgtagaagaactaaaaacaatcctgtaatcattggcgagccaggagttggcaaaactgctattgctgaaggactggctcagcgtattgtacgaggagatgttcctgaacctctaatgaatagaaggcttatttcgttggatatgggagcattacttgctggagctaaattccgtggtgattttgaggagagattaaaggctgttctaaaggaggtcactgcttctaatggacagatcatcttgttcattgatgagatccatactgttgttggtgcaggagctgctggtggagcgatggatgctggtaacctgttgaagccaatgctaggccgtggagaactccgctgcattggagcaacaacattggatgagtacaggaagtacattgagaaggatgctgctcttgagcgtaggttccagcaggtttattgtggtgagccagcagttgaggataccatctccatattgcgcggtttgcgagaacgatatgaactgcatcatggtgttaagatatcagatggggctcttgttgctgctgcagttctatccgatcgatacatcactggacgttttttgcctgacaaagccattgatctagttgatgaagcagctgccaagctcaaaatggagataacatcaaagcctattgaattggatgaggtagacagagaaatcataaggcttgaaatggaaaagctctcattgaagaatgatacagataaggcctccaaagaacggctgagcaagcttgaagctgaactagaatctctcaagcagaagcagaaaagtctttcagaacattgggaatatgagaagtctttgatgactcgtataagatcaattaaagaagagactgacagagtgaacctggagattgaagctgctgagagagaatatgatttgaatcgtgctgctgaactgaagtatggaacacttttatcacttcagaaacagctggaagaggctgagaataaacttgttgaattccagcaatcagggaagtcaatgcttcgagaagaggtgactgacgtggacattgctgagattgtgagcaagtggactggtattccagtgtcgaaccttcaacagtctgaaagggaaaagctgctgctgctggaagatgtacttcacaagagggttattggccaagacattgcagttaaatcagtggccaatgccatccgccgttctagggcaggcctatcagatcctaaccgtccgatagcaagcttcatgtttatgggacctacaggtgtgggaaagactgagctgggtaagacactggctgaattccttttcaacactgagaatgccctaatacgaattgatatgagtgagtacatggagaagcacgccgtctcccgtttggttggtgccccacctggatatgttggttatgaggaagggggccaattgactgaatcagttcgtcggcgaccttactcagttgttctgtttgatgaaattgagaaagcacaccaggaagtctttaacatattgttgcaactgttggatgatggaagaatcactgattcacaaggcaggactgtcagcttcactaactgtgtcataatcatgacatcgaacattgggtcaccattgatccttgacacacttagaaacaccacagacagcaaggaggccgtgtatgagataatgaagaagcaggtgattgagatggcccggcaaacattccggccagaattcttgaacaggatagatgagtacattgtgttccaaccactggatacaaccgagatcaaccatatcgtggagatccagctgaatcgggttcagaaccggctgagacaacagaagattcatctccagtacactgcggaagccgttgagcttctggggtctcttggctttgaccctaactatggtgcgaggcctgtcaagagagtgattcagcagatggtggagaacgagattgcccttggtgtcctgaagggcgatttcaaagaagacgatactgtcctcgtggatgtaagttcggcggcgatcgcaaaaggactcgctccgcagaagaagcttgtccttcagagggtagaaaacggaaacgacgagttagttgctaatgactaggtcagatgggatcaccttttagcgagaatgttcaagtgtgatgaaacgcagctgttagctctgcgttttcgcgtatgagaaacttggccttttatttaggttctaccatgaagtcgtgtccagtctccggtggcaaaactcaatgttcaaatctctctgaatataatcttgagagctctacctcaagagctgtgaatatctgttcaggcaacccctatctttc

SEQ ID NO: 54155 - DNA, 2642 bp, Zea Mays
cttcccctctctctcacctccctcctattattattgggttcttcaccgtaccccacacacacccttctcccccaaccccatctctctctctctgcctgcgttctcctggtgctgctctcgctctcctcccctgctttgacctccccgcctttccccgccgtttcttggatttctaggatccagacaaccgcccttgtgagcctgccttcctgcctactacctgcgtacgtacaggagggtccttgcttgggtgatccgggtgcctggtttctcggttccgcggcttccgctgctgttggattcgccgagccggagccgccggagatgaccgtcgacgagctgaagctgcaggcgagggccagcggcggccacggcgccaaggaccagttccccgtcggcatgcgcgtgctcgccgtcgacgacgacccgacctgcctcaagatcctcgagaacctcttgctccgctgccagtaccatggtatgccacgctcctctcgctcccctctctctctctcttccccgtatgcttggttccctactcttctcatcggattgtacatacatcctgccgttctttttcacctttattgtccccgattcggctcttcggtttggttttatttagtttccgttgttcgcgtgtatcaactatcaagaagtctacggagatatttgggttgctgtttttgcattttttttcatcacataaatagcaaccccgactttatgcccccacccccacttcctcctcctgttgttttcgccgtgaaatatttttttgccatgtaatgtcatgtcaggctcagtttcatcttctttcttctgcaaataataataattgtgacgccaagaacagtggcaatgacaacgatgattcgggtaaaaagttgcaggtggtgagcgctgaaggtgacaatggcggtgttaatcgcaacaagagaatttcacgcaagggtagggatgataatggtgatgacggtgatgattctgatgacaacagtaatgagaatggagactcgtcgagccagaagaagccaagggttgtgtggtctgttgaattgcaccgaaagtttgtggctgctgtcaaccagcttggcattgacaaggctgttccaaagaaaatattggatcttatgaatgttgagaacatcacaagggagaacgttgcaagtcatctgcagaagtatcggctgtatctgaaaagactcagcgcagatgcaagcaggcaggctaacctaactgctgcatttggaggaagaaaccctgcttatgtgaacatgggactagacgccttcaggcagtacaatgcatatgggagataccggccagttccaaccactaaccattcacagccaaacaacctccttgcaaggatgaactctcctgcatttggtatgcatggtctgctgccttcgcagccacttcagattggacacaaccagaacaatctgagcacttccctagggaatgtcggggggatgaacaacggcaacctgatcaggggtgcgcatatgccactgcaggatactagcaaatgctttcctactggcccttctggtaattcgttcgcgaacatatcaaacagcacacaactggttacgacaaacaacttgccattacagtctcttgagccaagcaaccaacaacaccttggtcggctgcattcctctgcagaccctttcaactcatttgttggtgagcccccccagtttgcagatcttggaaggtgcaacaccacctggccaaccgcggtctcatcatccaatgttcaggagattggccagaaggacaggatcgtgaataggcccaagcttgagcctctctcaagctttacagaagcatccagtcagatccctttgctgggaagtgaaatgcagagccaccaagtagcatcactagccagcaacggtcttccgatgccgttcactcaggaagcggtgcccttcgcttatggaagcagcacgaactcgagagagatgctgaataacaaccttgcgcttagtaattcaggcgtcaactctacattgccgaaccttcgcatagacggttctgttgttccagggcagacactgggtggtagcaattcaggtggttgtgttgtcccccctctgcaagatggcaggattgatcaccaagctgtcagcagtcatctaaactacaacaacgaactcatggggacaggaccgcgcagacgatggcgtctccttcattgatggggactgggaactggtctagcaagtttcagttctctacatcaagtctgccttcgtgtgagattttccgcatttgtggttgtggaggggttcggcgcttgattggtccaaagttgtttatagtagcaagattgcatcacaaatgccctttgcatttggtttttcagtttagcgaccaggttccagtgtcacgtccgaatatcaactatgtggtatttgctaccttaactcgtatggctatgttttcaagtcaggtgttaactgtggctatcgtgatatatacagcatggttatgagccaaggaatgctgtcctgtttcctcttggaaatcgttttgctgttccctttgttgattgtcactggcaatctgttccagaaagatcccagcattcgtcatttgcaattttgcatgattgcttgatagcctga

SEQ ID NO: 54156 - DNA, 2576 bp, Zea Mays
aaatatgaaagcgtaataaaaggaaaacgaaaggaggccgaaaaaaaggatccagacaaccgcccttgtgagcctgccttcctgcctactacctgcgtacgtacaggagggtccttgcttgggtgatccgggtgcctggtttctcggttccgcggcttccgctgctgttggattcgccgagccggagccgccggagatgaccgtcgacgagctgaagctgcaggcgagggccagcggcggccacggcgccaaggaccagttccccgtcggcatgcgcgtgctcgccgtcgacgacgacccgacctgcctcaagatcctcgagaacctcttgctccgctgccagtaccatggtatgccacgctcctctcgctcccctctctctctctcttccccgtatgcttggttccctactcttctcatcggattgtacatacatcctgccgttctttttcacctttattgtccccgattcggctcttcggtttggttttatttagtttccgttgttcgcgtgtatcaactatcaagaagtctacggagatatttgggttgctgtttttgcattttttttcatcacataaatagcaaccccgactttatgcccccacccccacttcctcctcctgttgttttcgccgtgaaatatttttttgccatgtaatgtcatgtcaggctcagtttcatcttctttcttctgcaaataataataattgtgacgccaagaacagtggcaatgacaacgatgattcgggtaaaaagttgcaggtggtgagcgctgaaggtgacaatggcggtgttaatcgcaacaagagaatttcacgcaagggtagggatgataatggtgatgacggtgatgattctgatgacaacagtaatgagaatggagactcgtcgagccagaagaagccaagggttgtgtggtctgttgaattgcaccgaaagtttgtggctgctgtcaaccagcttggcattgacaaggctgttccaaagaaaatattggatcttatgaatgttgagaacatcacaagggagaacgttgcaagtcatctgcagaagtatcggctgtatctgaaaagactcagcgcagatgcaagcaggcaggctaacctaactgctgcatttggaggaagaaaccctgcttatgtgaacatgggactagacgccttcaggcagtacaatgcatatgggagataccggccagttccaaccactaaccattcacagccaaacaacctccttgcaaggatgaactctcctgcatttggtatgcatggtctgctgccttcgcagccacttcagattggacacaaccagaacaatctgagcacttccctagggaatgtcggggggatgaacaacggcaacctgatcaggggtgcgcatatgccactgcaggatactagcaaatgctttcctactggcccttctggtaattcgttcgcgaacatatcaaacagcacacaactggttacgacaaacaacttgccattacagtctcttgagccaagcaaccaacaacaccttggtcggctgcattcctctgcagaccctttcaactcatttgttggtgagcccccccagtttgcagatcttggaaggtgcaacaccacctggccaaccgcggtctcatcatccaatgttcaggagattggccagaaggacaggatcgtgaataggcccaagcttgagcctctctcaagctttacagaagcatccagtcagatccctttgctgggaagtgaaatgcagagccaccaagtagcatcactagccagcaacggtcttccgatgccgttcactcaggaagcggtgcccttcgcttatggaagcagcacgaactcgagagagatgctgaataacaaccttgcgcttagtaattcaggcgtcaactctacattgccgaaccttcgcatagacggttctgttgttccagggcagacactgggtggtagcaattcaggtggttgtgttgtcccccctctgcaagatggcaggattgatcaccaagctgtcagcagtcatctaaactacaacaacgaactcatggggacaggtaggctgcaaaggggacttagtggtggtctggatgacattgtcgtggacatgtttaggccggaccgcgcagacgatggcgtctccttcattgatggggactgggaactggtctagcaagtttcagttctctacatcaagtctgccttcgtgtgagattttccgcatttgtggttgtggaggggttcggcgcttgattggtccaaagttgtttatagtagcaagattgcatcacaaatgccctttgcatttggtttttcagtttagcgaccaggttccagtgtcacgtccgaatatcaactatgtggtatttgctaccttaactcgtatggctatgttttcaagtcaggtgttaactgtggctatcgtgatatatacagcatggttatgagccaaggaatgctgtcctgtttcctcttggaaatcgttttgctgttccctttgttgattgtcactggcaatctgttccagaaagatcccagcattcgtcatttgcaattttgcatgattgcttgatagcctga

SEQ ID NO: 54157 - DNA, 2878 bp, Zea Mays
cccaaccccaccccaccgatggcactggcagcacagcagcggcgtatagaggcctgaataaacggcaggaaatatgaaagcgtaataaaaggaaaacgaaaggaggccgaaaaaaaggttaccatctttgcactgcatgagctccctccaatccaatctcccgttcaccttcctcttcccctctctctcacctccctcctattattattgggttcttcaccgtaccccacacacacccttctcccccaaccccatctctctctctctgcctgcgttctcctggtgctgctctcgctctcctcccctgctttgacctccccgcctttccccgccgtttcttggatttctaggatccagacaaccgcccttgtgagcctgccttcctgcctactacctgcgtacgtacaggagggtccttgcttgggtgatccgggtgcctggtttctcggttccgcggcttccgctgctgttggattcgccgagccggagccgccggagatgaccgtcgacgagctgaagctgcaggcgagggccagcggcggccacggcgccaaggaccagttccccgtcggcatgcgcgtgctcgccgtcgacgacgacccgacctgcctcaagatcctcgagaacctcttgctccgctgccagtaccatggtatgccacgctcctctcgctcccctctctctctctcttccccgtatgcttggttccctactcttctcatcggattgtacatacatcctgccgttctttttcacctttattgtccccgattcggctcttcggtttggttttatttagtttccgttgttcgcgtgtatcaactatcaagaagtctacggagatatttgggttgctgtttttgcattttttttcatcacataaatagcaaccccgactttatgcccccacccccacttcctcctcctgttgttttcgccgtgaaatatttttttgccatgtaatgtcatgtcaggctcagtttcatcttctttcttctgcaaataataataattgtgacgccaagaacagtggcaatgacaacgatgattcgggtaaaaagttgcaggtggtgagcgctgaaggtgacaatggcggtgttaatcgcaacaagagaatttcacgcaagggtagggatgataatggtgatgacggtgatgattctgatgacaacagtaatgagaatggagactcgtcgagccagaagaagccaagggttgtgtggtctgttgaattgcaccgaaagtttgtggctgctgtcaaccagcttggcattgacaaggctgttccaaagaaaatattggatcttatgaatgttgagaacatcacaagggagaacgttgcaagtcatctgcagaagtatcggctgtatctgaaaagactcagcgcagatgcaagcaggcaggctaacctaactgctgcatttggaggaagaaaccctgcttatgtgaacatgggactagacgccttcaggcagtacaatgcatatgggagataccggccagttccaaccactaaccattcacagccaaacaacctccttgcaaggatgaactctcctgcatttggtatgcatggtctgctgccttcgcagccacttcagattggacacaaccagaacaatctgagcacttccctagggaatgtcggggggatgaacaacggcaacctgatcaggggtgcgcatatgccactgcaggatactagcaaatgctttcctactggcccttctggtaattcgttcgcgaacatatcaaacagcacacaactggttacgacaaacaacttgccattacagtctcttgagccaagcaaccaacaacaccttggtcggctgcattcctctgcagaccctttcaactcatttgttggtgagcccccccagtttgcagatcttggaaggtgcaacaccacctggccaaccgcggtctcatcatccaatgttcaggagattggccagaaggacaggatcgtgaataggcccaagcttgagcctctctcaagctttacagaagcatccagtcagatccctttgctgggaagtgaaatgcagagccaccaagtagcatcactagccagcaacggtcttccgatgccgttcactcaggaagcggtgcccttcgcttatggaagcagcacgaactcgagagagatgctgaataacaaccttgcgcttagtaattcaggcgtcaactctacattgccgaaccttcgcatagacggttctgttgttccagggcagacactgggtggtagcaattcaggtggttgtgttgtcccccctctgcaagatggcaggattgatcaccaagctgtcagcagtcatctaaactacaacaacgaactcatggggacaggtaggctgcaaaggggacttagtggtggtctggatgacattgtcgtggacatgtttaggccggaccgcgcagacgatggcgtctccttcattgatggggactgggaactggtctagcaagtttcagttctctacatcaagtctgccttcgtgtgagattttccgcatttgtggttgtggaggggttcggcgcttgattggtccaaagttgtttatagtagcaagattgcatcacaaatgccctttgcatttggtttttcagtttagcgaccaggttccagtgtcacgtccgaatatcaactatgtggtatttgctaccttaactcgtatggctatgttttcaagtcaggtgttaactgtggctatcgtgatatatacagcatggttatgagccaaggaatgctgtcctgtttcctcttggaaatcgttttgctgttccctttgttgattgtcactggcaatctgttccagaaagatcccagcattcgtcatttgcaattttgcatgattgcttgatagcctga

SEQ ID NO: 54158 - DNA, 1739 bp, Zea Mays
ggactttaccgggctaccattcctgatccctccctccccctctcctcttcttgtcgccgtctccctgcagcgttacgctggcggaaaagaaacggagcgagcgagatcaactggcggctcaagaaaccagagggaggagtgagtgcacgcaagggtcagagaagagccgagagagcgcgcagcagtgcagtggtgtggttgtggcggagaggcaccaccacctcagcagggagctcgtcgctgccattatcctctcatccgtcgccagcgtcgtgatccccattgccgcgctgtatgccttcttgctgtggcgacgatcacggcgagccctggtggattccaaggacacccagagcatagataccgcaaggattgcttttgcgccgatgttgaacagctttggctcgtacaagactaccaagaagagtgccgcggcgatgatggattacacatctttggaggcagcgacagaaaacttcagtgagagcaatgtccttggatttggtgggtttgggtctgtgtacaaagccaattttgatgggaggtttgctgctgcggtgaagagactggatggtggggcacatgattgcaagaaggaattcgagaatgagctagacttgcttgggaagattcgacatccgaacatcgtgtcccttgtgggcttctgcattcatgaggagaaccgtttcgttgtttatgagctgatggagagtgggtcgttggattcgcaacttcatgggccatcacatggttcagctctgagctggcatattcggatgaagattgctctcgacacagcaaggggattagagtacctgcatgagcactgcaacccaccggttatccatagggatcttaagtcatctaacatacttttagattcagacttcagcgctaagatttcagactttggcctggcagtgactagtgggaatcacagcaaagggaatttaaagctttctgggactatgggctatgtggctcctgagtacttattagatgggaagctgactgagaagagcgatgtatacgcgtttggggtagtacttctagaactcctgctgggaaggaaacctgtcgagaagatggcacaatctcagtgccgatcaatcgttacatgggccatgcctcagctaactgatagatccaagctcccgaacataattgatcccatgatcaagaacacaatggatctgaaacacttgtaccaagttgctgcagtggccgtgctctgcgtgcagccagagccgagttacaggccactgatcaccgacgtgcttcactcactggtacctctagtgcccacggagcttggaggaacgctgaggatcggcccggaatcgccctacctacgctactaagaagcagtctcccatttgagtcgaatgaaactatctctcatggagtttggaattgctggttcagtatggctcgtccaagtgtggtccagataagttatgaggtcgaccacgagggttattgctccttgctttgcattgccttccttccatggtgttttgtcttgagtgccaatccgagacatgtcggagtgaattggcacggtttttggatttgtggaggagggctatgtatttcttttggctatataagaaagtaaaaaaaaaaaaagaagcccccgtatggttctgttaacttgtgtatagattgaagattttccacactaactcatctgtatcaccttttgcacctacgaaaccatgtcgattcatttcaactgc

SEQ ID NO: 54159 - DNA, 1613 bp, Zea Mays
gataaaattacaaatttctcgacccgtggagccttgcaaccaaaaccaacctacgccatcatcatccatccatccgcttgtccctcgcaccaccaccaaccaaaaacccccaactgccgaggtcgccggcgactccgtccgctccgcgccacgggtatgtcgttccactaccccgaccatgggctatccatggacgccgcggcagcggcggccgccgccgccgccgcgtcgtcgccgaaccctagcggcttctcccccggcgtcggcggggagagggagaaggcggccattgcggcgcacccgctgtacgagcgccttttggaggcgcacgtcgcctgcctccgcgtcgccacccccgtcgaccagctccctcgcatcgacgcgcagatcgccgcgcgccccccgccactagccgccgccgccggggccgcggcagcgggagggccgtccggcggcgaggagctcgacctcttcatgacgcactatgtattgctcctttgctcattcaaggaacaactccagcagcatgtacgtgttcatgcaatggaagcagtgatgggttgctgggagcttgaacaatctttacaaagcctaacaggggcatctcctggtgaaggcactggagcgaccatgtctgatgatgaagacaaccaggtggatagcgaagccaacatgtttgatggaaatgatggatcagatggtatgggctttggccccttaatgctgacagagggtgaacgatccttagttgagcgtgtacggcaggagctaaagaacgagcttaaggttacaaagaaaagcttgttgatatcagggaagagattatgcgcaagcgcagagctgggaaacttcctggagatactgcatctgtgctgaaagcttggtggcaagctcattccaagtggccatacccaactgaagacgacaaggcacgactggtgcaggaaacgggattgcagctaaagcagattaacaactggttcatcaaccaacgcaaacggaactggcacagcaacccaacatcctcgggtgaaaagactaagaagaaaaggtgatattgatccagagcaatcttgacgatgctaaacgtccactgtgtactttatggcgaagtacattaccctccctccgtagccaggagcggagatgtgcatcttgggtggcccagtggtcacttaatgccccaagtttgaccacgttgtgggactggtgctagtagtgacctctgcagtatagtaatattcactaatgttgtgggaatcatgtggtgtataaccggcgaacgggagggagtaatttatgttttattgtaattgtctatctttaccttgtaatgatattttagggagaatcccaagatctcagaatggccgttcactgtattgtcggtggtaaaagtggtgggcaatcatcgtgttcagattacctccagaagggtatgcaatggctcgaatgttccatgtcgtgtttagctggttgtcgtttgtcttacttcctgctgagttggatacttgattccttcgaagatgtaaagcacccatcgatgcagattttgtcgttctgatgtgggagcatattttgttgctcagatatgctccgagcatctcgaggag

SEQ ID NO: 54160 - DNA, 2034 bp, Zea Mays
ctcgttcccaaatctgcaagcttttaagaaaaaaacattccacccaccaaccaaactgtcaagtggtcaccagctaggtttccctttcccttccgtggcccacggctccgcgtcctcctccgcagtcggccgttcgaaccccgactactgacgccgtgttgactcgcttgcgacaaccaactgactcaagcagaaacgcacgtcctcccgtggccatggccgcggcggcgcgccgcgcgatccccctcgtcctgatcttcctcgtctcggcgcccttgtacgcggccgatgcgtcagcggcagcggcgggggccggggcgaactcgtcgtcgttcctgctcgcggcggagcagacgcagcggaaggacccgctcgatgggctgaggtactacaccggcgggtggaacatcagcgacgagcactactgggcctccgtcggcttcaccgcggcgccggtgttcgcggcggcggctgtctggttcgtcgtgttcggcattgggctgttcatcgccggctgctgcttctgctgctgcccgggcgccggcgacgcgtactcgcgcgcgtgcctgtgcgtctcgctcgtgctcctcctcgtcgccacggccgcggcagctgtcggctgcgccgtgctgtacgacgggcagggcaggttccacggcagcacggtggcgacggtggactacgtggtgcggcagtcgggcgacacggtggccaacctgcagcgcttcacgggcttcctggagaccgccaaggccgccggcgtggggcccgtcgcgctgcccgacgacgtcaaggggaggatcgacgacgtcgtgcgcaaggtgggcgcggcctccgacgagctcgccgcccgcacggccagcaacgccgccaagatccgcgccgccctggagacaaaggaaggttctgatagttgttgcggcggcgatgctaatcctcgcttttcttggccttgtgttctcgctgtgtgggttggaatcgattgtctacgtgttggtgttcctggggtggatcctggttgcagggacgcttgtactgtgcggtactttcctcctcctgcacaacgtggtggacgacacgtgcgtggcgatgggcgagtgggtgcagcacccgcaggcgcgcacggcgctggacgacatcctgccgtgcgtcgacacggccgcggccaaggaggcgctgaaccggagcaaggaggtgaactaccagctggtggccgtgctcaacgccgcgctcaccaacgtctccaaccgcgacttcccgccgcaggtcccgccgccgctcaactacaaccagtcgggcccgcccgtgccgctgctctgcagcccctacgcggcggacctccgcgaccgcgcgtgcgcgccgggcgaggtgcccctcgacgccaccacgccgcggcaggcgtggcagcgatacgtgtgccgtggcgtctccgcggacgccgggtcgggggccgaggtgtgcacgtccccggggcgcgtcacgccgtccatgtacgcgcagctcaccggcgcggccgacgtcagctacgggctgtaccactacggccccgccctggtggcgctggcggactgcaccttcgtcagggagacgttccggtccatcggcgacgaccactgcccgggcctcagccggtacagcggccaggtgttccggggcttgctcgccgccgccgtcgccgtgctgctggcagtgctgctctgggtcgtgcactcgcgggagcgccggcggcggagcgaggccatggagatcctgtgtctggcctcgtcgccctacaagtatcctctggaggagagggcgtttctcaagagccccgcgaggccgtacatgtaatttaaactgacttaaacaccgtccgacaaaatggggcgtattatacctggtagacattggtgttctcatatgtgctaaatttggagagagaaaaaatatatggcggatgaactgctatcacagacaacaaaagcaagaaagatgaaacataactagactaaactagaggctccatcggaccctcctgatgccgtgggcctcaac

SEQ ID NO: 54161 - DNA, 2057 bp, Zea Mays
gtcgtttcttggcgagtagtaacgcaagcttagctttggctgtggcagtctatctatctagcacctcgtcgttttcttcatccattccatcccctcgttcccaaatctgcaagcttttaagaaaaaaacattccacccaccaaccaaactgtcaagtggtcaccagctaggtttccctttcccttccgtggcccacggctccgcgtcctcctccgcagtcggccgttcgaaccccgactactgacgccgtgttgactcgcttgcgacaaccaactgactcaagcagaaacgcacgtcctcccgtggccatggccgcggcggcgcgccgcgcgatccccctcgtcctgatcttcctcgtctcggcgcccttgtacgcggccgatgcgtcagcggcagcggcgggggccggggcgaactcgtcgtcgttcctgctcgcggcggagcagacgcagcggaaggacccgctcgatgggctgaggtactacaccggcgggtggaacatcagcgacgagcactactgggcctccgtcggcttcaccgcggcgccggtgttcgcggcggcggctgtctggttcgtcgtgttcggcattgggctgttcatcgccggctgctgcttctgctgctgcccgggcgccggcgacgcgtactcgcgcgcgtgcctgtgcgtctcgctcgtgctcctcctcgtcgccacggccgcggcagctgtcggctgcgccgtgctgtacgacgggcagggcaggttccacggcagcacggtggcgacggtggactacgtggtgcggcagtcgggcgacacggtggccaacctgcagcgcttcacgggcttcctggagaccgccaaggccgccggcgtggggcccgtcgcgctgcccgacgacgtcaaggggaggatcgacgacgtcgtgcgcaaggtgggcgcggcctccgacgagctcgccgcccgcacggccagcaacgccgccaagatccgcgccgccctggagacagtaaggaaggttctgatagttgttgcggcggcgatgctaatcctcgcttttcttggccttgtgttctcgctgtgtgggttggaatcgattgtctacgtgttggtgttcctggggtggatcctggttgcagggacgcttgtactgtgcggtactttcctcctcctgcacaacgtggtggacgacacgtgcgtggcgatgggcgagtgggtgcagcacccgcaggcgcgcacggcgctggacgacatcctgccgtgcgtcgacacggccgcggccaaggaggcgctgaaccggagcaaggaggtcccgccgccgctcaactacaaccagtcgggcccgcccgtgccgctgctctgcagcccctacgcggcggacctccgcgaccgcgcgtgcgcgccgggcgaggtgcccctcgacgccaccacgccgcggcaggcgtggcagcgatacgtgtgccgtggcgtctccgcggacgccgggtcgggggccgaggtgtgcacgtccccggggcgcgtcacgccgtccatgtacgcgcagctcaccggcgcggccgacgtcagctacgggctgtaccactacggccccgccctggtggcgctggcggactgcaccttcgtcagggagacgttccggtccatcggcgacgaccactgcccgggcctcagccggtacagcggccaggtgttccggggcttgctcgccgccgccgtcgccgtgctgctggcagtgctgctctgggtcgtgcactcgcgggagcgccggcggcggagcgaggccatggagatcctgtgtctggcctcgtcgccctacaagtatcctctggaggagagggcgtttctcaagagccccgcgaggccgtacatgtaatttaaactgacttaaacaccgtccgacaaaatggggcgtattatacctggtagacattggtgttctcatatgtgctaaatttggagagagaaaaaatatatggcggatgaactgctatcacagacaacaaaagcaagaaagatgaaacataactagactaaactagaggctccatcggaccctcctgatgccgtgggcctcaac

SEQ ID NO: 54162 - DNA, 2565 bp, Zea Mays
cttcttcatataggatcaaagagctgttcccatttaggcctgtttcatagtgagcgcagcaattctttcacaaggagctacatctttccttttcactgagtacaagtatgttggattattcatgggcatctttgcaatccttatattcctcttccttgggtctgtcgagggattcagcacgaagagtcaaccttgccactatatcaaggaccagacttgcaagcctgcccttgctaatgccatcttcagtactatagcttttgtgcttggtgcagtcacctcactagtttccggctttcttggaatgaagatcgcaacttatgcgaatgcccggacaactttagaggccagaaagggtgtcggaaaggcatttattactgccttccgagctggtgcagtaatgggcttcctgcttgctgccagcggtcttttggttctttacattgctatcaatttgtttggaatttattacggtgatgactgggaaggtctttttgaagctattactggttatggccttggtggttcttctatggctcttttcggccgcgttggtggtggtatttataccaaggctgctgatgttggtgctgaccttgtggggaaggtagaaagaaacattcctgaggacgatccaagaaacccagctatctctttggctcatatgctgaatcatcatgtgctgctcttgttgtggcctctatctcgtcttttggaatcaaccatgaatttactccgatggtgtaccctcttctcgtcagttctgttggtattatagcatgtctcataacaacgctgtttgcaactgatttcttcgagataaaggctgtggatgaaatagagcctgctctcaagaaacagctcataatttccacaattgtgatgaccattggcattgcactaatcagttggcttggtcttccatacactttcactattttcaactttggagtccagaagacagtgcaaagctggcaattgttcttgtgtgtggcggttggtctctgggctggcctagtcattggttttgttactgagtactacacaagcaatgcctacagccctgtacaagatgttgctgattcctgcagaactggagcagctactaatgtcatttttgggcttgctttgggttacaaatcagtcattatcccaatttttgctattgcgtttagtatcttcctcagcttcagccttgctgccatgtatggtgttgctgtggctgctcttggaatgctgagcaccattgccacaggtcttgctattgatgcatatggccctatcagtgataatgctggaggaatagctgaaatggctgggatgagccataggattcgtgagagaactgatgctctagatgctgcaggaaataccacggctgcaattgggaagggttttgccattggctctgcagccttggtttcccttgcactatttggtgcgtttgtaagccgggctgctatctccactgttgatgttctgactcctaaagtattcatcgggcttattgtcggtgctatgctcccgtactggttctcggcaatgaccatgaagagtgtgggcagtgctgcgctcaagatggtggaggaagttcgtcggcagttcaacaacatccctgggctcatggaaggcaccacaaagcctgactacgcaacttgtgtcaagatctcaacggatgcatccatcaaggagatgatccccccaggtgctcttgttatgctcacaccactgatcgttgggattctatttggggttgagaccctctctggagtccttgctggtgcccttgtctctggtgttcagattgccatttctgcatccaacactggtggtgcctgggacaacgccaagaagtacattgaggctggagtttcagagcatgccaggacccttggcccaaaaggttctgaccctcacaaggcggctgtcattggtgacaccattggagatcctctcaaggacacgtctggcccttccctcaacatcctcatcaagcttatggcggttgaatcccttgtcttcgcccccttcttcgccgcccatggtggcattctcttcaaatggctctaagccagcgagagacgcaggataaaggccgtagttttgcaaggcgagtagagcagtatgtcagtaatacagcatctatggcatgtgcttttgctcgtccagttcatgagccccgttgtgtatttggtttccgttttcttggttggagtttttagttccaaggtccgatcatgttttgatcccataaattctcttccagccttcgagcaactgagtccatcttcctaagtcatcagccccagcgagacattgaagcatggggaaacttaaacagtatggtgatgattaatctcagcattttttttcttgcagcaatcaatatggactttgcttaaaatttcgttgtcttttcaaaacgatatgcaagcaaaatggaagtgatgttctttgaaactttgtttcaatgctatagcaaaggtttgcattttacaaagttcggtttagtgacgaccatttagatgacatagattatgcttttcgtattttggtagcttctcg

SEQ ID NO: 54163 - DNA, 2570 bp, Zea Mays
attaactgtagtcggtccagacttcatcttgtgggatccacatggtctacatcctgccgcgctttggagctacatctttccttttcactgagtacaagtatgttggattattcatgggcatctttgcaatccttatattcctcttccttgggtctgtcgagggattcagcacgaagagtcaaccttgccactatatcaaggaccagacttgcaagcctgcccttgctaatgccatcttcagtactatagcttttgtgcttggtgcagtcacctcactagtttccggctttcttggaatgaagatcgcaacttatgcgaatgcccggacaactttagaggccagaaagggtgtcggaaaggcatttattactgccttccgagctggtgcagtaatgggcttcctgcttgctgccagcggtcttttggttctttacattgctatcaatttgtttggaatttattacggtgatgactgggaaggtctttttgaagctattactggttatggccttggtggttcttctatggctcttttcggccgcgttggtggtggtatttataccaaggctgctgatgttggtgctgaccttgtggggaaggttattgctgacaatgttggtgataatgttggagatattgctggaatgggatcagatctctttggctcatatgctgaatcatcatgtgctgctcttgttgtggcctctatctcgtcttttggaatcaaccatgaatttactccgatggtgtaccctcttctcgtcagttctgttggtattatagcatgtctcataacaacgctgtttgcaactgatttcttcgagataaaggctgtggatgaaatagagcctgctctcaagaaacagctcataatttccacaattgtgatgaccattggcattgcactaatcagttggcttggtcttccatacactttcactattttcaactttggagtccagaagacagtgcaaagctggcaattgttcttgtgtgtggcggttggtctctgggctggcctagtcattggttttgttactgagtactacacaagcaatgcctacagccctgtacaagatgttgctgattcctgcagaactggagcagctactaatgtcatttttgggcttgctttgggttacaaatcagtcattatcccaatttttgctattgcgtttagtatcttcctcagcttcagccttgctgccatgtatggtgttgctgtggctgctcttggaatgctgagcaccattgccacaggtcttgctattgatgcatatggccctatcagtgataatgctggaggaatagctgaaatggctgggatgagccataggattcgtgagagaactgatgctctagatgctgcaggaaataccacggctgcaattgggaagggttttgccattggctctgcagccttggtttcccttgcactatttggtgcgtttgtaagccgggctgctatctccactgttgatgttctgactcctaaagtattcatcgggcttattgtcggtgctatgctcccgtactggttctcggcaatgaccatgaagagtgtgggcagtgctgcgctcaagatggtggaggaagttcgtcggcagttcaacaacatccctgggctcatggaaggcaccacaaagcctgactacgcaacttgtgtcaagatctcaacggatgcatccatcaaggagatgatccccccaggtgctcttgttatgctcacaccactgatcgttgggattctatttggggttgagaccctctctggagtccttgctggtgcccttgtctctggtgttcagattgccatttctgcatccaacactggtggtgcctgggacaacgccaagaagtacattgaggctggagtttcagagcatgccaggacccttggcccaaaaggttctgaccctcacaaggcggctgtcattggtgacaccattggagatcctctcaaggacacgtctggcccttccctcaacatcctcatcaagcttatggcggttgaatcccttgtcttcgcccccttcttcgccgcccatggtggcattctcttcaaatggctctaagccagcgagagacgcaggataaaggccgtagttttgcaaggcgagtagagcagtatgtcagtaatacagcatctatggcatgtgcttttgctcgtccagttcatgagccccgttgtgtatttggtttccgttttcttggttggagtttttagttccaaggtccgatcatgttttgatcccataaattctcttccagccttcgagcaactgagtccatcttcctaagtcatcagccccagcgagacattgaagcatggggaaacttaaacagtatggtgatgattaatctcagcattttttttcttgcagcaatcaatatggactttgcttaaaatttcgttgtcttttcaaaacgatatgcaagcaaaatggaagtgatgttctttgaaactttgtttcaatgctatagcaaaggtttgcattttacaaagttcggtttagtgacgaccatttagatgacatagattatgcttttcgtattttggtagcttctcg

SEQ ID NO: 54164 - DNA, 2731 bp, Zea Mays
aaaattggtcgtaatagtttggtcgtatggtcagaagctgcctgtggggtaacagatgaggggataagtcccagcggtctgagaagtacacaggagtggccagtggggttgcagataaagagataagttctcgcagcacgtggtcctcgctactcaatcttcactgcagctgatattaactgtagtcggtccagacttcatcttgtgggatccacatggtctacatcctgccgcgctttggagctacatctttccttttcactgagtacaagtatgttggattattcatgggcatctttgcaatccttatattcctcttccttgggtctgtcgagggattcagcacgaagagtcaaccttgccactatatcaaggaccagacttgcaagcctgcccttgctaatgccatcttcagtactatagcttttgtgcttggtgcagtcacctcactagtttccggctttcttggaatgaagatcgcaacttatgcgaatgcccggacaactttagaggccagaaagggtgtcggaaaggcatttattactgccttccgagctggtgcagtaatgggcttcctgcttgctgccagcggtcttttggttctttacattgctatcaatttgtttggaatttattacggtgatgactgggaaggtctttttgaagctattactggttatggccttggtggttcttctatggctcttttcggccgcgttggtggtggtatttataccaaggctgctgatgttggtgctgaccttgtggggaaggtagaaagaaacattcctgaggacgatccaagaaacccagctatctctttggctcatatgctgaatcatcatgtgctgctcttgttgtggcctctatctcgtcttttggaatcaaccatgaatttactccgatggtgtaccctcttctcgtcagttctgttggtattatagcatgtctcataacaacgctgtttgcaactgatttcttcgagataaaggctgtggatgaaatagagcctgctctcaagaaacagctcataatttccacaattgtgatgaccattggcattgcactaatcagttggcttggtcttccatacactttcactattttcaactttggagtccagaagacagtgcaaagctggcaattgttcttgtgtgtggcggttggtctctgggctggcctagtcattggttttgttactgagtactacacaagcaatgcctacagccctgtacaagatgttgctgattcctgcagaactggagcagctactaatgtcatttttgggcttgctttgggttacaaatcagtcattatcccaatttttgctattgcgtttagtatcttcctcagcttcagccttgctgccatgtatggtgttgctgtggctgctcttggaatgctgagcaccattgccacaggtcttgctattgatgcatatggccctatcagtgataatgctggaggaatagctgaaatggctgggatgagccataggattcgtgagagaactgatgctctagatgctgcaggaaataccacggctgcaattgggaagggttttgccattggctctgcagccttggtttcccttgcactatttggtgcgtttgtaagccgggctgctatctccactgttgatgttctgactcctaaagtattcatcgggcttattgtcggtgctatgctcccgtactggttctcggcaatgaccatgaagagtgtgggcagtgctgcgctcaagatggtggaggaagttcgtcggcagttcaacaacatccctgggctcatggaaggcaccacaaagcctgactacgcaacttgtgtcaagatctcaacggatgcatccatcaaggagatgatccccccaggtgctcttgttatgctcacaccactgatcgttgggattctatttggggttgagaccctctctggagtccttgctggtgcccttgtctctggtgttcagattgccatttctgcatccaacactggtggtgcctgggacaacgccaagaagtacattgaggctggagtttcagagcatgccaggacccttggcccaaaaggttctgaccctcacaaggcggctgtcattggtgacaccattggagatcctctcaaggacacgtctggcccttccctcaacatcctcatcaagcttatggcggttgaatcccttgtcttcgcccccttcttcgccgcccatggtggcattctcttcaaatggctctaagccagcgagagacgcaggataaaggccgtagttttgcaaggcgagtagagcagtatgtcagtaatacagcatctatggcatgtgcttttgctcgtccagttcatgagccccgttgtgtatttggtttccgttttcttggttggagtttttagttccaaggtccgatcatgttttgatcccataaattctcttccagccttcgagcaactgagtccatcttcctaagtcatcagccccagcgagacattgaagcatggggaaacttaaacagtatggtgatgattaatctcagcattttttttcttgcagcaatcaatatggactttgcttaaaatttcgttgtcttttcaaaacgatatgcaagcaaaatggaagtgatgttctttgaaactttgtttcaatgctatagcaaaggtttgcattttacaaagttcggtttagtgacgaccatttagatgacatagattatgcttttcgtattttggtagcttctcg

SEQ ID NO: 54165 - DNA, 1601 bp, Zea Mays
tgtttggctggcaattgttcttgtgtgtggcggttggtctctgggctggcctagtcattggttttgttactgagtactacacaagcaatgcctacagccctgtacaagatgttgctgattcctgcagaactggagcagctactaatgtcatttttgggcttgctttgggttacaaatcagtcattatcccaatttttgctattgcgtttagtatcttcctcagcttcagccttgctgccatgtatggtgttgctgtggctgctcttggaatgctgagcaccattgccacaggtcttgctattgatgcatatggccctatcagtgataatgctggaggaatagctgaaatggctgggatgagccataggattcgtgagagaactgatgctctagatgctgcaggaaataccacggctgcaattgggaagggttttgccattggctctgcagccttggtttcccttgcactatttggtgcgtttgtaagccgggctgctatctccactgttgatgttctgactcctaaagtattcatcgggcttattgtcggtgctatgctcccgtactggttctcggcaatgaccatgaagagtgtgggcagtgctgcgctcaagatggtggaggaagttcgtcggcagttcaacaacatccctgggctcatggaaggcaccacaaagcctgactacgcaacttgtgtcaagatctcaacggatgcatccatcaaggagatgatccccccaggtgctcttgttatgctcacaccactgatcgttgggattctatttggggttgagaccctctctggagtccttgctggtgcccttgtctctggtgttcagattgccatttctgcatccaacactggtggtgcctgggacaacgccaagaagtacattgaggctggagtttcagagcatgccaggacccttggcccaaaaggttctgaccctcacaaggcggctgtcattggtgacaccattggagatcctctcaaggacacgtctggcccttccctcaacatcctcatcaagcttatggcggttgaatcccttgtcttcgcccccttcttcgccgcccatggtggcattctcttcaaatggctctaagccagcgagagacgcaggataaaggccgtagttttgcaaggcgagtagagcagtatgtcagtaatacagcatctatggcatgtgcttttgctcgtccagttcatgagccccgttgtgtatttggtttccgttttcttggttggagtttttagttccaaggtccgatcatgttttgatcccataaattctcttccagccttcgagcaactgagtccatcttcctaagtcatcagccccagcgagacattgaagcatggggaaacttaaacagtatggtgatgattaatctcagcattttttttcttgcagcaatcaatatggactttgcttaaaatttcgttgtcttttcaaaacgatatgcaagcaaaatggaagtgatgttctttgaaactttgtttcaatgctatagcaaaggtttgcattttacaaagttcggtttagtgacgaccatttagatgacatagattatgcttttcgtattttggtagcttctcg

SEQ ID NO: 54166 - DNA, 667 bp, Zea Mays
atggccaagagcatgcgtggagggatgaggcgcggcgcgagaaagaagacagctgggtcggagagcaccagccgggaagtgtcgaggataccgaggtgcacgataggatgtggaggagaacgtaccttcgccgtggctgtggggactgtggacctgcggtcgccgagaagatgccggagagtatctgctgtccgtcatatatttttttttcttttttgtttcctccagcaggacggatctatcgaaacactcgacgcttttagacctcagcgtcgacctttgcgtcagcgtttattatgctttccatgtcgatgggcggcgcagaagaagagcgaggagggcacgacggagaggtcgactatgcgacagaacaacacgagatccctctgtctcgtcggcgtccgggatggccaagagcatgcgtggagggatgagacgcggcgcgagaaagaagacagctgggtcggagagcaccagccgggaagtgtcgaggatactgaggtgcacgataggatgtggaggagaacgtaccttcgccgtggctgtggggactgtggacctgcggtcgccgagaagatgccggagagtatctgctgtccgtcatatatttttttcttttttgtttcctccagcaggacggatctatcgaaacactcgacgcttctag

SEQ ID NO: 54167 - DNA, 1551 bp, Zea Mays
aaggatcatacgggtcgacgtggccccctctgctcgcttctaggtgcagagccttccttatgtaaactagtaacttacgcacggcttcgcgcgcgcgttgagatgaagcttatcggtgtcacatgtgttgaaatggcataatataatactccttccgtcccattttggtggtctcgggtcgcgtgaacccgtcctagtcttgaaaaaacccaaaggcaagttgacatatgcaaaggttgtgatgagagatcctcagttgggtattaatcgatttagattgtcgttacttcgaaataaagactggatcactgctatgcatcgtagttaaaaagtgaaactaaagttggtaaatgaaagctagattaggccaagtgactactcagagttttattcttatgtttttgcaggagaggtcatcgatactttttacttttgttagttgaaaattgttgcagcttttggaggatgggatgtttatgtatgaacttttgggaatgtttctaccttccaagttttgtaataagttatgttgcgcgcgttgagatgaagcttgtcgtaacatgtgttgccgcacatataggccctgtttgtttcggcttctggcagcttctggccaccaaaagctgttgcggactgccaaacgctcagctttttagccagcttctataaaaattgttggggcaaaaaccatcaaaaatcaacatagacaaataatcggttgagtcgttctaatagtaggaatccatcactttctagatcctgagccctatgaacaactttatcttcctccacacgtaatcgtaattatactcagattttccccacagtcagattctccccacagccagattttcagaaaagctggtcagaaaaaagctgaaccaaacaggcccatatatatatgcttcatgaaatagcataatataatacttcctccgtcccattttattgttcattttagtaccatattttttgtgtccatatttaaatagatgacaataaatctagacatatataaaacacatacaccaaatattgtaggtggacctgattgaccatgggttggcacaacatccccgtgacagtactgatgaagtgatgagcacctttgcttgcagtttccgtatgcgaaggaggtttggttgtagattagaaattgagctggataggggatccggttgcaacagaagattggtggttggtctcattgcaaggtcacaatgctagacaaaggaggagaccaattgcaacattggttatgcatactgctttggagcatttggaagaagaggtatagaagaatctttgatggcgaagtgaactcaccggtgcaagttttcaatctagcaagaagaaattaaatggcattgcaggacataatgagatattatcttatatagtcctctattagccaaactacatgctgcaagaaactctcgtgtcgtcactcgtcaacttgtcaagtttgcactaaccactcttctatacaactggttgcattctggttttggttcctagatgatggctccaataagtggatcaaagtaaaag

SEQ ID NO: 54168 - DNA, 1981 bp, Zea Mays
ctatacgtgcgggcgcgtgtgtcgcggcccgacagcctgggtgggcacgccgtgtgtgcgggggcggtccagacggacacgtcgtgtgtcggcggtccagttccaacacaagcgtcccactatctgtgcctcttcctggctctgatcctaccgctcctgctcctcaggctactcagggggcgccgcagcgacagcggcgtccggctgccgcccggcccatggcggctgccggtgatcggcagcctacaccacctcgtgggcaagccgctggtgcaccgcgcgttcgccgacctcgcgcgccgtctggacgcgccgctcatgtacctcaggctcggcgaggtccccgtcgtggtggccacgtcccgggacgccgcgcgcgaggtcctgcggacgaacgacgtcacgttcgccacgcggccgtggagccccacgatgaagatcatgatgcaggacgggctgggcatggtgttcgcgccctacggcgaccactggcgccagctccggaagatcagcatcctggagctgctcagcgcccgccgcgtccagtcgtttcgccacgtccgggaggacgaggtggcgcgcctcgtcgccgcagtcgccgccaccgcaccaggccagcccgtcaacgtcagccaccggatcgccgtgctcgtcgccgattcggcggtgcgcgccatgatcggggacaggttcagcaggcgggacgagttcttggtgtcgctcgaggaggggctcaagctcgtctccgggttcagcctaggcgacctattcccgtcatcgccgtttatgaacttcctcagcgggacggcacggcgagcgcatgcgaaccataggaagaactttgagctcatggaatgcgccatcaagcagcacgaggaaaggagagcccaagcggcggtgaacggcgctgctgtccaggaggaggaagcagaggacctagtggacgtgctcttgaggatacaaaaggatggcggcctcgacatgcctctcacaatgggaataatcaaagccgttatacttcgctggaagtgagacatcagcaactacactgaactgggcaatggcggagcttatgaggtgcccggatgtgatgaagaaagcacaagccgagctacgcgacagcctcaatggtaagccgaaagtgaccgaagatgacttggtagagatgaaatacttgaagctcatcatcaaggaaacgttgaggctgcatccagcggcgccattgcttgtgccaagggaagcaagggactcatgcaagatccttgggtacgacgtgccaaagggcaccacggtgttcgtgaacgcgtgggccattggcagggatcctgagtattgggatgatgctgaagagtttaagcctgagcgatttgagtgtggcacggtcgacttcaagggcatggactttgagtacataccgtttggtgccggtagaaggatatgccctgggatggtgtttgcacaggccaatatagagctcgcgctggctgcgctgctctaccacttcgactggaagctcgaagaggggctggagccaagtgagctggacatgactgaggacataggcctcactgttcgaaagaagaacgacatgcttttgcatcccagcgttagagtgccccataaatattgatgactaaatggaccagcactaagcatgacaaatctagcatggccaagcaccgcattatgttaactaatagtttctgtgtcggcatggaccagtgcatagcgtcgtgtttaggttactacctaaatctctagtgtcggttgaaacacgacacgattaagaagcaggcactattgagtcggattatatgataaagttgtaataatttttagacttgaataatagatttgtaacttaaataaactcagaaggactctttttttctatctatctagagttttctaatgaggtgtgagtgttttgataggttttaaatgaggttgtcattgcaattaatagcttagttaatgtata

SEQ ID NO: 54169 - DNA, 925 bp, Zea Mays
ctcccctctaggacccgacgctacgcgagagtagatcacgatgggtgttgcgaagcacgaagagaccagtaaagtcgagaaagacagtgttctcagagtaacacgggaaggaaaggaacggaggaaacgttgggcccaacgaagaacatcctctaaaccagataagaaggcgccaaaggaagtagaagatgaagatactaaaaaaagtgaggagcatgaggagacaaatactatgcctggcatgctccccactagtgtaattgaaattctagcagctcgtgagaagcaaaccttcgcatcagattccgaggaagaaaatgtaaagcagaaggtccagaggagaaagaagagaatgaaaactgatgggcctgaaactattctgctgaaagatgtccgttcaacgcaacacgtgaagaatgcccttgatttcttggagcataggaaaaatcgtgtcccaaggtcaaatgcagttttgaagaatgccagtaaggctttgcgtctcctgtcttcgaaaggtaattttctaagttaagcgtgtggtagaatagcacattttctgaatctgtgcttagaccatcctctcgacatcagacatggtcaagagacttaggaccaatgtgttggaatggaatctacctggcatgtgaaatgtaatgcagcatatccttttgtgtgaatgtgatgattagcacacatgttccttgtaagaaatccaaggtttgtaatcattgaatatatttgagtttgagttatctatttatatgtttgagttttggttaactattccatagttagttaagttgacagatccatttttaacttttaaacagtcaagcgaggcgaccccttaaatttattttaaaatagaaaaatatttatatttaagaaaacatttaggataaaaataataataaagaagagaaaa

SEQ ID NO: 54170 - DNA, 846 bp, Zea Mays
ctcccctctaggacccgacgctacgcgagagtagatcacgatgggtgttgcgaagcacgaagagaccagtaaagtcgagaaagacagtgttctcagagtaacacgggaaggaaaggaacggaggaaacgttgggcccaacgaagaacatcctctaaaccagataagaaggcgccaaaggaagtagaagatgaagatactaaaaaaagcaaaccttcgcatcagattccgaggaagaaaatgtaaagcagaaggtccagaggagaaagaagagaatgaaaactgatgggcctgaaactattctgctgaaagatgtccgttcaacgcaacacgtgaagaatgcccttgatttcttggagcataggaaaaatcgtgtcccaaggtcaaatgcagttttgaagaatgccagtaaggctttgcgtctcctgtcttcgaaaggtaattttctaagttaagcgtgtggtagaatagcacattttctgaatctgtgcttagaccatcctctcgacatcagacatggtcaagagacttaggaccaatgtgttggaatggaatctacctggcatgtgaaatgtaatgcagcatatccttttgtgtgaatgtgatgattagcacacatgttccttgtaagaaatccaaggtttgtaatcattgaatatatttgagtttgagttatctatttatatgtttgagttttggttaactattccatagttagttaagttgacagatccatttttaacttttaaacagtcaagcgaggcgaccccttaaatttattttaaaatagaaaaatatttatatttaagaaaacatttaggataaaaataataataaagaagagaaaa

SEQ ID NO: 54171 - DNA, 996 bp, Zea Mays
actgaagcatcacttttgtttgaaaacaaaacatttttgtttgctaaagcaaggctaagcatcataaaattctttttcaaaaagggtatcaaggaagggtaatcaatttttcaaggaaggaaatgcatcaacggtttagcacacaactcctatcacctaatgcatcaaacaaggtgataaagattttaaaacacaaggaggtggcgaatgcaccgggcttgcctgaataacactaggttagtgtttgttaggcgacgtccacttgacgatcatcattgtcctggcacttgatcaggcaggttcgtccattagcatcgccatgcggagtagcccgcgcttggggtcgacttgggtcatcttccgcatcacgtgattaattatcgtacctcatgagatgcatgatgcacatgtatgagcatgagtataacgagtataatatagataatctatagtaaaaaggatgaaacacttaaaatcaagcattaagcaccatgaatatcacagcagggcatcgactacatccattaaccaaattgacataataacactagaacatctatttttattcctagctttttatcaactctttaactgtctatcttaattacttgatttacctatttatctaaatcgatcatcacaatatatgcatgctaaattaatagcatttattgcgaccaacaattctatttaatctatttatagacctaattgactagaatatgaattaacttacccttatgacatccgacttgaaaccacaaaattgacgactggttcgagcttttgtcgagcacttggtgaatatcacccgactagcttcgccttcacccgatgcttgggatttcttggggatgcacgaacaacgacgaccttcgattgaagtctggagcgagctggtgaggacacgaattcagtgaggactctgacgacagcgagatcacgagctctaacgacacagggttaagcgacgaacgcgtttggcggccacatgtg

SEQ ID NO: 54172 - DNA, 1058 bp, Zea Mays
ggagaaagagaaggaaaatactatacaaaaaagagaaataaatatacaaatacataaaaccctcgcatactggtgtgctcaatttgtacatttaaaatgagtacaaattcacaattaaatttgaaatccaaaaataaaaataaaaagaaaagcaaaaaggaaaaagaaaagggaaattaaaaaggaaaaaggcgcgtgggccgaattcatcaagccggcccagttacctccacgctactgcgacccagccggcttccgtgcgccgacatgcggggccctgcggtcagctggacttgtcgcctgaacgtgatcaccactgactggcgcacaggcccacacgtcaagcagctctactgctcttcccgggcgcgtcggcgcaacctcccccacgaaatccgcacacgcttgcgcccatctcaccaactatgaccgcgtgacccgcccgcctatatagccaacccgacctcgccgctcttgcctcaatccataccgcgagaaggtctcgggagcgataccgagggagaagagagacccgccgccgccttatttactcggcatcaccggagcacgaccattgggttgccaggggtgctaactaagactggtggaaccgattggtggggtttcgaggctcggtgaccgaccgtggaatacccaattgctcaccggagtgctctactcgcagcaaagccgctatttgccatgggcagctctctgggcatcaaatccatcacaggagaagaacatgtggtctagcaggagccttacaacgaggagtacgagcttatctaggtggcgtctcccagtcagcttgatggcgccgaggaataatacttagttcgttttattgttcttattcatttttgtaagacttctgctatataataatgatatttgtgacatttatctctatacactttgtaattatatgtgatgttcttctttggcgcacatatgagacgcacccgtctttatcccttaaatcctggtgtgacagaagtggtatcagaggaaatgttgactgtatgatgagacctatataaaactggacaaaaccc

SEQ ID NO: 54173 - DNA, 865 bp, Zea Mays
acgaagctacctctaaggctcaagctgaagcccaaaaacgcgaaattaaagatcttcagaaacagctagccagagctaaagaagaacgtatacttgaagagacaaaacgagagcttagtgatcaatgggccaatcatttagaaataaatgttaaagagcttcgtgcatcccagagaagatgctatgataaatccatagtgtgtgttaagaagataaaatccagcttcgccaacgttggcgcattctctagcgaagagaatttctcaaggggcaatcccgaaggtccgacggaatgggtcagtcatgaagctgaggccttcgaggaaatcctgaatagccgcggagacatatgtgctttttcgggtgctagaggaattgctactgttttagagagtaaaggttgcgagcatgtaaaatctttagcgcaatccgaagctactttgtcctccgaagacattaaagacccctcagccgaagcaagcatgatcggcggaaaatttttcaccgatatttgggacaacggcggccgagaaatggcccaagaaattattcaaaagagcgaaaaaggtatccatgatgctagaaaagtagcagaggctgctgagaaaagtacagagcccgaagggcaaataggtattaattagtggtttttattctgttgtaatttttgattccagactttgttcgcggtttgtaatagtaatatagtcgtatcttctcctccctcagaacctgctgaggcatctccgggcccccacccgaagggggacgatgaaattagaaaaatggccgaagccatcatggacaaggttgtcgaccagctactgaacgaagctgcagaaatagttcttaaggaagattaaat

SEQ ID NO: 54174 - DNA, 389 bp, Zea Mays
tccataccgcgagaaggtctcgggagcgataccgagggagaagagagacccgccgccgccttatttactcggcatcaccggagcacgaccattgggttgccaggggtgctaactaagactggtggaaccgattggtggggtttcgaggctcggtgaccgaccgtggaatacccaattgctcaccggagtgctctactcgcagcaaagccgctatttgccatgggcagctctctgggcatcaaatccatcacagaacctgctgaggcatctccgggcccccacccgaagggggacgatgaaattagaaaaatggccgaagccatcatggacaaggttgtcgaccagctactgaacgaagctgcagaaatagttcttaaggaagattaaat

SEQ ID NO: 54175 - DNA, 1768 bp, Zea Mays
ttcgcagaaaacccctcaaattctccgttcccttcgatccaccccgcatcccagggagtcctccactacagttcttgcccacctacggcgatggccggccgcctcccgggcgccgccgcgtcctcaccgttaccccgcgccctcctcctcatcgccgcgcttgttctcttctccatctctttcctctcactccgctccctgcgccccgcggcggaccccgcgcttgcgtccgccgccgacaagtaccgtcctcttctccggctccagtcctcctcgtcggtgtaccattctccggaggcgttcacagcggggtacgcggatatggagcggagcttcaaggtgtacatttacccggacggcgaccccaagacattctatcagacgcctcgcaagctcacggggaagtacgccagcgagggctacttcttccagaacatccgagagagccggttccgcaccgacgacccggaccaggcgcatctcttcttcgtgcccatctcgccccacaagatgcgcggcaagggtacttcatacgagaatatgacggtgatagttaaggattacgtagaaggtttgataaacaagtatccttactggaacaggacactaggagcagaccacttctttgtcacctgccatgatgtgggtgtgagagcatttgaaggacttccattcatggtgaagaactctattagagttgtatgttcgccaagctataatgttgactttataccacataaggatattgcgcttcctcaagtactacagccatttgccctacctgaaggaggaaatgatattgagaacaggacaactcttggcttttgggctggccatcgcaattccaaaataagggttatcctagcacgagtttgggagaatgacacagagcttgctatcagcaacaaccggatcagtagagctattggagagctagtttatcagaagcagttttaccgtaccaagttctgtatctgtcctggcggctctcaagttaacagtgcccgtatatctgattcaatacactatggttgtgttcctgttattctgtcagattactatgacctgcctttcaatgacgcccttgactggagaaagtttgcggttatacttagggagagagatgtatatcaactgaagaatatcttgaaatctatatcacaggaggagtttgtttcattgcataaatctctagttcagaaacactttgtgtggcattcacctcctgtatcctacgatgcattccacatgattatgtatgaactgtggctgcggcataatgtaataaagtactaagcttctcagcctctgagttttgatttctaacctaaatgactgatccatcggaaagatactacaaagtctgatagcctgctgttactgccttgaaaatgggcttctggttctttgttctttgaatcaccagatggatgattattgaatataatgttagctatgcatggtgcaatggagagcatttccatcgaagagttgaccgttgttcagcatatatggcaaaactgtagtcctggttaattgatggattacttgattcttttaacaatagttagctttcccatattgcaatctttccctctagatattacttatattccgtggatctgcttggttgattgcatgtattttctcgcgtaatttttttctgttcaatggtttcaggcatgtaagtaatgtacaatattattgatgtgaaacatagtccattttcttctgacagaacatgtaactgtgagttgtgacaaaaaac

SEQ ID NO: 54176 - DNA, 1105 bp, Zea Mays
cggaattttccagcatgtgattttttcgcatcgcctgtacatttctggataaggattgcttatttttgtattttttggacgctttaagatttttttggggttagatggtgttggaaggcaattgagattaacgatttggtctctcgaacgaatccatcattttctatgcacatgttatgtattagtaatatataatgatagagagccgacagtctgtctttttcacacactagattttagggttttcctgtgaggctatgaaaaaaaccctttatgtgaggaaaaaatatttcatgagtaagcatgccatgtcaactaaatcgagtggatattgtgaattgtgaactttaagtctgtgaacttgtgatctttatgaacttgttatattgtgagcttgtgatctttgtaaactttttatattataaatttgtgatccttgtgaacttgttatattgtgaacttgttatatcatgaattgtgaacttgtggtatttgtgatcttttgtcaattttgttttattgtgaagtttgatacgtttaccgatcgtattttagatttcgaccgttaccggtgtattttccgcaccgaactttcatttccgatgtttccaaaataccgatatcgtttccgtttccggagttatcgtttccgattttgtttccgataaaaaatatgaaaacggtaatggttttagtgtttaccgaccgtttccgaccgttttcatccctactccaaattatgtcggcccatcctcgccggttccggtctaggatcaacagactcttgcagcaaactttcagaccgtcgctctctagccgccgcctcagtacaagtggcttttgacaccggtgcctccagtcacatgacatctaatgctggtatactctctcgcactcttccttcacggcattcaccatcccacattgttgtcggtaacgggaatctcatccctgtcacctccactggcaccactcatctatcccataatttacctcttaataatgtcctcgttttgccttcccttattaaagatttgatttatgtccgtcagttcaccactgacaacaattgtttcgtcgagtttgacccctttggttgttctat

SEQ ID NO: 54177 - DNA, 924 bp, Zea Mays
attttgccatccctagctccacagcaccacttgctcctgcctcctgctgcttcttcccgagttcccgtgccgccgcgagcgctcccaaccaagcaacgagacaacaacaacaaccctgcaccgccgcagcacttgcgccgtccggtcctgtcctcccgcggtctcgacgccgccccctaccgtcctaccttatcgcgcaccgctccatggccgccaagtgggcccagaagaccgtcgttatcccggcgcatcggcggggctgccacctcatcacccccaagattctgagggagatcgagggcgacctggccgggttcaagtgcggtctcgcgcatttcttcccacacaagcgcatcgctgaccatcaacgagaactatgactctgatgtgcaggctgacactgagacttttcttaacagaattgttccagagggccacaatgctccttggaaacacactatggaaggacctgatgacatgccagcacatattaaatcttctatgtttggttgttccctaacgattcctataactgatggacgtctcaatacgggcacttggcagggcatatggctgtgcgaacatcgagaccatgccagccctcgcaaaattgtgattactctcaacggtgtttaacttgaagatcttatatgctgccaggaaatagggccaatgcattttggacctgaatgtgtttcagttaccatgtactatgttgagttgtaatgtatgctataaattccaataaattcatcgttactatttcgtatgtgattattggcttagccccttaggtgaccgttgaacttatcttttgaacactacgctttgcagtatttcatagaaattggtgaatgtacaaacaggaaaattgtcatatgctttctataataagagggcagttataaaataagtcttaacaaa

SEQ ID NO: 54178 - DNA, 2397 bp, Zea Mays
agatatcagtactcgtcaagccaaggttagtcaaggccacgggtgcgctgtccactttgcaggcaagctcacggcctcacggggaggccgacgaagtcgtagcagagatccgatacatgggagaggaagagggcgcgcccaccgtggcagcagcggcagagagcgctccgccgcacctgctcctgatatgcttcccggggcagggccacgtgaacccgatgctccgcctggccaagcgcatcgcggccaagggcctcctggtgaccttctcctcgatctccagagtcggggcgatgctcgccgcgtccgtgggcgtgtcggccggcggtgacggcgtgcctgtgggccggggccgcgtccggttcgagttcatggacgatgaagaccccgggcctgacctggacgacctcttgcggcacctcgcgaaggacggcccgccggcgtttgccgagctgctggagcggcaggcggacgccgggcggcctgtggcgtgcgtggtggtaaacccgttcatgccgtgggcggtcgacgtggccgccgacgcggggatcccttcggcggtgctgtgggtgcagtcgtgcgcggtgttctccctctactaccaccacgtgcacggcctcgtggagttccctcccgaggacgacctggacgcgcggttcacgctgcctggcctccccgagatgtccgtcgccgacgttccgtcgttcctgctcccgtccaacccgtacaagctgctggtggacgcgatcatcgcccagttccacaccatcgaccgcgcgtcgtgggtgctcgtcaactccttcacggagctggaacccgacgtggcggcggcgctcccgggcgtgacgccgcggccgccagagctcatccccgtgggcccgctcatcgaggtcgacgagcagcacgacggcgacggcgacggcgcggggtcgggcgcggtgcgtggcgacctgatgaaggccgcggacgactgcgtggagtggctagacgcgcaggcgccgcgctccatggtgtacgcatcggtgggcagcgtggtacggctcaacgcggaggaggtgggcgagatggcgcacgggctcgcgtccacggggcggcccttcctgtgggttgtccgtcccgatacccggccgctcctcccagagggattcctggactccgtggccgggcgcggcacggtggtgccgtggagcccccaggaccgcgtgctggcgcacccgtccatcgcctgcttcctgacgcactgcggctggaactctaccctggagaccatcgcagcgggcgtaccagtggtggccttcccgcagtggggcgaccagtgcactgacgccaagttcctggtggaggaactcaggattggggtccgcctccgcgggccgctgcggcgggacgccgtgcgggaggcggtagacgccgccgtggcggggcccgaggccgacgcgatgctcgccaacgccaggaggtggagcgcggcggcgcgggaggccgtggcgctcggcgggtcctcggacgcgcatatccaagcgttcgtggacgaggtggcccggcgagcatgtgtcgtgccgccgtcgtcagagattcctagtcctagttgaggtcgaggagcttcagcagtcaccctcaccggacaaagtgagtcgaaagctgaaagtgaagaataatcatgttcttacagttttaccgtctgatacgtaccagttttttcttctaccatcttctgctatccaacgatagaatccagaatcgcaccgcatctgcgtaggatatacatgtagaagatcgatagctgggatgtatatctctggcggcacacaaaaactctagtcgctcataagcaccgaacataggcaatgtttggttacctccgattctcacgatgagataaaatttactcctagttaacattcatctataaaaatgcgagttagaaactataaactaattttaattaaaatgtcatttttaataagtatcgaataaacaactaattaaataattgaaacttttgatatgataaaatacgttactaatacgaaatcgacagcttatctcaggcaccgtccctattttcaagagagtctatcgagtgtctagaccaaaattgttgaaacttaaaaagcaaatagacgaaatgttagagaaatgctacatcagaccaagtacctcgccttgggccgctccagttttgtttgtggagaagaaagatagaatgaagagaatgtgtatggactaaagatctttgaatgaagtcactgtcaagaacaagtaccctctgccaagaattgaagacccgttcgatcagcttagaggagccaatgtgttctcgaagatagatctaaggtcaggttaccatcaactcaggatcaggccttcggacataccgaacactacaggaaaacg

SEQ ID NO: 54179 - DNA, 1383 bp, Zea Mays
gccaaaccttcgctgtccatcgtcaccctccttccttccccagcctctcatcctatgcaagaacccataatccagacccacgaactcgcagcagccattagcgtgcgctagccggccgcagccatggccgcccccgcaacgacctctctactgagcaccctgctgaatctgccgctcgccccgttgtcggggaagagctcgccgccgtccgtggtgcatgtggcgcggcgggggccgatggtggtggtggccgccaaggggtacaatgtgcagatcctggtggacgagaacgagggggaggagtccatcttccggcggttccggcgggaggtgatgcgggccggcgtgctgcaggagatcaagcgccgtcggaggtatgagagcaagacggacgagaagaagcgcaaggcgcgcgaggccgggcgccgcaaccgccgcaggcgtatgatggatgagccgaggttcccagaagaagacgccgacgctaccgcaaaggctcgggacgaggacgatgacaactgggagatcgatggcatcctgtgaaagagaagcaacggagtccatgatttcacaacgtccagacacacagaccccgacagctaatctgagttctttttggcccccggttggcaggttcactgtcccaaaaatagcacagtgacacccggccaggtggttgctcgcgagaggcgcctccgtgacacccggtccatgcaaccgcggaggccgcgcgcagccactccattgccgctttttaaagcatcgcgcaccaccttcgcctcgccaaaatccacaagccacttcagtgcttgcgatcgcgtcggccacgatctcttgcgaaaaagcttaccctgtgtctgtctgtccgaccgtcagtccgtctaacaatcgatttccatgacgacgtccccgcgcgtgtggctgctcgccatggcactggcgctcgcctgcgtgctgctcgtgaggtccgccgacgctgctgccgaggcgtccccgactccaggcggctccacctacgggtgcaacccggccacggacaagtcgtgcaagcccgagggcgtgggggtggtgctgccgggcggcggcatcgacctcgacggcgacggtgacgaggacgagctgccgcagttccagccccacctcatgatcctcggccatggccactgatgagtgtaaatggttggttggttggtcgtcctcagccgatctactggacgacacgatggcggtcacatttgcgtccgaatttctcttgttaaattgaggccagagtgattaaatgagcatatgatggtaatttattcaccgtgtattgcctgttcaaacatgaaagtgcactgatacaattttaaaaaacttatgcacaacagcatatagcaagct

SEQ ID NO: 54180 - DNA, 476 bp, Zea Mays
gccaaaccttcgctgtccatcgtcaccctccttccttccccagcctctcatcctatgcaagaacccataatccagacccacgaactcgcagcagccattagcgtgcgctagccggccgcagccatggccgcccccgcaacgacctctctactgagcaccctgctgaatctgccgctcgccccgttgtcggggaagagctcgccgccgtccgtggtgcatgtggcgcggcgggggccgatggtggtggtggccgccaaggggtacaatgtgcagatcctggtggacgagaacgagggggaggagtccatcttccggcggttccggcgggaggtgatgcgggccggcgtgctgcaggagatcaagcgccgtcggaggtatgagagcaagacggacgagaagaagcgcaaggcgcgcgaggccgggcgccgcaaccgccgcagaaatgaattgggtagtctgattctcatccacacatc

SEQ ID NO: 54181 - DNA, 2184 bp, Zea Mays
ccgctgcaatggaccctagaggcctaatgtaaagcagtccacagaccaggcccacaggccgcacccgacggcccatccggcctttcccactcgtcactcttgatcggcccagcagcgagcggaactgcgaaacgcaggatcgcgactccgggaaaaaaaaaacgccgggcgcaatcgggaacggggaaccctagggcagccggcagcgtcgctccgccccggccgtcgtcgtcgcgcgtcgccgtccactcgcttcctgctcgggccttcgcccctcggccacgtctctgccctcgccccttggtcgggaccgacgtcctcgctccatctagcaagctgatcagctcgactgcttgagctcgtcctcgccatcgccgctttgatttcttcctttcagcccgacccggctcaaagcagccagatcacggcactccgtccgaccctcgaagcgatcaccttcaccgcctctcctcctcgtcacaggtgaagatgattccgcagagccagagcagctccctgcagcgccttcaacacgtcgagaagcggatagtgcgggtgctggagcttgcgggagcggtgatggaggagctgggaaactcccatggccctcgcaccgatgcagtcagcgcgcactgccgtgagttcatgatcgctatgaaggtaaccagcccactgcctgctctcatatcgtcaggctgtgggttcctgttgttaccagttatgcgcctcaatcctcactaatcccatgctagagagactattggaaaatcaacagttgttttaaaatgctgtatgcaaaattttgctctgtccaatgttactttgtttccatcaaattgactaaatatatgcatcagctctcaattggttattatttgaagcagtatacatgccccaaatcattcatgataactcactgcttaactatgtttttgttggagtaggaaattcaaacgacgttgcgtgaggaaatcaaaagtgcttgtgaatatcgtccatttgaaaagtgtgattacagtgcaaggattgctaatgagatatgctgcaagaagctggagtatgtaattgagaagttggataccatgcaacagagccttgaacatatcactgatgatgtttagcgagctagcaacatattaggtactatactctttttgtgcaataaagtgtaatctacttagtgaataagaggatactttatgatgatagtatccactcaatcaggtgattttgtcaatactttgctgcagtggtagagttggtgaattagatattttcagtttcttggtacttgcaaaatgcaaccattattatatactacatgacttccattgcattatatattgtgtgtttacagggactttttaaatttgcttgcagttctttccactatagcaagccttcatcatctcatctttaatgtgtaattctgttgtttaagaggataatgtttacaccagatattgttggttatgtgactagctcttgtaatgcttccttatgtccatataaggggggcaattctcctttttcccccattatgattctacaataatcttttgtggtattgtctactttctaaatgggatcaggttttctccaagttaaattactcatactctgtggattactttcagctttgggggtaatagatgatcgaggagtacactgaagaaatgtagaagcattctatcaacttataattgcataaagcttttgctcaactgtaggactgtaacttgtggtttgtttgtcttccatattctgtgacagttcttactttagctgcctgctgatgctgaacaacaatattcttggcctgactcggataggagtaacatccttgagcttaaaatcatggaattttaaggcgttgtattttactgatgagaaattgctctcatgtattgcatggacatgcgtcaattcttagaacatgcgttttggtaaatattgctaactcgttttcaacgattatcttcatgtgtatgcaatgagtactattttgatctatttgttaatgttggttcgacatccattaaattcgaagctcatcaggttctatctgctataaatatcgtaggactatttagtcagatttaattgttcatgctggttcgatatctattgcatccgaagctcttcagtttctatctgctgcaaatactgcatgtcatgtataac

SEQ ID NO: 54182 - DNA, 1551 bp, Zea Mays
ccgctgcaatggaccctagaggcctaatgtaaagcagtccacagaccaggcccacaggccgcacccgacggcccatccggcctttcccactcgtcactcttgatcggcccagcagcgagcggaactgcgaaacgcaggatcgcgactccgggaaaaaaaaaacgccgggcgcaatcgggaacggggaaccctagggcagccggcagcgtcgctccgccccggccgtcgtcgtcgcgcgtcgccgtccactcgcttcctgctcgggccttcgcccctcggccacgtctctgccctcgccccttggtcgggaccgacgtcctcgctccatctagcaagctgatcagctcgactgcttgagctcgtcctcgccatcgccgctttgatttcttcctttcagcccgacccggctcaaagcagccagatcacggcactccgtccgaccctcgaagcgatcaccttcaccgcctctcctcctcgtcacaggtgaagatgattccgcagagccagagcagctccctgcagcgccttcaacacgtcgagaagcggatagtgcgggtgctggagcttgcgggagcggtgatggaggagctgggaaactcccatggccctcgcaccgatgcagtcagcgcgcactgccgtgagttcatgatcgctatgaaggtaaccagcccactgcctgctctcatatcgtcaggctgtgggttcctgttgttaccagttatgcgcctcaatcctcactaatcccatgctagagagactattggaaaatcaacagttgttttaaaatgctgtatgcaaaattttgctctgtccaatgttactttgtttccatcaaattgactaaatatatgcatcagctctcaattggttattatttgaagcagtatacatgccccaaatcattcatgataactcactgcttaactatgtttttgttggagtaggaaattcaaacgacgttgcgtgaggaaatcaaaagtgcttgtgaatatcgtccatttgaaaagtgtgattacagtgcaaggattgctaatgagatatgctgcaagaagctggagtatgtaattgagaagttggataccatgcaacagagccttgaacatatcactgatgatgtttagcgagctagcaacatattagttcttactttagctgcctgctgatgctgaacaacaatattcttggcctgactcggataggagtaacatccttgagcttaaaatcatggaattttaaggcgttgtattttactgatgagaaattgctctcatgtattgcatggacatgcgtcaattcttagaacatgcgttttggtaaatattgctaactcgttttcaacgattatcttcatgtgtatgcaatgagtactattttgatctatttgttaatgttggttcgacatccattaaattcgaagctcatcaggttctatctgctataaatatcgtaggactatttagtcagatttaattgttcatgctggttcgatatctattgcatccgaagctcttcagtttctatctgctgcaaatactgcatgtcatgtataac

SEQ ID NO: 54183 - DNA, 1687 bp, Zea Mays
ccgctgcaatggaccctagaggcctaatgtaaagcagtccacagaccaggcccacaggccgcacccgacggcccatccggcctttcccactcgtcactcttgatcggcccagcagcgagcggaactgcgaaacgcaggatcgcgactccgggaaaaaaaaaacgccgggcgcaatcgggaacggggaaccctagggcagccggcagcgtcgctccgccccggccgtcgtcgtcgcgcgtcgccgtccactcgcttcctgctcgggccttcgcccctcggccacgtctctgccctcgccccttggtcgggaccgacgtcctcgctccatctagcaagctgatcagctcgactgcttgagctcgtcctcgccatcgccgctttgatttcttcctttcagcccgacccggctcaaagcagccagatcacggcactccgtccgaccctcgaagcgatcaccttcaccgcctctcctcctcgtcacaggtgaagatgattccgcagagccagagcagctccctgcagcgccttcaacacgtcgagaagcggatagtgcgggtgctggagcttgcgggagcggtgatggaggagctgggaaactcccatggccctcgcaccgatgcagtcagcgcgcactgccgtgagttcatgatcgctatgaaggtaaccagcccactgcctgctctcatatcgtcaggctgtgggttcctgttgttaccagttatgcgcctcaatcctcactaatcccatgctagagagactattggaaaatcaacagttgttttaaaatgctgtatgcaaaattttgctctgtccaatgttactttgtttccatcaaattgactaaatatatgcatcagctctcaattggttattatttgaagcagtatacatgccccaaatcattcatgataactcactgcttaactatgtttttgttggagtaggaaattcaaacgacgttgcgtgaggaaatcaaaagtgcttgtgaatatcgtccatttgaaaagtgtgattacagtgcaaggattgctaatgagatatgctgcaagaagctggagtatgtaattgagaagttggataccatgcaacagagccttgaacatatcactgatgatgtttagcgagctagcaacatattagctttgggggtaatagatgatcgaggagtacactgaagaaatgtagaagcattctatcaacttataattgcataaagcttttgctcaactgtaggactgtaacttgtggtttgtttgtcttccatattctgtgacagttcttactttagctgcctgctgatgctgaacaacaatattcttggcctgactcggataggagtaacatccttgagcttaaaatcatggaattttaaggcgttgtattttactgatgagaaattgctctcatgtattgcatggacatgcgtcaattcttagaacatgcgttttggtaaatattgctaactcgttttcaacgattatcttcatgtgtatgcaatgagtactattttgatctatttgttaatgttggttcgacatccattaaattcgaagctcatcaggttctatctgctataaatatcgtaggactatttagtcagatttaattgttcatgctggttcgatatctattgcatccgaagctcttcagtttctatctgctgcaaatactgcatgtcatgtataac

SEQ ID NO: 54184 - DNA, 2411 bp, Zea Mays
gagccgcgagcgggtgggggtggggtgggcgtcgtgggcggtggcagcgcaaacaagcaagccttccaattaactcgttcccaccttcccctcctccccttctccttccttcacggattcccaaatactcgcttccaataccaattctccgatccccgttcgttcccgcaccctcgcgctccgctgatccggcggcatgcggcgccgcggcgtggcggcggctgaggcggacggtgacgtggagttgcggttccgcggggtgcggaagaggccgtggggccggtacgcagcggagatccgggacccggcgaagaaggcgcgcgtctggctcggcacattcgactccgccgaggacgccgcccgtgcctacgacgccgcagcgcggatgctgcgcgggcccaaggccaggaccaacttcccgctccccgccgcagccgccctccaccaccaccacatgcccgctgctgccgccgcagcagctccaccatacacaacatatcccaccgccacgggcgtctcgacgccgccggtcgccagaccggcttgcagcagcctcagctccaccgtggagtccttcagcggcgcgcggccgcggcccgtgctcccgccgcggttccctccgccgtcgattcctgatggcgactgccgcagcgactgtggttcctcggcctcggtcgtggacgacgactgcacggacgcggccgcctctgcgtcgtgccccttcccgctcccgttcgacctcaacctgcccccaggcagcggcggcggagccggcgtcgggttttacgccgatgaggaggatgagctcaggctcacagcgctgcggctgtgacgtcgagctcaatcgagccgctgcttagaaagaggaaaaggagaaaaatatttggttcttcccttctctcgtagccgacacgaactctccatccactacgatgttgttgtttacttgatctgattatgatatttgcctgaatcctagtcaacttacctgcatgcatgcttgcttgttttctggcgattgaggattatcgccaaacgccaaatcttgcagcagctgttgtactgtaatatatcaacattttacttacttcctcttatgaggaaaaagacagataaagtaacttatttcaatctttagctacattttgccttcttgtttttgtttgggattggggaactgaaacgaaaatcattcaaacggaatggccaaaatgttgagatcaaagttgtgttgaacaaatgaagttcaaccacatttcaacttctatatttcttcattctcaaataccatgaacaaatttactttgtttttctttgaagaccataaacttactttactcctaaatttctggtgcttgtgctactaacctgttgtttacagtgatccacgattttagtttgtattattactaatgcattatagcagtttcccctaacagaacaaataacgttcttttttttctgtttagattgatgcttctgtttgtgtcattgaaactaaatttagcgtctaacttttgatttcttaagttgtaaacaacattgactacaaatagtgggtcttttggaatctggaaccaaaacagttcccatcaaagatttggaatatggttatgcattaaggaggtgtttgaatgcactagagataatagttagtggctaaaattagttgagacatccaaacaccctagctaatagtttagctattagttatttttggtaaattagttaatagttaggtagttatttgttagccagccaattctactaacaatttttagccaactaattattagttctagtgcattcaaacaccccctaagcattagctgaaacatagagtcatgctgaaagtagaagtgctgtaactctttaccgtcccatggcacgtcttgcacattcatatagcatcaagatgctgagttatttgcaggatcaactactacaacttttaaagcattgctaatatgataatatcatcaagcgtggtggcatatcataaaaactggaaggtcagatttgttctgccatttatgcattggaggatggtgctgcaatgctagtcatattctctcttgtggtttggaagcaggaacaaatgttgtgacccttgtagatattgtttggttaccttgttatgcaatactatagttgcttggagtgacattttaattacaaaggatgaagctctgtttggaagtgatctttatggtcctacctcttctacacacaaattttagatttcatcaaaaaaaatatggcaaaggttgcctagttgtattgaaagcaagggaatatggcattgttttttttaaatgttatgctattggatattgattgtgctggtggttaagactagtaatgtacactcaggttcaggttgtttggagaatggacattcttaagtttag

SEQ ID NO: 54185 - DNA, 669 bp, Zea Mays
cggctcccgctggcgccgccgcgagggcaaggacaaggccggtggcgaatgcggccgccagtgcctccatgcttggtctggtccccacgcagtccccctcctgtgatccgcacagcggaaggttgctgctttcctgggttgcttatcccctaccaggacacggccatggtgtccagcacggggatcaccgtggttcacctctctcttctccgctggttcagtaccagcgatgacagctagtaggagaaccaagaaaggaagcacgcaagaaacggcggatgccacggctgcttccagttccagcagagagggaaatttgtggtagggaggggtggtgcaggtaaagactgcaatttttttggatccccctcttaaatgtatgttgggttctgggctgcttgctgttcttgactctgctccctctcacacgcacatactctttctctctcctcctcgatgcacaggacaggaaggaaggtgctcttgatccggtaaaaaattaatggcggagcaatgggagtaggtgaaaggcgatgaagtcggaacagagcttgcagaggccaccaggaagaaagatgcatgctgattgatgccctgctaatggtggatggtggggtggactgtggacaaaggttgatgccagtacagtcaaccatgagccgttgtttg

SEQ ID NO: 54186 - DNA, 1752 bp, Zea Mays
aaagaaccaatagaattgggaagatcccctgtcaatttgttgaaagacacatctctgtcaaaaagtacaaattgtataagatagattcaagaaaccaagtggacagtatgttttttgtgtcaagtaaaatgttacttcttatgaccattataaatgttatgtttttcaaggaacaattgcatgtactcctagtcttaagtctttaggctttgtttgggcactctagtattgaccccaatccacgtgtgttgaggtggattgggtgtaaattagtttaagttacacccccaatccacctcactgattacatatcgtccgactaatcatgattagtcgctattagtcggtctgatcagttgttagtgctcgataagaggtagcgattcgatcagggtagttgatcgtccttatcatccgcctaattgggatttatagcgattaatcgctgtgttgggcgatcagccgataagcctggcagtccaaaagacattttaggcttaaatgttgtttggggaggccaaaggacacccagtcggccagtcccttcaaatacggcctgagtagaccaaagatgagcagtcggacagtccctttaaatgctgtctggggaggccaaaagccattttaggcttaacagcagctgagcagcccatcttctacggttctacctccagtcctccactctcttctccggcctatcttctaccaccagtccaaccgaagatgagcagctcttctgaaggtatggatgtcgtgctgcttttgcctgttcttcactcctctttgttctctgctctctctccccctctgtttttcactcctctttgttcagcaaggtctggactctggaggaatagctggtattattatgtttgacgtcgcagatgtgcatggacatcatggtgatggacgtcgtgctgctgctgatcaagtcatcttcctgcagtcccaaattgcctgagggaagacgtcctctgtggctgaaactggcatcaaaggctatgcaagttggtctatgtgagctacaacaggaagatgaacaacagatttacaaagataagagagcaaggttcaaagggaaagaaaagcaacccactagtgcttgaagagcttttgtgggaaaatgagtgggttcaggagtctgaagaagatgaggagctttggagtgcagtagatgaagttttaggtgcaactcaagctacccagggcagaaacttgcctagggcatcagctgcacgtggtgggaggacctactccgagacctatgttaggagtaggaagcgccaaaaagttgcagtagctcaggacttgcagcaaggagatggcagtgacagtgacagtcacaacgaaaatgatcatcaaaagcaaactcaaaatgaccaagatgctgcaggaaaagcgattgatgaagaagaagaatctgtggctgctagtgatcaattcaagctggatgatgatctcatataggtgttgccttcttggtcataatctactactccactggtctagtaagttgtagactttcatagtcttatataaacttgtagctgttgtgctgttatggactatttaagtatttatactgttgcaagcctctatactatataagtatatatctatatatagtgttatatatgaatatatatatatatatatatatatatatatatattgtatttatatattacacctgggtgcattcaatatagagaatgcacccagaccgaacctacgtgccaggtccgagccaac

SEQ ID NO: 54187 - DNA, 100 bp, Zea Mays
ggaagattttatatcatattggtttgaaatcaaaacaatctatccagtatgtgcgaatggctgtagagtcttgaggtttctatcattaaaacataacgga

SEQ ID NO: 54188 - DNA, 1904 bp, Zea Mays
gatgaaatttaacgttatagatactcacctagaaacgaaaaccaattcagtttttattttggtttaaaatttgaaaagtaaaagtcaaaatttggtctttttcaaaattatcgagctgaacctcgacctcctatggtgaaaaaaaaaaacagatcatcatcacaatcgacgattgcatttcacacgcgaaatttccccttttccaacgccacagcaaacagcatccacagcggagagcgtctctttctccttcccctccctctttccacgacaccaaaagaaaccgaaaaccatcgacgcgctccgtccaccctcccctaccccgcgtcctcctcccctacgcctcccagcccagcggcaaaacctaaccctagatgggcgccgtcacctctacggtcgcggcgcgctttgcctttttcccgccgagcccgccgtcgtacgggttcgagcagccggcgccgcttccggcccctgccacacccgagcctccggccccggccacatccaagccgccgcctccggccccggccacacccaagccgccgccagcgggggaggagaagggcggtggcgcggtggtggagctcacgggcgtcccgcggagggttaacgtggaggcgcggcggctgcggacgaagcggggcacggaggtggtcgcgatgcacgtgcgccaggcgggggccaagctcacgctgctctactcccacggcaacgccgccgacctcggccagatgtacgagctcttcgtcgagctcagcgcccacctcaacgtcaacctcatggggtatgactattctggttatgggcaatctactgggaagatgcctcatagaaacctatggagcttctgaggataatatcattctttatggacaatcagtgggcagtggtcctactttggatttagcatcccgattaactcgtttaagagcagttgttctacatagcccaattttgtctggcttaagagtgatgtatcctgtaaaacatacatactggtttgacatatacaaggtaattaatataccgatgttcttgatcttattaattatttaaccacatctaaatctgccttgtattcacagaacatcgacaaaattccattagtcaggtgtcctgtgttagtgatacatggtacagcagatgaggttgttgactgttcccatgggcggtcactgtgggaacttgctgaagtgaagtacgagccgctgtggatcaaaggcggaaaccactgcaacctagaactgtacccggaatacatcaaacatctgaagaagttcgttggagccatagagaaatcgccacccccacctccgatcgacgagtgcatggagagctcaggcccgtcggattgtaccccagcagaacccgagtgtacagcggactcaaggaagagcacggactgcagggacaaagcaaggccaagcatagatcagagacaaagcacggaccggcgggacaagccgaggggcagtacggataggagggacaagacgaggaagagcgtggaccatcccgagaagccgcgggctagcgtcgatcaaccggatcggccgaggaaaagcatcgaccggtttggaggcatgatgaagtcggtgaggctgtgcaatatcgactgcttcaaagtgacagcaacctctgggagctgaagagaaggaacggatggatagtagcaggaaaggttagtgttgggtgccgtctgtatgtattcttcccttcgtgtaacttattcaattgggtgattggtttggccgcagtagaaggcgtgtttttgttttctttttcttcgctccttcctcatacaattacaatggtgttgtttccgttgggctgttctttttaacatgagatgaaataataatcttgttgataaacaatacaatgcttgcgaacttccatggcgg

SEQ ID NO: 54189 - DNA, 2028 bp, Zea Mays
gatgaaatttaacgttatagatactcacctagaaacgaaaaccaattcagtttttattttggtttaaaatttgaaaagtaaaagtcaaaatttggtctttttcaaaattatcgagctgaacctcgacctcctatggtgaaaaaaaaaaacagatcatcatcacaatcgacgattgcatttcacacgcgaaatttccccttttccaacgccacagcaaacagcatccacagcggagagcgtctctttctccttcccctccctctttccacgacaccaaaagaaaccgaaaaccatcgacgcgctccgtccaccctcccctaccccgcgtcctcctcccctacgcctcccagcccagcggcaaaacctaaccctagatgggcgccgtcacctctacggtcgcggcgcgctttgcctttttcccgccgagcccgccgtcgtacgggttcgagcagccggcgccgcttccggcccctgccacacccgagcctccggccccggccacatccaagccgccgcctccggccccggccacacccaagccgccgccagcgggggaggagaagggcggtggcgcggtggtggagctcacgggcgtcccgcggagggttaacgtggaggcgcggcggctgcggacgaagcggggcacggaggtggtcgcgatgcacgtgcgccaggcgggggccaagctcacgctgctctactcccacggcaacgccgccgacctcggccagatgtacgagctcttcgtcgagctcagcgcccacctcaacgtcaacctcatggggtatgactattctggttatgggcaatctactgggaagcctagtgaacaaaacacttattctgacatagaagctgtatacagatgcctcatagaaacctatggagcttctgaggataatatcattctttatggacaatcagtgggcagtggtcctactttggatttagcatcccgattaactcgtttaagagcagttgttctacatagcccaattttgtctggcttaagagtgatgtatcctgtaaaacatacatactggtttgacatatacaagaacatcgacaaaattccattagtcaggtgtcctgtgttagtgatacatcagatgaggttgttgactgttcccatgggcggtcactgtgggaacttgctgaagtgaagtacgagccgctgtggatcaaaggcggaaaccactgcaacctagaactgtacccggaatacatcaaacatctgaagaagttcgttggagccatagagaaatcgccacccccacctccgatcgacgagtgcatggagagctcaggcccgtcggattgtaccccagcagaacccgagtgtacagcggactcaaggaagagcacggactgcagggacaaagcaaggccaagcatagatcagagacaaagcacggaccggcgggacaagccgaggggcagtacggataggagggacaagacgaggaagagcgtggaccatcccgagaagccgcgggctagcgtcgatcaaccggatcggccgaggaaaagcatcgaccggtaccgtttacccctactaacctggcacatgttttccgatcatcattaggatgcttttatgtattattgcccacgatcaacatgctaatgctttgttgatctctgtgatgaatggtggtggtggtggtggtgtgtgtgtgtgtgtgcataacaaacaggtttggaggcatgatgaagtcggtgaggctgtgcaatatcgactgcttcaaagtgacagcaacctctgggagctgaagagaaggaacggatggatagtagcaggaaaggttagtgttgggtgccgtctgtatgtattcttcccttcgtgtaacttattcaattgggtgattggtttggccgcagtagaaggcgtgtttttgttttctttttcttcgctccttcctcatacaattacaatggtgttgtttccgttgggctgttctttttaacatgagatgaaataataatcttgttgataaacaatacaatgcttgcgaacttccatggcgg

SEQ ID NO: 54190 - DNA, 982 bp, Zea Mays
ctcggtttcgatagccgcaggccgcgccattaacccgcagaggcggactcatggtaccacacgccatcggcccatcagtagttaaccaccaaccacgtagtaggccttacgggcctaatgtcgttggctggtcctttgccacgccatgaaaccaaagagcggcgtcgttgcgatccaagacggcaggcgagctccaggttcagttgttcggaggaagcccagcgccggcgatggcgagtgtaaaccccgcggtggcggaggcagaggcggaggcggtggggcggcgggacgagctgtcggagtcgctggctgagctcttcaccaacgtctccctcatggtccgcggcgagctccagatgaatgatcgcgtatcacaggaatacagcaactacggtgacatcgccgctggtctgcgagtatttgtagagcagctgaatgagaaaaaccgaggcttcgaggattacgtgtcgcagattgatgcgatagatcaacaggtgactgagtttgaggcagtggtgtccatgctcgacaagcatgttgccctcttggaaaagaaagtaaaatcggcctatcacatttctactacccaatgatttccatccatatgccacaatgcagattcttttgccaacacttgagcttatccgggaaacatattattatatattctggctgaggaaacaacgctgtagctgtagctgtaggtgttcccaccgttgaaatgatgcaatcagattccaagttgtgctgtagtaactttcagacaaacaggcagcagttgggttttgtccctcacagtcacagtgtattattagtgttaggaaattgatgcatgggtgccgggatttgcggggcacaatcattgcctactgctccacaagaaacatgtcactgttgtgtgtgttgtaatttctggatcaatgggcgaactgcatcttgcagtgtacgcgcttgccaccaagattcctgcagattttcagcc

SEQ ID NO: 54191 - DNA, 2156 bp, Zea Mays
gtgagattgaaacggggccacagtctccaccgaactctgcagcagatccatcgctctcagccagaccacatatcgccctcgtcgttatctaggtcaccggtcgtgtgccgccgccgccgccgccgcccgacgctctccgtggataaggtcagtccggccacgcattttatttccgtccaagaaaggcagcgccgcaagcaaccggacaggagcagtcgaatccggcaagttaaaggaaacttaaaaagaaaagggaagtaaagaccgggcgcgtcactggcatcaatcggcatcaatcctcccctgcggaagggaaggaagccagaattgggacgcaacctgagctggaaagttgggccttttccttcgaaagggacggggccgcggcgaaccggggcggcaagatcgcccttggacagttcttggtaggcggagagagatattatatcatattctgatatcactcacctacccggtctgccgttcgcctataagaagaccggaggcgaggagggagctccctccctctgcaagtacaagttgtcctgtatttggtttagtttgcgctgctgtatttgttcagggttttggtcgcgtgttgaggaaagattcggggttcttgaaagttgagtgaaacaaatggggtcatcaaggaatgtgccgcacaaagtgatgcaagatgagatcacacctcttctcccgatcaaagctgaggaggatgcagttcatgagttcgacggagcttctttctctggcgcggtcttcaatctgtcaacaaccattgtgcagccaccagggcaagattacatcctacggctggttgatgggtgacacatttggtcagtgggggagaattgcgctacaagcatcggtggtgataaacaatgtcggcgtgttgattgtatacatgattattattggtgatgtcctatcaggaacatcgtcaacaggtgttcatcacagtggcgtattggaggggtggtttggacctcatatgtggaattctcgtcccattgtactcctcgctacaactcttcttgtgtttgctccattggtgagctttaaacgtttggattcattgagatacacatctgcactatcagttgctcttgctgtggtttttgttgtcatcactgccggggttgctattgtcagactcatccaaggaactgtggagatccccaaactgtttcctgagatagatggagttagttctgtctggaaactgttcacagctgtgcctgttcttgtcactgcctacatctgccactacaatgttcacagcatcgataatgagctggaggacaaaactcagattaaaccaattgtgcaaacttctctgggactctgctcaagtgtttacattgcaacaagcttcttcgcatatctcctctttggcgaggctaccttggctgatgtgcttgccaatttcgactctgaccttcgcattccgttgagttctgccttcaatgacatagtgagagtgagctatgtcgtccatatcatgcttgtcttccctattgtattctttgcccttaggctcaacttggatggattactctttcccaccgcaaggcacatttccggtgacaacaagaggttcaccattatcaccatctcacttattgctgtaatttatcttgctgccatcttcataccaagcatctgggatgctttccaattcactggcgccacagctgctgtgcttatcggtttcatctttcctgccatgattatactaagggacccatatggtgtttcaaccaagcgtgacaaggttttggcggaagcaggaggcctagagcccatacctcaggggaagagaacctctttgtacaggtcaagggtgattgttgagcttcaagtaagctactactgagcagcagtaccacgaatctcatggtggtcaatagtttttgtttggtcacttcgaagaaactttggtttgctgcgaatatttgtctagtttcctgaacataaactgcctccacatctggatgggaccacgtgtgctatgatcacccgtggaacaatttttttcttgtaatggatgattgaaatagctgtatataaatatataataatatgcaccgatgcagtagcaaactgaaacaggtactcacaaatataaagctggaactcacgtcaatttggag

SEQ ID NO: 54192 - DNA, 2330 bp, Zea Mays
gtgagattgaaacggggccacagtctccaccgaactctgcagcagatccatcgctctcagccagaccacatatcgccctcgtcgttatctaggtcaccggtcgtgtgccgccgccgccgccgccgcccgacgctctccgtggataaggtcagtccggccacgcattttatttccgtccaagaaaggcagcgccgcaagcaaccggacaggagcagtcgaatccggcaagttaaaggaaacttaaaaagaaaagggaagtaaagaccgggcgcgtcactggcatcaatcggcatcaatcctcccctgcggaagggaaggaagccagaattgggacgcaacctgagctggaaagttgggccttttccttcgaaagggacggggccgcggcgaaccggggcggcaagatcgcccttggacagttcttggtaggcggagagagatattatatcatattctgatatcactcacctacccggtctgccgttcgcctataagaagaccggaggcgaggagggagctccctccctctgcaagtacaagttgtcctgtatttggtttagtttgcgctgctgtatttgttcagggttttggtcgcgtgttgaggaaagattcggggttcttgaaagttgagtgaaacaaatggggtcatcaaggaatgtgccgcacaaagtgatgcaagatgagatcacacctcttctcccgatcaaagctgaggaggatgcagttcatgagttcgacggagcttctttctctggcgcggtcttcaatctgtcaacaaccattgtaggagctggaatcatggctctgcctgcgagtatcaagatgctaggccttatacctggtattctaatgatcatccttgtggcactgctcaccgagacatccattgacatgctggtcaggtgcagccaccagggcaagattacatcctacggctggttgatgggtgacacatttggtcagtgggggagaattgcgctacaagcatcggtggtgataaacaatgtcggcgtgttgattgtatacatgattattattggtgatgtcctatcaggaacatcgtcaacaggtgttcatcacagtggcgtattggaggggtggtttggacctcatatgtggaattctcgtcccattgtactcctcgctacaactcttcttgtgtttgctccattgattcattgagatacacatctgcactatcagttgctcttgctgtggtttttgttgtcatcactgccggggttgctattgtcagactcatccaaggaactgtggagatccccaaactgtttcctgagatagatggagttagttctgtctggaaactgttcacagctgtgcctgttcttgtcactgcctacatctgccactacaatgttcacagcatcgataatgagctggaggacaaaactcagattaaaccaattgtgcaaacttctctgggactctgctcaagtgtttacattgcaacaagcttcttcgcatatctcctctttggcgaggctaccttggctgatgtgcttgccaatttcgactctgaccttcgcattccgttgagttctgccttcaatgacatagtgagagtgagctatgtcgtccatatcatgcttgtcttccctattgtattctttgcccttaggctcaacttggatggattactctttcccaccgcaaggcacatttccggtgacaacaagaggttcaccattatcaccatctcacttattgctgtaatttatcttgctgccatcttcataccaagcatctgggatgctttccaattcactggcgccacagctgctgtgcttatcggtttcatctttcctgccatgattatactaagggacccatatggtgtttcaaccaagcgtgacaaggttttggcggtaacaatgattgtgcttgctgtggtgtccaattgtgtggccctgtacagtgatgcgttcaacatcttctacaggaagcaggaggcctagagcccatacctcaggggaagagaacctctttgtacaggtcaagggtgattgttgagcttcaagtaagctactactgagcagcagtaccacgaatctcatggtggtcaatagtttttgtttggtcacttcgaagaaactttggtttgctgcgaatatttgtctagtttcctgaacataaactgcctccacatctggatgggaccacgtgtgctatgatcacccgtggaacaatttttttcttgtaatggatgattgaaatagctgtatataaatatataataatatgcaccgatgcagtagcaaactgaaacaggtactcacaaatataaagctggaactcacgtcaatttggag

SEQ ID NO: 54193 - DNA, 2802 bp, Zea Mays
gtgagattgaaacggggccacagtctccaccgaactctgcagcagatccatcgctctcagccagaccacatatcgccctcgtcgttatctaggtcaccggtcgtgtgccgccgccgccgccgccgcccgacgctctccgtggataaggtcagtccggccacgcattttatttccgtccaagaaaggcagcgccgcaagcaaccggacaggagcagtcgaatccggcaagttaaaggaaacttaaaaagaaaagggaagtaaagaccgggcgcgtcactggcatcaatcggcatcaatcctcccctgcggaagggaaggaagccagaattgggacgcaacctgagctggaaagttgggccttttccttcgaaagggacggggccgcggcgaaccggggcggcaagatcgcccttggacagttcttggtaggcggagagagatattatatcatattctgatatcactcacctacccggtctgccgttcgcctataagaagaccggaggcgaggagggagctccctccctctgcaagtacaagttgtcctgtatttggtttagtttgcgctgctgtatttgttcagggttttggtcgcgtgttgaggaaagattcggggttcttgaaaggtatgctctttccttcctctcgtgtgttcatcttttagagctgctgttagaattatatgtttggcatcccaacatttcttttgttttcttgaagggaaatttggtgaacttgtttggatttaaggggcataataagataagtagatggtggttgagtatattagtaagtggctctatgaattaaagaaaccagatcttagcataccttacttatgtgagttgtcatgtgcatggatttctaagctcaaattagcaccccatagtgatctgaaagtcactggaacatactgtgtggttgttactactagtttcctaatatatagggaaatcacattggcgttgatcatctaatttagaactagtcaagaaataatggttgaagatgactagcaaaggttatgtcaattcaaggaccatggttccagtgtgctaactgaagtttctcacacacagttgagtgaaacaaatggggtcatcaaggaatgtgccgcacaaagtgatgcaagatgagatcacacctcttctcccgatcaaagctgaggaggatgcagttcatgagttcgacggagcttctttctctggcgcggtcttcaatctgtcaacaaccattgtaggagctggaatcatggctctgcctgcgagtatcaagatgctaggccttatacctggtattctaatgatcatccttgtggcactgctcaccgagacatccattgacatgctggtcaggtgcagccaccagggcaagattacatcctacggctggttgatgggtgacacatttggtcagtgggggagaattgcgctacaagcatcggtggtgataaacaatgtcggcgtgttgattgtatacatgattattattggtgatgtcctatcaggaacatcgtcaacaggtgttcatcacagtggcgtattggaggggtggtttggacctcatatgtggaattctcgtcccattgtactcctcgctacaactcttcttgtgtttgctccattggtgagctttaaacgtttggattcattgagatacacatctgcactatcagttgctcttgctgtggtttttgttgtcatcactgccggggttgctattgtcagactcatccaaggaactgtggagatccccaaactgtttcctgagatagatggagttagttctgtctggaaactgttcacagctgtgcctgttcttgtcactgcctacatctgccactacaatgttcacagcatcgataatgagctggaggacaaaactcagattaaaccaattgtgcaaacttctctgggactctgctcaagtgtttacattgcaacaagcttcttcgcatatctcctctttggcgaggctaccttggctgatgtgcttgccaatttcgactctgaccttcgcattccgttgagttctgccttcaatgacatagtgagagtgagctatgtcgtccatatcatgcttgtcttccctattgtattctttgcccttaggctcaacttggatggattactctttcccaccgcaaggcacatttccggtgacaacaagaggttcaccattatcaccatctcacttattgctgtaatttatcttgctgccatcttcataccaagcatctgggatgctttccaattcactggcgccacagctgctgtgcttatcggtttcatctttcctgccatgattatactaagggacccatatggtgtttcaaccaagcgtgacaaggttttggcggtaacaatgattgtgcttgctgtggtgtccaattgtgtggccctgtacagtgatgcgttcaacatcttctacaggaagcaggaggcctagagcccatacctcaggggaagagaacctctttgtacaggtcaagggtgattgttgagcttcaagtaagctactactgagcagcagtaccacgaatctcatggtggtcaatagtttttgtttggtcacttcgaagaaactttggtttgctgcgaatatttgtctagtttcctgaacataaactgcctccacatctggatgggaccacgtgtgctatgatcacccgtggaacaatttttttcttgtaatggatgattgaaatagctgtatataaatatataataatatgcaccgatgcagtagcaaactgaaacaggtactcacaaatataaagctggaactcacgtcaatttggag

SEQ ID NO: 54194 - DNA, 2248 bp, Zea Mays
gtgagattgaaacggggccacagtctccaccgaactctgcagcagatccatcgctctcagccagaccacatatcgccctcgtcgttatctaggtcaccggtcgtgtgccgccgccgccgccgccgcccgacgctctccgtggataaggtcagtccggccacgcattttatttccgtccaagaaaggcagcgccgcaagcaaccggacaggagcagtcgaatccggcaagttaaaggaaacttaaaaagaaaagggaagtaaagaccgggcgcgtcactggcatcaatcggcatcaatcctcccctgcggaagggaaggaagccagaattgggacgcaacctgagctggaaagttgggccttttccttcgaaagggacggggccgcggcgaaccggggcggcaagatcgcccttggacagttcttggtaggcggagagagatattatatcatattctgatatcactcacctacccggtctgccgttcgcctataagaagaccggaggcgaggagggagctccctccctctgcaagtacaagttgtcctgtatttggtttagtttgcgctgctgtatttgttcagggttttggtcgcgtgttgaggaaagattcggggttcttgaaagttgagtgaaacaaatggggtcatcaaggaatgtgccgcacaaagtgatgcaagatgagatcacacctcttctcccgatcaaagctgaggaggatgcagttcatgagttcgacggagcttctttctctggcgcggtcttcaatctgtcaacaaccattgtaggagctggaatcatggctctgcctgcgagtatcaagatgctaggccttatacctggtattctaatgatcatccttgtggcactgctcaccgagacatccattgacatgctggtcaggtgcagccaccagggcaagattacatcctacggctggttgatgggtgacacatttggtcagtgggggagaattgcgctacaagcatcggtggtgataaacaatgtcggcgtgttgattgtatacatgattattattggtgatgtcctatcaggaacatcgtcaacaggtgttcatcacagtggcgtattggaggggtggtttggacctcatatgtggaattctcgtcccattgtactcctcgctacaactcttcttgtgtttgctccattgactcatccaaggaactgtggagatccccaaactgtttcctgagatagatggagttagttctgtctggaaactgttcacagctgtgcctgttcttgtcactgcctacatctgccactacaatgttcacagcatcgataatgagctggaggacaaaactcagattaaaccaattgtgcaaacttctctgggactctgctcaagtgtttacattgcaacaagcttcttcgcatatctcctctttggcgaggctaccttggctgatgtgcttgccaatttcgactctgaccttcgcattccgttgagttctgccttcaatgacatagtgagagtgagctatgtcgtccatatcatgcttgtcttccctattgtattctttgcccttaggctcaacttggatggattactctttcccaccgcaaggcacatttccggtgacaacaagaggttcaccattatcaccatctcacttattgctgtaatttatcttgctgccatcttcataccaagcatctgggatgctttccaattcactggcgccacagctgctgtgcttatcggtttcatctttcctgccatgattatactaagggacccatatggtgtttcaaccaagcgtgacaaggttttggcggtaacaatgattgtgcttgctgtggtgtccaattgtgtggccctgtacagtgatgcgttcaacatcttctacaggaagcaggaggcctagagcccatacctcaggggaagagaacctctttgtacaggtcaagggtgattgttgagcttcaagtaagctactactgagcagcagtaccacgaatctcatggtggtcaatagtttttgtttggtcacttcgaagaaactttggtttgctgcgaatatttgtctagtttcctgaacataaactgcctccacatctggatgggaccacgtgtgctatgatcacccgtggaacaatttttttcttgtaatggatgattgaaatagctgtatataaatatataataatatgcaccgatgcagtagcaaactgaaacaggtactcacaaatataaagctggaactcacgtcaatttggag

SEQ ID NO: 54195 - DNA, 2418 bp, Zea Mays
gtgagattgaaacggggccacagtctccaccgaactctgcagcagatccatcgctctcagccagaccacatatcgccctcgtcgttatctaggtcaccggtcgtgtgccgccgccgccgccgccgcccgacgctctccgtggataaggtcagtccggccacgcattttatttccgtccaagaaaggcagcgccgcaagcaaccggacaggagcagtcgaatccggcaagttaaaggaaacttaaaaagaaaagggaagtaaagaccgggcgcgtcactggcatcaatcggcatcaatcctcccctgcggaagggaaggaagccagaattgggacgcaacctgagctggaaagttgggccttttccttcgaaagggacggggccgcggcgaaccggggcggcaagatcgcccttggacagttcttggtaggcggagagagatattatatcatattctgatatcactcacctacccggtctgccgttcgcctataagaagaccggaggcgaggagggagctccctccctctgcaagtacaagttgtcctgtatttggtttagtttgcgctgctgtatttgttcagggttttggtcgcgtgttgaggaaagattcggggttcttgaaagggaaatttggtgaacttgtttggatttaaggggcataataagataagtagatggtggttgagtatattattgagtgaaacaaatggggtcatcaaggaatgtgccgcacaaagtgatgcaagatgagatcacacctcttctcccgatcaaagctgaggaggatgcagttcatgagttcgacggagcttctttctctggcgcggtcttcaatctgtcaacaaccattgtaggagctggaatcatggctctgcctgcgagtatcaagatgctaggccttatacctggtattctaatgatcatccttgtggcactgctcaccgagacatccattgacatgctggtcaggtgcagccaccagggcaagattacatcctacggctggttgatgggtgacacatttggtcagtgggggagaattgcgctacaagcatcggtggtgataaacaatgtcggcgtgttgattgtatacatgattattattggtgatgtcctatcaggaacatcgtcaacaggtgttcatcacagtggcgtattggaggggtggtttggacctcatatgtggaattctcgtcccattgtactcctcgctacaactcttcttgtgtttgctccattggtgagctttaaacgtttggattcattgagatacacatctgcactatcagttgctcttgctgtggtttttgttgtcatcactgccggggttgctattgtcagactcatccaaggaactgtggagatccccaaactgtttcctgagatagatggagttagttctgtctggaaactgttcacagctgtgcctgttcttgtcactgcctacatctgccactacaatgttcacagcatcgataatgagctggaggacaaaactcagattaaaccaattgtgcaaacttctctgggactctgctcaagtgtttacattgcaacaagcttcttcgcatatctcctctttggcgaggctaccttggctgatgtgcttgccaatttcgactctgaccttcgcattccgttgagttctgccttcaatgacatagtgagagtgagctatgtcgtccatatcatgcttgtcttccctattgtattctttgcccttaggctcaacttggatggattactctttcccaccgcaaggcacatttccggtgacaacaagaggttcaccattatcaccatctcacttattgctgtaatttatcttgctgccatcttcataccaagcatctgggatgctttccaattcactggcgccacagctgctgtgcttatcggtttcatctttcctgccatgattatactaagggacccatatggtgtttcaaccaagcgtgacaaggttttggcggtaacaatgattgtgcttgctgtggtgtccaattgtgtggccctgtacagtgatgcgttcaacatcttctacaggaagcaggaggcctagagcccatacctcaggggaagagaacctctttgtacaggtcaagggtgattgttgagcttcaagtaagctactactgagcagcagtaccacgaatctcatggtggtcaatagtttttgtttggtcacttcgaagaaactttggtttgctgcgaatatttgtctagtttcctgaacataaactgcctccacatctggatgggaccacgtgtgctatgatcacccgtggaacaatttttttcttgtaatggatgattgaaatagctgtatataaatatataataatatgcaccgatgcagtagcaaactgaaacaggtactcacaaatataaagctggaactcacgtcaatttggag

SEQ ID NO: 54196 - DNA, 625 bp, Zea Mays
ctctccccacgccactctccctactccctccctctctctagctccccatgcagtagcagccccccccctcccatggagctggcgaccgagccctcccaagctccactcccaccttggcaagaacttgtgtgctgaaatttcagaatcttgcactttcttctaaaatctataactcgagtttgggagctcctaaaatagaccgagagatgatgatcgagctagtggtgtggtgctaaccacaagatgcagtcggtggacgacccaaggaaggatggacttaaccagtggatgctcgccaagcgagtacctccccagcaaacactctctaagtgttaaattaaaggcaagccccggttttatgcataactgtttatatatgctattttactgcacttaatgtttataggcttgtactatgcactaagtgtaggagttgactgaaaccctagttgcataaactcaggactccttttgagatggatactagtatgctaggacgagtagctgcttactaattagggatctcggtagaagtcgagtgatttttccagcactcgcgcgaggtcaggacttggttgtatccactttcatagcataatgatgttggcctatggacaacaatcca

SEQ ID NO: 54197 - DNA, 814 bp, Zea Mays
ccccacgccactctccctactccctccctctctctagctccccatgcagtagcagccccccccctcccatggagctggcgaccgagccctcccaagctccactcccaccttggcaagaacttgtgtgctgaaatttcagaatcttgcactttcttctaaaatctataactcgagtttgggagctcctaaaatagtaagacttgttttgttagcttccatatgaaatgtcctacctattagatctataatatgacctgttttagtagacgtttttgtctgtgcaaattaaatcttaaaaagaggtttagagaataaacgaacttgcttctctccatagttttcattataaaaatccaaaaatgatcaaacttgttttgttagttagatgttgtcatactccatctaagaaaaatataaaacttatatgttgttcactgttttcttggtatgctaattaaatcttgttaactatgaaaaagatgattgttttgcttgttgtttttggatctgtagctccagtgctccaaatggattgaaatttttacagtagcccctctgtgtgatgcttagtgactgataaaaatttcataatttaaggtcaatgtatcaccgagttagtgatttaacttgtttgatgcatactaaatagttttaaatggtgtataaataatgtatggatgtaaaaatggaaaatggcgttccactgtccttgcaaaatattatagtagcctaagaaaacttaatatggtcatgcatccacagaaaataattaattttacaattaacttgctctcacaagctttattgcattaac

SEQ ID NO: 54198 - DNA, 837 bp, Zea Mays
ccttccctcgccctcgctcttcgtggctctgaactgatccaccttctgcgttaggctcgattgtttgccggcgatggtgcagaccaacctctccatcgacaagattaatgccatgcttaaggcattcgaccatacgagagggttcatgtagcatgattaccaccttggctagaggcacaacatgctcattatgtggaggttgtcttaggtcactggaatcaaaatgggaaacctcctatgcagaatgttttgtaatatgtttttcataaggcataggaaaaattagcataggcaaagaaatgggtcaaacctcatgttgagactgctaagatgaaatggattcctgttaaggagaaattggttctcctcaagaaaatgtagaacataatgtacaaaaggtatcaacaaggtgttaatgaattcaacctcatattgagattgctaagatgaaatggatttccgttaaggagaaattggttgtcctcaaggaaaatgcagaaccttatgtacaaattggttgtcttcaaaatgttggtcatgtagctgcaagcctacaacaaagagaatcaacaatggtggtgatgctacacatgtagaagtagcaatgttggtcttgtaaatccaagatttggttgttgatgaatgatatctatgataatatattgctaagtatatgtgatgatcattaattgtcgtttaattataatgagttgtgccttttgtgccacattgacattggtgatagttaaaaattaaaatggtcttgattgaccaaatgttgtgatgaacaaaaatgttttgaaacaaactaaatcgtcatggtatggatgccacgtg

SEQ ID NO: 54199 - DNA, 1038 bp, Zea Mays
acctagccgattcaatcccagcaacagccgccctatcctcctcgtcagccgtcaccgccgccccacagcctcgcctctaccatcgcccccgccggtgctagctgcatccggccaggaggtcagtgcccggcactagccgcatctagcctggtgattagtgctccacctcgctccagcctccagcccacgcctataggggcccctgcctagcagccagccactgtcggctaggtggtcaatgcccccgcccgccgcccatgccacgccgccagccggccagctggctagccggcccgccactgctccactgtgctccagtagatgctcgattgtttgccggcgatggtgcagaccaacctctccatcgacaagattaatgccatgcttaaggcattcgaccatacgagagggttcatgtagcatgattaccaccttggctagaggcacaacatgctcattatgtggtcagagtagaaccacaaatatttatcacttcaatttccattctcatggaggttgtcttaggtcactggaatcaaaatgggaaacctcctatgcagaatgttttgtaatatgtttttcataaggcataggaaaaattagcataggcaaagaaatgggtcaaacctcatgttgagactgctaagatgaaatggatttccgttaaggagaaattggttgtcctcaaggaaaatgcagaaccttatgtacaaattggttgtcttcaaaatgttggtcatgtagctgcaagcctacaacaaagagaatcaacaatggtggtgatgctacacatgtagaagtagcaatgttggtcttgtaaatccaagatttggttgttgatgaatgatatctatgataatatattgctaagtatatgtgatgatcattaattgtcgtttaattataatgagttgtgccttttgtgccacattgacattggtgatagttaaaaattaaaatggtcttgattgaccaaatgttgtgatgaacaaaaatgttttgaaacaaactaaatcgtcatggtatggatgccacgtg

SEQ ID NO: 54200 - DNA, 1106 bp, Zea Mays
acctagccgattcaatcccagcaacagccgccctatcctcctcgtcagccgtcaccgccgccccacagcctcgcctctaccatcgcccccgccggtgctagctgcatccggccaggaggtcagtgcccggcactagccgcatctagcctggtgattagtgctccacctcgctccagcctccagcccacgcctataggggcccctgcctagcagccagccactgtcggctaggtggtcaatgcccccgcccgccgcccatgccacgccgccagccggccagctggctagccggcccgccactgctccactgtgctccagtagatgctcgattgtttgccggcgatggtgcagaccaacctctccatcgacaagattaatgccatgcttaaggcattcgaccatacgagagggttcatgtagcatgattaccaccttggctagaggcacaacatgctcattatgtggaggttgtcttaggtcactggaatcaaaatgggaaacctcctatgcagaatgttttgtaatatgtttttcataaggcataggaaaaattagcataggcaaagaaatgggtcaaacctcatgttgagactgctaagatgaaatggattcctgttaaggagaaattggttctcctcaagaaaatgtagaacataatgtacaaaaggtatcaacaaggtgttaatgaattcaacctcatattgagattgctaagatgaaatggatttccgttaaggagaaattggttgtcctcaaggaaaatgcagaaccttatgtacaaattggttgtcttcaaaatgttggtcatgtagctgcaagcctacaacaaagagaatcaacaatggtggtgatgctacacatgtagaagtagcaatgttggtcttgtaaatccaagatttggttgttgatgaatgatatctatgataatatattgctaagtatatgtgatgatcattaattgtcgtttaattataatgagttgtgccttttgtgccacattgacattggtgatagttaaaaattaaaatggtcttgattgaccaaatgttgtgatgaacaaaaatgttttgaaacaaactaaatcgtcatggtatggatgccacgtg

SEQ ID NO: 54201 - DNA, 1154 bp, Zea Mays
acctagccgattcaatcccagcaacagccgccctatcctcctcgtcagccgtcaccgccgccccacagcctcgcctctaccatcgcccccgccggtgctagctgcatccggccaggaggtcagtgcccggcactagccgcatctagcctggtgattagtgctccacctcgctccagcctccagcccacgcctataggggcccctgcctagcagccagccactgtcggctaggtggtcaatgcccccgcccgccgcccatgccacgccgccagccggccagctggctagccggcccgccactgctccactgtgctccagtagatgctcgattgtttgccggcgatggtgcagaccaacctctccatcgacaagattaatgccatgcttaaggcattcgaccatacgagagggttcatgtagcatgattaccaccttggctagaggcacaacatgctcattatgtggtcagagtagaaccacaaatatttatcacttcaatttccattctcatggaggttgtcttaggtcactggaatcaaaatgggaaacctcctatgcagaatgttttgtaatatgtttttcataaggcataggaaaaattagcataggcaaagaaatgggtcaaacctcatgttgagactgctaagatgaaatggattcctgttaaggagaaattggttctcctcaagaaaatgtagaacataatgtacaaaaggtatcaacaaggtgttaatgaattcaacctcatattgagattgctaagatgaaatggatttccgttaaggagaaattggttgtcctcaaggaaaatgcagaaccttatgtacaaattggttgtcttcaaaatgttggtcatgtagctgcaagcctacaacaaagagaatcaacaatggtggtgatgctacacatgtagaagtagcaatgttggtcttgtaaatccaagatttggttgttgatgaatgatatctatgataatatattgctaagtatatgtgatgatcattaattgtcgtttaattataatgagttgtgccttttgtgccacattgacattggtgatagttaaaaattaaaatggtcttgattgaccaaatgttgtgatgaacaaaaatgttttgaaacaaactaaatcgtcatggtatggatgccacgtg

SEQ ID NO: 54202 - DNA, 1170 bp, Zea Mays
acctagccgattcaatcccagcaacagccgccctatcctcctcgtcagccgtcaccgccgccccacagcctcgcctctaccatcgcccccgccggtgctagctgcatccggccaggaggtcagtgcccggcactagccgcatctagcctggtgattagtgctccacctcgctccagcctccagcccacgcctataggggcccctgcctagcagccagccactgtcggctaggtggtcaatgcccccgcccgccgcccatgccacgccgccagccggccagctggctagccggcccgccactgctccactgtgctccagtagatgctcgattgtttgccggcgatggtgcagaccaacctctccatcgacaagattaatgccatgcttaaggcattcgaccatacgagaggcgttatccttataccggttcatgtagcatgattaccaccttggctagaggcacaacatgctcattatgtggtcagagtagaaccacaaatatttatcacttcaatttccattctcatggaggttgtcttaggtcactggaatcaaaatgggaaacctcctatgcagaatgttttgtaatatgtttttcataaggcataggaaaaattagcataggcaaagaaatgggtcaaacctcatgttgagactgctaagatgaaatggattcctgttaaggagaaattggttctcctcaagaaaatgtagaacataatgtacaaaaggtatcaacaaggtgttaatgaattcaacctcatattgagattgctaagatgaaatggatttccgttaaggagaaattggttgtcctcaaggaaaatgcagaaccttatgtacaaattggttgtcttcaaaatgttggtcatgtagctgcaagcctacaacaaagagaatcaacaatggtggtgatgctacacatgtagaagtagcaatgttggtcttgtaaatccaagatttggttgttgatgaatgatatctatgataatatattgctaagtatatgtgatgatcattaattgtcgtttaattataatgagttgtgccttttgtgccacattgacattggtgatagttaaaaattaaaatggtcttgattgaccaaatgttgtgatgaacaaaaatgttttgaaacaaactaaatcgtcatggtatggatgccacgtg

SEQ ID NO: 54203 - DNA, 1093 bp, Zea Mays
acctagccgattcaatcccagcaacagccgccctatcctcctcgtcagccgtcaccgccgccccacagcctcgcctctaccatcgcccccgccggtgctagctgcatccggccaggaggtcagtgcccggcactagccgcatctagcctggtgattagtgctccacctcgctccagcctccagcccacgcctataggggcccctgcctagcagccagccactgtcggctaggtggtcaatgcccccgcccgccgcccatgccacgccgccagccggccagctggctagccggcccgccactgctccactgtgctccagtagatgctcgattgtttgccggcgatggtgcagaccaacctctccatcgacaagattaatgccatgcttaaggcattcgaccatacgagagggttcatgtagcatgattaccaccttggctagaggcacaacatgctcattatgtggtcactggaatcaaaatgggaaacctcctatgcagaatgttttgtaatatgtttttcataaggcataggaaaaattagcataggcaaagaaatgggtcaaacctcatgttgagactgctaagatgaaatggattcctgttaaggagaaattggttctcctcaagaaaatgtagaacataatgtacaaaaggtatcaacaaggtgttaatgaattcaacctcatattgagattgctaagatgaaatggatttccgttaaggagaaattggttgtcctcaaggaaaatgcagaaccttatgtacaaattggttgtcttcaaaatgttggtcatgtagctgcaagcctacaacaaagagaatcaacaatggtggtgatgctacacatgtagaagtagcaatgttggtcttgtaaatccaagatttggttgttgatgaatgatatctatgataatatattgctaagtatatgtgatgatcattaattgtcgtttaattataatgagttgtgccttttgtgccacattgacattggtgatagttaaaaattaaaatggtcttgattgaccaaatgttgtgatgaacaaaaatgttttgaaacaaactaaatcgtcatggtatggatgccacgtg

SEQ ID NO: 54204 - DNA, 1122 bp, Zea Mays
acctagccgattcaatcccagcaacagccgccctatcctcctcgtcagccgtcaccgccgccccacagcctcgcctctaccatcgcccccgccggtgctagctgcatccggccaggaggtcagtgcccggcactagccgcatctagcctggtgattagtgctccacctcgctccagcctccagcccacgcctataggggcccctgcctagcagccagccactgtcggctaggtggtcaatgcccccgcccgccgcccatgccacgccgccagccggccagctggctagccggcccgccactgctccactgtgctccagtagatgctcgattgtttgccggcgatggtgcagaccaacctctccatcgacaagattaatgccatgcttaaggcattcgaccatacgagaggcgttatccttataccggttcatgtagcatgattaccaccttggctagaggcacaacatgctcattatgtggaggttgtcttaggtcactggaatcaaaatgggaaacctcctatgcagaatgttttgtaatatgtttttcataaggcataggaaaaattagcataggcaaagaaatgggtcaaacctcatgttgagactgctaagatgaaatggattcctgttaaggagaaattggttctcctcaagaaaatgtagaacataatgtacaaaaggtatcaacaaggtgttaatgaattcaacctcatattgagattgctaagatgaaatggatttccgttaaggagaaattggttgtcctcaaggaaaatgcagaaccttatgtacaaattggttgtcttcaaaatgttggtcatgtagctgcaagcctacaacaaagagaatcaacaatggtggtgatgctacacatgtagaagtagcaatgttggtcttgtaaatccaagatttggttgttgatgaatgatatctatgataatatattgctaagtatatgtgatgatcattaattgtcgtttaattataatgagttgtgccttttgtgccacattgacattggtgatagttaaaaattaaaatggtcttgattgaccaaatgttgtgatgaacaaaaatgttttgaaacaaactaaatcgtcatggtatggatgccacgtg

SEQ ID NO: 54205 - DNA, 1006 bp, Zea Mays
acctagccgattcaatcccagcaacagccgccctatcctcctcgtcagccgtcaccgccgccccacagcctcgcctctaccatcgcccccgccggtgctagctgcatccggccaggaggtcagtgcccggcactagccgcatctagcctggtgattagtgctccacctcgctccagcctccagcccacgcctataggggcccctgcctagcagccagccactgtcggctaggtggtcaatgcccccgcccgccgcccatgccacgccgccagccggccagctggctagccggcccgccactgctccactgtgctccagtagatgctcgattgtttgccggcgatggtgcagaccaacctctccatcgacaagattaatgccatgcttaaggcattcgaccatacgagaggcgttatccttataccggttcatgtagcatgattaccaccttggctagaggcacaacatgctcattatgtggaggttgtcttaggtcactggaatcaaaatgggaaacctcctatgcagaatgttttgtaatatgtttttcataaggcataggaaaaattagcataggcaaagaaatgggtcaaacctcatgttgagactgctaagatgaaatggatttccgttaaggagaaattggttgtcctcaaggaaaatgcagaaccttatgtacaaattggttgtcttcaaaatgttggtcatgtagctgcaagcctacaacaaagagaatcaacaatggtggtgatgctacacatgtagaagtagcaatgttggtcttgtaaatccaagatttggttgttgatgaatgatatctatgataatatattgctaagtatatgtgatgatcattaattgtcgtttaattataatgagttgtgccttttgtgccacattgacattggtgatagttaaaaattaaaatggtcttgattgaccaaatgttgtgatgaacaaaaatgttttgaaacaaactaaatcgtcatggtatggatgccacgtg

SEQ ID NO: 54206 - DNA, 990 bp, Zea Mays
acctagccgattcaatcccagcaacagccgccctatcctcctcgtcagccgtcaccgccgccccacagcctcgcctctaccatcgcccccgccggtgctagctgcatccggccaggaggtcagtgcccggcactagccgcatctagcctggtgattagtgctccacctcgctccagcctccagcccacgcctataggggcccctgcctagcagccagccactgtcggctaggtggtcaatgcccccgcccgccgcccatgccacgccgccagccggccagctggctagccggcccgccactgctccactgtgctccagtagatgctcgattgtttgccggcgatggtgcagaccaacctctccatcgacaagattaatgccatgcttaaggcattcgaccatacgagagggttcatgtagcatgattaccaccttggctagaggcacaacatgctcattatgtggaggttgtcttaggtcactggaatcaaaatgggaaacctcctatgcagaatgttttgtaatatgtttttcataaggcataggaaaaattagcataggcaaagaaatgggtcaaacctcatgttgagactgctaagatgaaatggatttccgttaaggagaaattggttgtcctcaaggaaaatgcagaaccttatgtacaaattggttgtcttcaaaatgttggtcatgtagctgcaagcctacaacaaagagaatcaacaatggtggtgatgctacacatgtagaagtagcaatgttggtcttgtaaatccaagatttggttgttgatgaatgatatctatgataatatattgctaagtatatgtgatgatcattaattgtcgtttaattataatgagttgtgccttttgtgccacattgacattggtgatagttaaaaattaaaatggtcttgattgaccaaatgttgtgatgaacaaaaatgttttgaaacaaactaaatcgtcatggtatggatgccacgtg

SEQ ID NO: 54207 - DNA, 910 bp, Zea Mays
cataaccctaacctagccgattcaatcccagcaacagccgccctatcctcctcgtcagccgtcaccgccgccccacagcctcgcctctaccatcgcccccgccggtgctagctgcatccggccaggagctcgattgtttgccggcgatggtgcagaccaacctctccatcgacaagattaatgccatgcttaaggcattcgaccatacgagagggttcatgtagcatgattaccaccttggctagaggcacaacatgctcattatgtggaggttgtcttaggtcactggaatcaaaatgggaaacctcctatgcagaatgttttgtaatatgtttttcataaggcataggaaaaattagcataggcaaagaaatgggtcaaacctcatgttgagactgctaagatgaaatggattcctgttaaggagaaattggttctcctcaagaaaatgtagaacataatgtacaaaaggtatcaacaaggtgttaatgaattcaacctcatattgagattgctaagatgaaatggatttccgttaaggagaaattggttgtcctcaaggaaaatgcagaaccttatgtacaaattggttgtcttcaaaatgttggtcatgtagctgcaagcctacaacaaagagaatcaacaatggtggtgatgctacacatgtagaagtagcaatgttggtcttgtaaatccaagatttggttgttgatgaatgatatctatgataatatattgctaagtatatgtgatgatcattaattgtcgtttaattataatgagttgtgccttttgtgccacattgacattggtgatagttaaaaattaaaatggtcttgattgaccaaatgttgtgatgaacaaaaatgttttgaaacaaactaaatcgtcatggtatggatgccacgtg

SEQ ID NO: 54208 - DNA, 2519 bp, Zea Mays
atggaattagcttcaatccccctgaaccgggccctgaccgttcgcctcctcggttgcttgttttttctcccccttcccacctccgcgagatctgacggctcggcctccaatggcgcccttctccctgtaaacctagctgctctacctacccgcacccccaccccgtggagagcaagtgcagccatggcggcggatcgggagaaggagcgcgaggcggagctggagggcgccatgtacactaactgcctactcctcggcctcgatcccgcggtcctcggctctccctcttcccccgccggccgcgtgggcctatttcgtcactccaacccccgccttggcgagcaactcctctacttccttctctcctcgctccgcggccccgcgcagtccgcgaaggattttgacaaggtctggccaatcttcgactccgctcagtccagggagttcaggaagatcgtgcaagggatcatcagcgagctggaacagcatggggcactgcctcggagcaattctagggtctcgtcacttgccacatgctgcggaccgagatttgttgagcttttgtggcaactatctgtacatgccctgagagaagtccacaagagaacatttgcagctgatgttgtatcaaatccactacctgcagcactaacagatgtttcttatcttcatgctgcttctttactcccagtaaccaaggcaagaatagctctggagaggcgtaaatttcttaaaaatgcaaacatagctgttcagaggcaaatgacatggtcaaatttggcccatgagatgacagctgagttccgaagtctatgtgctgaagaggcttatttgcaacaagagttagagaaactacaagatatgagaaacaaagcaaaactggaaggcgaactctgggacgaacggctctcaggctcatctgggcagaactctcatttggtttctaaggcaactcgtctttgggaatcaatattggctcgcaaaggccagcacgaggttttagcttctggaccaattgaagatcttatagcacatcgggagcacagataccggatatcaggatcacagttactagcagcaatggatatgagttcaagtgttccacattctgagttactatcatctaaagctggtgaaacttctataattttggagaagcaggaagaattttctcagctattccaagaaaaggaagaagcccttacaaggtcagatgataggaatggacgtactcagcaaactgttgatgtagctgaaattcttcgccgctggacccatgctttacaacgtattcataaacaatctcttcatttggccaaagcgaatgatggagaggggcctgaattactgaggagtgcatccagcggagaggccagtactcattctgattcgttaactgcaacattagctgaacatcgccagcatttagtcagtatacagggtctaattaatcaactcaaggaggctattccagcaatgcagcagtctatagacgaactctcagaagaagtgaatagtgtatctattaactcaatggaccaattgaactcgaggctgccactgccagtacaaattgcagggtttggaacatcagaagaaagcagcagtgaagtttcggagatcaattctaagctctcttctacacacttggataagcctgggggcagtcctgctctaaagctaccaccattatttagtctgactccaagttcttctggaaaaggaatacagacacaaaaacggagtgcattggctcgtcaacgtagccaggacatcacatcagaacagaaaacgcttaccatcccctcaactaaggatcaaatgaatggttcaatgcacgaaaatgatgactattctgctcatgacattagacgttctgttcgtgaagctgctttatctaagccattgaagaatacagagagaccacaagataaaaatagtgatgatggttcggaacacttctttattccgctgtcaattagtgctgcgaagaaggaaatggattcggtggcaaatcgatgtaaccaaagattaggtttgtcacctcagatgaagttcccaaagagcacaagctacaatgcagataccccaatcaacaaaagtccaattctgttaagtgaactcaatggacatgattcgatcagtgccatgagtttccttgacccggctggtggtctggcacatcagtcctttatcactgatgatgctctggatcaagtattctctcctctattgatggaatcttcgttgttccatgatgcagatgaggatctacttgcacccttgtcagagactgatgcagcattaatggaatattaagcttcacatgtgcactatgtaatattttgaccactgcagacgcagcctggaggttattgtggcttatgtttgtcttattgactattcggctagttgcttgcgagttgcaaccatgttgagatacagatgcttcatcagaatttgtggggtatatgttgactattgatgcggggagaggcatgtaccagcttcgactgcag

SEQ ID NO: 54209 - DNA, 2325 bp, Zea Mays
atggaattagcttcaatccccctgaaccgggccctgaccgttcgcctcctcggttgcttgttttttctcccccttcccacctccgcgagatctgacggctcggcctccaatggcgcccttctccctgtaaacctagctgctctacctacccgcacccccaccccgtggagagcaagtgcagccatggcggcggatcgggagaaggagcgcgaggcggagctggagggcgccatgtacactaactgcctactcctcggcctcgatcccgcggtcctcggctctccctcttcccccgccggccgcgtgggcctatttcgtcactccaacccccgccttggcgagcaactcctctacttccttctctcctcgctccgcggccccgcgcagtccgcgaaggattttgacaaggtctggccaatcttcgactccgctcagtccagggagttcaggaagatcgtgcaagggatcatcagcgagctggaacagcatggggcactgcctcggagcaattctagggtctcgtcacttgccacatgctgcggaccgagatttgttgagcttttgtggcaactatctgtacatgccctgagagaagtccacaagagaacatttgcagctgatgttgtatcaaatccactacctgcagcactaacagatgtttcttatcttcatgctgcttctttactcccagtaaccaaggcaagaatagctctggagaggcgtaaatttcttaaaaatgcaaacatagctgttcagaggcaaatgacatggtcaaatttggcccatgagatgacagctgagttccgaagtctatgtgctgaagaggcttatttgcaacaagagttagagaaactacaagatatgagaaacaaagcaaaactggaaggcgaactctgggacgaacggctctcaggctcatctgggcagaactctcatttggtttctaaggcaactcgtctttgggaatcaatattggctcgcaaaggccagcacgaggttttagcttctggaccaattgaagatcttatagcacatcgggagcacagataccggatatcaggatcacagttactagcagcaatggatatgagttcaagtgttccacattctgagttactatcatctaaagctggtgaaacttctataattttggagaagcaggaagaattttctcagctattccaagaaaaggaagaagcccttacaaggtcagatgataggaatggacgtactcagcaaactgttgatgtagctgaaattcttcgccgctggacccatgctttacaacgtattcataaacaatctcttcatttggccaaagcgaatgatggagaggggcctgaattactgaggagtgcatccagcggagaggccagtactcattctgattcgttaactgcaacattagctgaacatcgccagcatttagtcagtatacagggtctaattaatcaactcaaggaggctattccagcaatgcagcagtctatagacgaactctcagaagaagtgaatagtgtatctattaactcaatggaccaattgaactcgaggctgccactgccagtacaaattgcagggtttggaacatcagaagaaagcagcagtgaagtttcggagatcaattctaagctctcttctacacacttggataagcctgggggcagtcctgctctaaagctaccaccattatttagtctgactccaagttcttctggaaaaggaatacagacacaaaaacggagtgcattggctcgtcaacgtagccaggacatcacatcagaacagaaaacgcttaccatcccctcaactaaggatcaaatgaatggttcaatgcacgaaaatgatgactattctgctcatgacattagacgttctgttcgtgaagctgctttatctaagccattgaagaatacagagagaccacaagataaaaatagtgatgatggttcggaacacttctttattccgctgtcaattagtgctgcgaagaaggaaatggattcggtggcaaatcgatgtaaccaaagattaggtttgtcacctcagatgaagttcccaaagagcacaagctacaatgcagataccccaatcaacaaaagtccaattctgttaagtgaactcaatggacatgattcgatcagtgccatgagtttccttgacccggctggtggtctggcacatcagtcctttatcactgatgatgctctggatcaagtattctctcctctattgatggaatcttcgttgttccatgatgcagatgaggatctacttggcgatacagataccagtctctatactgctatgaaaattggaaggagc

SEQ ID NO: 54210 - DNA, 299 bp, Zea Mays
cggtcgacctggagcaaaagcggcgggtgtgcgctgcttggattgcagccattaagagagagaaacaagggtagaaggacgtgggtccattcgcgggtgagaattgagctcgtccgcaaccttcacgcagtgccagacaatggtgcatccttgcactacgcgaggactcgcccacggggtcactgtgtcggagaccgggtgcctcgttgtcgacgtcaagagatccggcgcgccaccagtctccgtggacaactacactggtgcctcgaaaacgtgctcagcttgaacctctattattg

SEQ ID NO: 54211 - DNA, 500 bp, Zea Mays
cggtcgacctggagcaaaagcggcgggtgtgcgctgcttggattgcagccattaagagagagaaacaagggtagaaggacgtgggtccattcgcgggtgagaattgagctcgtccgcaaccttcacgcagtgccagacaatggtgcatccttgcactacgcgaggactcgcccacggggtcactgtgtcggagaccgggtgcctcgttgtcgacgtcaagagatccggcgcgccaccagtctccgtggacaactacactggtgcctcgaaaacggtgatgagaagtactctagttgttcctgtggctggagggcgtttccagttctagaggaggactagctaggtttatgtatgagctttggagggtttctaccttcctgcttttgtaataaattatgcactttgagtatatcaggacttgtaataaatattactctttcgaaacatgtaaaacttgagttttgaaaaggtaaatgatgtagctgaggtgcccgatcttt

SEQ ID NO: 54212 - DNA, 1963 bp, Zea Mays
cggattctagcccaagaccagtgtaaaagtgtggaagtccttgtgctccagttgatgctagtctctttccagccattaggtttgatctgcacaagtgttggcacaccatcggcctgccagtagtgaccacgccggtcagtttggccatctcgtcgtggccaagacaacccagcaagagctcccaaaaaaggaagttgaaattcaagaagtggttcctgaagaggagtttgctccagtgctgtagatccagtggttggttccatctaactggttattgtgatagaaggactttggatcttctcctgcaataaggcaagtgttggggacttgttctcaaatgctatgaattaagaacaaggcaacacaaaaaatgttaaacgctaatgaccttcgtccttcggggcattatttttcccttaggatataatgatgttcggacgaaggttgtgaaggacataccttcatcagtgcagcatatgataatgaaaagagaatcatatgagatgtaaaagacacatgaataattgtatattattatcaacttatttctattttattatcatagaaaaatagaaatgatatcaagttacaaatgtaccttcggcttgaaagaaggtaaggatacaagcgtgacgcaaaagcaaatgccaagtcagcgtgaacagtacatgaacattgttcatctatttataggcacgggacacagcccatgtaaaattacacccatgccctttacatttgttaatgactctatagtgatccaccgaggtccaaatagccttttcccttttaagtcggttcccttttctgctatcatgccgaaggtcccttgcgcatagcttcggctctttgtcaaccattgtattctttgtgcttctcacactgtggttctgctccaagtccgaagatacctggtcatgtaatacactccagaaacattgttaaatcatgtttttgaggaccttcggaagacgaaggcccccaatagcaagccccggtgcatgcaaccccttccttatgtttttaaaagatttttatacactttaaatctagtgaaatgtgcattaagtttataggagttgcttgaaaactattggatgcattgcctaccttgatatccatacctttatagatacttctgatgaagtatcaaaatatgatttacaaaaaaatgcttagccctgcttagatcttgtggatagaggttgtcttttgcattaatgcctagctcacgggttatcctgaggaaggacagcttctacctgcaagaatatttttattgggagcatggtgggatcttactgcaaagttccctataatgttgttttcatcctaaggaacacaaacaatcctaaggatagaagtacttaaatcaggacttgggctaggaacaagtgatgttctacccaggttaattaaggattggatgcgtatgtaggcctgtatgatcaaggactatcttaactggccacatgccctggatatgggacagggtaagcttgaacccggctattccatacatgaaaagacaatcgcgcactgggagtggagagatggcgagagtggcacgtaccctcctggcaaaggaccgcctaaaaaggatggtgtgctcttgggtggcgcggacctgttcatgcagtggaggatccgtgggaatggtagacatatgcaagagttacaagaaacatatgtcgtgtggttagagatcctcagttgagtaaatcgattcggatcgccgttatatccccggagagtggagacttgatctccgacctacaacctaagtcaggatgtaaacattatgagtaaaaatgatgttgtattgatgagatggtgaaattagactagatgcaaccagagtctattaatatttaatctggcattaaaatattgaaagtaaggactcactttagtaagctatttctgcaaaagtatctaagttgattcttgctaaagccttttc

SEQ ID NO: 54213 - DNA, 5239 bp, Zea Mays
cagcaggttgatgaagtgattcagtgtgtggaggtgtaactgaagaagaatctttttctctgctgtgctccactgacatattaagctgtcttatgggggaagtgcatgactgatactttgaggctactctccaccaaaaatatctaatttggactattttggagcagtaaatagtggagaattgatcggttggtctgctgtctgcagtaggggacaaaagagatacatgtatgtgtatagttgagataagtgtggagggtataactgaggtctagaacccaccctcagctggaaagaatatcctgttcttggacatattgaagcatatccccaactgatatttgtgttgagaaaatggaccaggttcagtgtcctaaccaaggttgtgtactggtggggtatgagagcatgttagccacgtgttgaagtccatatgttgctggcgctctgagacacactgcttcactgcatgttggccatgtctagggacgttttctatatatatggtggctctaaaatctggttcagtgaaggattcacctggccttcggattctagcccaagaccagtgtaaaagtgtggaagtccttgtgctccagttgatgctagtctctttccagccattaggtttgatctgcacaagtgttggcacaccatcggcctgccagtagtgaccacgccggtcagtttggccatctcgtcgtggccaagacaacccagcaagcctaggggtattgtaccaaagtggaagagcaatgattttagagtactttttattagggaagaaggggccgttgttgaggaagtttgtgagataaagtagaccaaactgggagctgtgcaatgggacactgatgtcagggaagttgattcagtgtttgggataggaaattgaggaagatttttctccctttcctgtgctccactggtgtgctcgagttgggatacgggtggggtgcaaaaccaaggatctagtgacttcagctctgcttcaaaatatctagttttggattgtttgggagatgtggacaaaagagatcatatctgttttgtctactatctgcagatatctactacctgcagatttggaccaagtgatatttgtgtgttgggggcattaaagtttctttgctggttatttgaggtaataaaaaggggagctgaacttgaggtttcagtcgagtagaacagcaggagcagttttagaataatctgatgaaagtatctccatccaccaaattgatatagggaattctaggatatgccagcccaaaagagacttatgagaatggaaagtttattgtcaaaaatcatgataggaacgggggtgcccgattttccgtcaggtgaaggtaactatcgatttggtggagatgtcacacaaacgatccggcttccaatcaacacgactagaaccccgcaatcgcaacaccacttctcctctagttatcaaccatgcactgcgcgattgacctcaccacgagggctaattcctgcctgagaatcgaagacccaagcaagaacaagaaaaaacacaatctagaatattgcggatgaaaaattaagctctcaagttggggtctcacaaaccgatctacgacgactgttcttgacagatctaaacttaagcaaaactcaaccctaatgtggcggcagctgctgaataaatagagtattagagcgtgcatgacccatggactcgcccctaatgggctccgatgcgatacacagcccaacagacggtgtcgcagcaccaaaacagaatctgaacgctgacttgtttcgacgattcccgttgactctggacgaattttagggtggaaccagttgggttggttagatgatctccttatctttccaaccatatcaagtccgttgcaatcggagtctggatgcatcttgggcgtccattttagtgcagactagtcctggaacccgagatggagtcgcagccgagtcggacttgatctccttcctgttgtggcgcccttgctgctcctcctcaacacctaggcctttcccaagtccttgctggtcctctccaaggttcctaaacatcaaaacatccatggccccaagcgtaagctctgaaacacaattgactagggtagaacatacctggagatttagctgtcgtgcattcattgtatgtatagaagtgatgtcctcatcctcctcctcctcttgaattggagtcgtcctcgactcgatctcatcttcgtcacccatatatggcttcaaatctgaaatgttaaaggtgggactaacccgaaaatctagaggcaactcaggtggtaatccagggggtatctcagagggaaacacatccatgtcctcatcatcctccccctcttgaagtggagtcgccctcgactcaagctcatcttcttttcccaaatatggatttaaatctgatattaaaggtgggactaatcccaaactctgggggcaactcaagtttatatgcattgtcattaatcttctcgaaaattttaaatggtccagcagcacggttgggcaagctcgctccaggaatcaaatcaatctggtgctcaatcccacgaatgggaggaagttctggaggtaactcagagggaaaaacatctcggaactgctacaaaagattagtcacaaatgtagacaaaatgctagcaatatcatcaatagaaaagaaaagcatctttgcaaaccaaggcatagcaacaagcatcagtagcatgagtttcaagaagataagatttagtagcaagcatgataggagatttcaatttaatttgttgctgaatttctgtctcattagttggttccttatgggtacttgcagctctatctttatcagcttgtacaatttcagtaagagtcaaaggtagcaaagtaatgtttttatctttatgcctaaaagtgtatgtattactcctaccatggtgacatgcatcagtatcatattcccaaggtctacccaacaaaagagaacaagcttccataggtactacatcacaatccgcataatcagaatacataccaatggagaaatgcactcgtaccatgtgtgttaccttaaccttgcctgaatcattgatccactgaatgtggtatggatgtggccgtggacgtgtggtcaagccaagcttcttgaccaaatctgaactcaccaaattattgcagcttccaccatcaataataacacgtgcacgccgattctcgatggagaagaaagtctagaacaaattattgcgttgctgcttctcttatgattcaggctgagaactaagaacacgctgcaccatgatgcttcgaaggttcaccgtagcatcagcaccaagcatgacatcatcattagcagcaacatcactggagtcatcatcatcaccctcaccgtcggaagcactaatgtagccatcatccgtagcaatgtatgttcgctgactcgggcaatccttcttcacgtgaccaattccatgacagcggtggcaaacaatacccgaagaacgaccactggaaggtgttgcaggtgctggtgaattctgtttcttggtgggtacctacaaaggaaggttaccaacgtgtgcagcaggtgtcgagggagtatgacttgaggcaggtgtgtgcatccgtggtgcagaggaggcgccaaaagtagccctaggtcgatgttggcgtccctgcaattccttctctgcaagcatagcaaactggaacaacttgttgacaatgttaaattctttgtaatccacaatgtcctgaatgtcacgccgcaaacctgaataaaaacgacaaagagcgtcctcatgtccctctactatcccacaacgctgcaatcccttctgaagctcagcataataatcttgaacagatttatccccttgctctaaacgcatcaatttcttacgcaattctctatgataagatgggggaacaaatctaccgcgcatagctaccttaagatcttcccaagtcgtaggtgctctaccatccccaactagaccagtccaccagacaatagcaaaatctttaaattcactagtggcttgtctaacttgatgttgttcgggtacaaggtgggcagcaaatttctgttctatcgtcatctcccaatcaagatatccctcagcatcataatgacccgaaaaagatggtaattgttattaccttgctggcggtgttggtgtggcataccttctatgttttgatgaaggcggcgacgtaggcgcaaatctctggtggccgcttaatcataattaccttcttcatcaaacaccgcatcatcgggaagtcgtggacgaggaggtggtggtggtggtgcttgttgttgcgtctccaacacagcaagtctgtcgacgatctgggacaatcgtcgatccaacctctcgtaagtcttgccaaggttcatgtcaatgaaggcatcatgcactgacttgtggaccgtctcctccatttgctccttcaggagattgttttttgcctcaagatcttggcggctaacacattcatcgaagtctgtagggatccttgcttcttcttcgtcgcctaccatcaaaacacaaaaacaggaaacaaacggtgacggttatccctaataatttcactacacgctcctctcaggtataacacaggaacacactttaatgtatcttaccaagctcttacaagtgtttgacgaaatacaagcaaaggatggtacaatcggaggttggttcgtgatacttaccaagagatagtgaaaccgcgattgcaaggtcaaatctgtattgatcagaagatatagtatgtggagctataggacaagcacaatatgtatgtgaatgtgaaacaaaatcgagtgcagatgagcgaagttcaataaatatccaaagcacaagtcacaattgctggctaagagatgtatccgaggcatatcacaacaagttggaacaaagaacaatggaaatagcagaatggcagtaccgtaaatgttgtactcgcgatgccaaaaaggcactagtaggattcaatggtaattttgcttttcttttttgtatgattttttgatatttttgtcagcacaagaagcaacaaaataggagctacaccaagtttcacctaaatcagagatcagatgtggtctacagaaaatgagcaagttctctgaaaagcgtgcaagagctttgacaaagttttttctttattttcctgaatttttttgacaattttatcaaaaccaaacaggccgtaggcgagtttggctggcctcagaatggtg

SEQ ID NO: 54214 - DNA, 1753 bp, Zea Mays
ctccgatgctaccgctctgcttgcccataaattggatggtcctaactgttggccgtctcggtcgacctggagcaaaagcggcgggtgtgcgctgcttggattgcagccattaagagagagaaacaagggtagaaggacgtgggtccattcgcgggtgagaattgagctcgtccgcaaccttcacgcagtgccagacaatggtgcatccttgcactacgcgaggactcgcccacggggtcactgtgtcggagaccgggtgcctcgttgtcgacgtcaagagatccggcgcgccaccagtctccgtggacaactacactggtgcctcgaaaacgccatgcggttcgtcgggaggatacgaacgcgtgtgtggcgcgcgggcagccctatacctgggcgatgggaggaacaagacgatgtcacgtccgttaggatggagatcgacggctaggcttaggcgatgattcctggccatagatctgggagtcaacggtggagattagaacggggcatacctcttcggtgtttagatcccgaccattgatctggctgctggcgacccagattaaatggtggctaacgcttcggctagagtgatctggatcgttagatatggatcgggcggacgcggttgcataccgattcgctgtataatctcggcccttgatccttcatcgggcgaccccagttggctcattacccttcggctgacatctttgctccaaagaccccccgagtttttctctaaacaacccgcagtgctaggcagttctaagaaccttgcaattaggccctgtttttaacactttggcccttgcgttcctagaaaaattgtacccgccatccagagacattggtaattcttggaataaatcaagaaattgatttttaactataagataaacccgaaaaccttagaaaaaatcatatcttctgcgtcttaactccgatttaatccgttccagttacgtttgcttcataaaaatattatctacgcagtaacaacattaattatatcatattggcatgatttttatagttagaaattttattcatcctatgtctactagattaactctgctaaatcaaaactaacccaaccataatcataatgtggttaaaacatgatctctagtcaagtataatctaggttaaggttgaattgattattttagagtatattttctcattggatgtacaataatcaattcataatttaatattccaaccacgtagatctttgtaacacccctggtgttacgttaactaaaactctgacatgtcatcataagcatttgtattatcttgtttgatatacctagaatgcattcactaggtcaaaattttttagtgaatatggtgttgccctattagagtatagggctcagattaagaactttgcttaagacatgggaagagaagtcatctcttgagcaagtaataagttggcttggaatttgaagtattaaaggtaatactttgctttcaaaggtgggttgagtggaagaattaattgaggaactggattaacattaaaaaccttaagtgagatttcaaaaccttgcttggaattgtggataaacaaaacaactcctaaaccaaggacactttggacatgagcttcatatactagagttggatttgagattaaggggagtcacttggcttttagaagtatggattgagttgataaatcactagatgagaaggagtcacatttgaaaccctcaactagcccaaaagtggagttttaaat

SEQ ID NO: 54215 - DNA, 3836 bp, Zea Mays
cggccacctcctctctctccctctccctcgtatggctcggtcgtcgcctcgtttcaccccgcccatcatgaccaccgctcacggcgccctcccgcaaccccgcatcttccctcccttcctcctcctaccgcagctccaatccatctattctctcctcctccgcctctgatgacgacaccgagcaccgccgccgcagcagcaagtgccaccaccacctccatcagcacccctcgcgagcgcaccttcatcgacgagtgtcgccgccgcgtgctccagcacctcggcgtcgcctccgacccaccgcctcccccaacttgccgctcgtcgtcacctgccgtgtcttccccttccttgccactggcacccccggaggagcccggatccagcgacgggcttgggaggccctccctggcgcgaaatcccagctctagaaactggactactacggcacatagctcgattttcagagaggtgcaggaggaggatgtggtgcacgaggtctgggaggggctgccttcatcgccgaggtcgacaagctcgccccaagtcgatgttacaagaagaacgtgaaaggtgtattctatatttggaagctaacagcctaagacgaggaagccactgattgcaactactgaaaagcaagtgctacgacgttatacacctgcagttgttgagaagggccattgttttagtggagaagtactgagctcctgctgcttgagaacaggaatgtccttggtttcttgaagaacaatagcctgcgaagcttctggtgaagggtccagacttcccgaaggaaagcaacatatactgcaaatgttcctgttattaatgcagttgatgagccaatgcgacatctagctgcagcaaacttccactgataaaaacaaaaaggtcgaacctccgcttcaatctcctccaaagaggtaagcttcaatatagtttcctcatatccataaaatgttaactattcttacatgtacttttacacaaaccacatatttgtacttcattacgtaacggacaataagattattacagttctacctttcatttaacatgctcaaataaagaccacttaaaaacagagattccacggatcaaaaagaaccaccaggaatcatatatggagccatacgaaactgattagttttagcactcttctacattttgtcatcttttgttatcgatcatacttatccttttgtaactaaatatactgcccgcacatataaataaccattcaaccgtagtactggatactaagatcagttgatgttgtctagcttataattattttggataatggcccacttagatgtattacaatatctcctttctacatacatttaaaaaaatcatacaaactatcgcgctgccacagatttctcattttgtttaaaactatttttcaaccgcgcaacaataagaagtaagcaccactttcttcatactcaaacttccaagagtaattggtttgttgtgaaatacctttttgtgagtttccttttgattagtttgtaaaacaatttttacacataaggaatcaagtaagcggagaacaaattcaacgcacgcatctttcagttttcatctattttcctttgtgatctcgacttctatgcattcccttatctatcaagtatttatagtctgtttattaggactgcatcataattggtttgcgctatttacagaatcatatattcacacttctctgtcctaaatttaataatatatcgagccatcaagtatttacagtctgaggactgaatcataattggtttgcgctactttaaatttacagtatttataactagcattataaatagtgaaaaatatagctgcactatatacactctaacacttggcagataattgcataagctaccatgtttatcagtcggaaagatagcaaccagtaaggaacttccacgatgttgacatacttcattttcaaagtgtctatatccttctcgctgctcaatgctaattatattttctaattcatccttatgtttatgcctgacagtcttgctttgactatgatcatgactaagtacaagggtgaaaactatattcggtttttcagcactagaacagattcatcctttcgtttatgcttcatattcttgctttgaccatgaccatgactaagtacaagggtgaaactatacttgattattctgcattacaacagtaaaaaataatttactatatattaaagccgagtcgaaaactgttacctggtgcgtccacgtcattctcttttgtgctgaccgttcgattgagtaacgacgggtaaaaacacctgcaactgacaaggactgatgcgtcgctgctccattcttcatgactattctggaaagtccaagcgtcggcgaaaaaaaatgttcaatatttatgcgaggcaatgaatccctccccgcttcttcgcttatggttcgccgtctcgcgcacccacttcctatgccgccgccaatcacttgctcagtttcgtgcccatcctcgaagtcgcctccgcctgcgatgtatccccaaggcccggatggggaacgagatgtctcgcattgccttgtgcctgccactctcgccggcaacgacacgcgcgaggcgaatgaggtcaccgccacggaggttcatgtggaggaagacaccgcgcggagggacgctgccctcgtcatgcagactacacccaatatggacgagtctcgcaccgagggagatccggacccaactggaagtggaagcggcatcttggggccaagcgccgccgaaagatagatacggagaagaaggggatcgcggcggcaacgagtcagcaggtccagcacccatgcttatccttcctttgtgtttctatttgatctgtttttttttctgcccgcgccatattgccggtttgcggccccggggctacccgccgtcgaaaggcagcagcggagaagaatgtggtcgtggctgtaatgggtcagcaggtacatcatccacacttatcatttcctttgttttttgtttgatcaatttttaaaatttctttatcagttggattggtatccacttgcatccgctcacagtttgattcgtgttcgttggatggcgacgtctcaggttttgtacagttcactaaatttattttgctcgattgcaagggaactgtgtcctctataagctcacgctcgtgccgcacccggagcaccccttcttcctgcaagtctggttcaattaaatttttttgttctgtcatgttgcaaagtacttggcgagctatgatatgccattaccttagtgaaaaaactgcttctaatatatcagtattttttagttgtgcagatcatgtcatcatatagatgttgcaaacattataaaatagaggatccatttgaactcttgagattgtggagtgcatgcctagcctaaatatgaaacttagcgttggcattagtaatttcaagtgttatctgaatgaattgtttcatacttgaattgttttccctgtgttatttcaaatatgaagtaatcggtttctatttctggttttgttactgaaagtggcatgccatgattcttgccaagagaacaatagtgtccttggctgttgtgtgagttttcagaaagttcagattttttgcatgcctaacctaaatgtgagacttagcattgtcattagtaatttgaagcgttatctgaaggaattgctttatatttgaataactttccttatgttattcaaaaaaagttatcaatttctagctatggttttgctactaagagtgacgtcatgaagagtgttcaaagattttttttgacgttccaaagcatggtaaccaccaagg

SEQ ID NO: 54216 - DNA, 4006 bp, Zea Mays
cggccacctcctctctctccctctccctcgtatggctcggtcgtcgcctcgtttcaccccgcccatcatgaccaccgctcacggcgccctcccgcaaccccgcatcttccctcccttcctcctcctaccgcagctccaatccatctattctctcctcctccgcctctgatgacgacaccgagcaccgccgccgcagcagcaagtgccaccaccacctccatcagcacccctcgcgagcgcaccttcatcgacgagtgtcgccgccgcgtgctccagcacctcggcgtcgcctccgacccaccgcctcccccaacttgccgctcgtcgtcacctgccgtgtcttccccttccttgccactggcacccccggaggagcccggatccagcgacgggcttgggaggccctccctggcgcgaaatcccagctctagaaactggactactacggcacatagctcgattttcagagaggtgcaggaggaggatgtggtgcacgaggtctgggaggggctgccttcatcgccgaggtcgacaagctcgccccaagtcgatgttacaagaagaacgtgaaaggtgtattctatatttggaagctaacagcctaagacgaggaagccactgattgcaactactgaaaagcaagtgctacgacgttatacacctgcagttgttgagaaggtgatcatttgcgtttataatatctacttcttttatgcaacctattgaagcatgtgatttttttatatttattgttgggcatgatccgaaacttcgtttttctatcaatatcgggttccaggtaacaaacagatctctgaacttcttattttccttcacggctttgcttattttcttcatatgtaactgggagagcttactatcttgcacttgacctccttccgcattcctacctaacaagcagggccattgttttagtggagaagtactgagctcctgctgcttgagaacaggaatgtccttggtttcttgaagaacaatagcctgcgaagcttctggtagatgatcaactcttcctgtctcgctaggtgaagggtccagacttcccgaaggaaagcaacatatactgcaaatgttcctgttattaatgcagttgatgagccaatgcgacatctagttatttacgtgaaaggttcttattgatggcatatccgacatgttatacggatctccaaagttgctacttgctgcagcaaacttccactgataaaaacaaaaaggtcgaacctccgcttcaatctcctccaaagaggtaagcttcaatatagtttcctcatatccataaaatgttaactattcttacatgtacttttacacaaaccacatatttgtacttcattacgtaacggacaataagattattacagttctacctttcatttaacatgctcaaataaagaccacttaaaaacagagattccacggatcaaaaagaaccaccaggaatcatatatggagccatacgaaactgattagttttagcactcttctacattttgtcatcttttgttatcgatcatacttatccttttgtaactaaatatactgcccgcacatataaataaccattcaaccgtagtactggatactaagatcagttgatgttgtctagcttataattattttggataatggcccacttagatgtattacaatatctcctttctacatacatttaaaaaaatcatacaaactatcgcgctgccacagatttctcattttgtttaaaactatttttcaaccgcgcaacaataagaagtaagcaccactttcttcatactcaaacttccaagagtaattggtttgttgtgaaatacctttttgtgagtttccttttgattagtttgtaaaacaatttttacacataaggaatcaagtaagcggagaacaaattcaacgcacgcatctttcagttttcatctattttcctttgtgatctcgacttctatgcattcccttatctatcaagtatttatagtctgtttattaggactgcatcataattggtttgcgctatttacagaatcatatattcacacttctctgtcctaaatttaataatatatcgagccatcaagtatttacagtctgaggactgaatcataattggtttgcgctactttaaatttacagtatttataactagcattataaatagtgaaaaatatagctgcactatatacactctaacacttggcagataattgcataagctaccatgtttatcagtcggaaagatagcaaccagtaaggaacttccacgatgttgacatacttcattttcaaagtgtctatatccttctcgctgctcaatgctaattatattttctaattcatccttatgtttatgcctgacagtcttgctttgactatgatcatgactaagtacaagggtgaaaactatattcggtttttcagcactagaacagattcatcctttcgtttatgcttcatattcttgctttgaccatgaccatgactaagtacaagggtgaaactatacttgattattctgcattacaacagtaaaaaataatttactatatattaaagccgagtcgaaaactgttacctggtgcgtccacgtcattctcttttgtgctgaccgttcgattgagtaacgacgggtaaaaacacctgcaactgacaaggactgatgcgtcgctgctccattcttcatgactattctggaaagtccaagcgtcggcgaaaaaaaatgttcaatatttatgcgaggcaatgaatccctccccgcttcttcgcttatggttcgccgtctcgcgcacccacttcctatgccgccgccaatcacttgctcagtttcgtgcccatcctcgaagtcgcctccgcctgcgatgtatccccaaggcccggatggggaacgagatgtctcgcattgccttgtgcctgccactctcgccggcaacgacacgcgcgaggcgaatgaggtcaccgccacggaggttcatgtggaggaagacaccgcgcggagggacgctgccctcgtcatgcagactacacccaatatggacgagtctcgcaccgagggagatccggacccaactggaagtggaagcggcatcttggggccaagcgccgccgaaagatagatacggagaagaaggggatcgcggcggcaacgagtcagcaggtccagcacccatgcttatccttcctttgtgtttctatttgatctgtttttttttctgcccgcgccatattgccggtttgcggccccggggctacccgccgtcgaaaggcagcagcggagaagaatgtggtcgtggctgtaatgggtcagcagggaactgtgtcctctataagctcacgctcgtgccgcacccggagcaccccttcttcctgcaagtctggttcaattaaatttttttgttctgtcatgttgcaaagtacttggcgagctatgatatgccattaccttagtgaaaaaactgcttctaatatatcagtattttttagttgtgcagatcatgtcatcatatagatgttgcaaacattataaaatagaggatccatttgaactcttgagattgtggagtgcatgcctagcctaaatatgaaacttagcgttggcattagtaatttcaagtgttatctgaatgaattgtttcatacttgaattgttttccctgtgttatttcaaatatgaagtaatcggtttctatttctggttttgttactgaaagtggcatgccatgattcttgccaagagaacaatagtgtccttggctgttgtgtgagttttcagaaagttcagattttttgcatgcctaacctaaatgtgagacttagcattgtcattagtaatttgaagcgttatctgaaggaattgctttatatttgaataactttccttatgttattcaaaaaaagttatcaatttctagctatggttttgctactaagagtgacgtcatgaagagtgttcaaagattttttttgacgttccaaagcatggtaaccaccaagg

SEQ ID NO: 54217 - DNA, 3960 bp, Zea Mays
cggccacctcctctctctccctctccctcgtatggctcggtcgtcgcctcgtttcaccccgcccatcatgaccaccgctcacggcgccctcccgcaaccccgcatcttccctcccttcctcctcctaccgcagctccaatccatctattctctcctcctccgcctctgatgacgacaccgagcaccgccgccgcagcagcaagtgccaccaccacctccatcagcacccctcgcgagcgcaccttcatcgacgagtgtcgccgccgcgtgctccagcacctcggcgtcgcctccgacccaccgcctcccccaacttgccgctcgtcgtcacctgccgtgtcttccccttccttgccactggcacccccggaggagcccggatccagcgacgggcttgggaggccctccctggcgcgaaatcccagctctagaaactggactactacggcacatagctcgattttcagagaggtgcaggaggaggatgtggtgcacgaggtctgggaggggctgccttcatcgccgaggtcgacaagctcgccccaaggtagaaccagtctggcataccatctaactcataatatgcacctgagctgtgtagtcgatgttacaagaagaacgtgaaaggtgtattctatatttggaagctaacagcctaagacgaggaagccactgattgcaactactgaaaagcaagtgctacgacgttatacacctgcagttgttgagaagggccattgttttagtggagaagtactgagctcctgctgcttgagaacaggaatgtccttggtttcttgaagaacaatagcctgcgaagcttctggtgaagggtccagacttcccgaaggaaagcaacatatactgcaaatgttcctgttattaatgcagttgatgagccaatgcgacatctagttatttacgtgaaaggttcttattgatggcatatccgacatgttatacggatctccaaagttgctacttgctgcagcaaacttccactgataaaaacaaaaaggtcgaacctccgcttcaatctcctccaaagaggtaagcttcaatatagtttcctcatatccataaaatgttaactattcttacatgtacttttacacaaaccacatatttgtacttcattacgtaacggacaataagattattacagttctacctttcatttaacatgctcaaataaagaccacttaaaaacagagattccacggatcaaaaagaaccaccaggaatcatatatggagccatacgaaactgattagttttagcactcttctacattttgtcatcttttgttatcgatcatacttatccttttgtaactaaatatactgcccgcacatataaataaccattcaaccgtagtactggatactaagatcagttgatgttgtctagcttataattattttggataatggcccacttagatgtattacaatatctcctttctacatacatttaaaaaaatcatacaaactatcgcgctgccacagatttctcattttgtttaaaactatttttcaaccgcgcaacaataagaagtaagcaccactttcttcatactcaaacttccaagagtaattggtttgttgtgaaatacctttttgtgagtttccttttgattagtttgtaaaacaatttttacacataaggaatcaagtaagcggagaacaaattcaacgcacgcatctttcagttttcatctattttcctttgtgatctcgacttctatgcattcccttatctatcaagtatttatagtctgtttattaggactgcatcataattggtttgcgctatttacagaatcatatattcacacttctctgtcctaaatttaataatatatcgagccatcaagtatttacagtctgaggactgaatcataattggtttgcgctactttaaatttacagtatttataactagcattataaatagtgaaaaatatagctgcactatatacactctaacacttggcagataattgcataagctaccatgtttatcagtcggaaagatagcaaccagtaaggaacttccacgatgttgacatacttcattttcaaagtgtctatatccttctcgctgctcaatgctaattatattttctaattcatccttatgtttatgcctgacagtcttgctttgactatgatcatgactaagtacaagggtgaaaactatattcggtttttcagcactagaacagattcatcctttcgtttatgcttcatattcttgctttgaccatgaccatgactaagtacaagggtgaaactatacttgattattctgcattacaacagtaaaaaataatttactatatattaaagccgagtcgaaaactgttacctggtgcgtccacgtcattctcttttgtgctgaccgttcgattgagtaacgacgggtaaaaacacctgcaactgacaaggactgatgcgtcgctgctccattcttcatgactattctggaaagtccaagcgtcggcgaaaaaaaatgttcaatatttatgcgaggcaatgaatccctccccgcttcttcgcttatggttcgccgtctcgcgcacccacttcctatgccgccgccaatcacttgctcagtttcgtgcccatcctcgaagtcgcctccgcctgcgatgtatccccaaggcccggatggggaacgagatgtctcgcattgccttgtgcctgccactctcgccggcaacgacacgcgcgaggcgaatgaggtcaccgccacggaggttcatgtggaggaagacaccgcgcggagggacgctgccctcgtcatgcagactacacccaatatggacgagtctcgcaccgagggagatccggacccaactggaagtggaagcggcatcttggggccaagcgccgccgaaagatagatacggagaagaaggggatcgcggcggcaacgagtcagcaggtccagcacccatgcttatccttcctttgtgtttctatttgatctgtttttttttctgcccgcgccatattgccggtttgcggccccggggctacccgccgtcgaaaggcagcagcggagaagaatgtggtcgtggctgtaatgggtcagcaggtacatcatccacacttatcatttcctttgttttttgtttgatcaatttttaaaatttctttatcagttggattggtatccacttgcatccgctcacagtttgattcgtgttcgttggatggcgacgtctcaggttttgtacagttcactaaatttattttgctcgattgcaagggaactgtgtcctctataagctcacgctcgtgccgcacccggagcaccccttcttcctgcaagtctggttcaattaaatttttttgttctgtcatgttgcaaagtacttggcgagctatgatatgccattaccttagtgaaaaaactgcttctaatatatcagtattttttagttgtgcagatcatgtcatcatatagatgttgcaaacattataaaatagaggatccatttgaactcttgagattgtggagtgcatgcctagcctaaatatgaaacttagcgttggcattagtaatttcaagtgttatctgaatgaattgtttcatacttgaattgttttccctgtgttatttcaaatatgaagtaatcggtttctatttctggttttgttactgaaagtggcatgccatgattcttgccaagagaacaatagtgtccttggctgttgtgtgagttttcagaaagttcagattttttgcatgcctaacctaaatgtgagacttagcattgtcattagtaatttgaagcgttatctgaaggaattgctttatatttgaataactttccttatgttattcaaaaaaagttatcaatttctagctatggttttgctactaagagtgacgtcatgaagagtgttcaaagattttttttgacgttccaaagcatggtaaccaccaagg

SEQ ID NO: 54218 - DNA, 3767 bp, Zea Mays
cggccacctcctctctctccctctccctcgtatggctcggtcgtcgcctcgtttcaccccgcccatcatgaccaccgctcacggcgccctcccgcaaccccgcatcttccctcccttcctcctcctaccgcagctccaatccatctattctctcctcctccgcctctgatgacgacaccgagcaccgccgccgcagcagcaagtgccaccaccacctccatcagcacccctcgcgagcgcaccttcatcgacgagtgtcgccgccgcgtgctccagcacctcggcgtcgcctccgacccaccgcctcccccaacttgccgctcgtcgtcacctgccgtgtcttccccttccttgccactggcacccccggaggagcccggatccagcgacgggcttgggaggccctccctggcgcgaaatcccagctctagaaactggactactacggcacatagctcgattttcagagaggtgcaggaggaggatgtggtgcacgaggtctgggaggggctgccttcatcgccgaggtcgacaagctcgccccaagtcgatgttacaagaagaacgtgaaaggtgtattctatatttggaagctaacagcctaagacgaggaagccactgattgcaactactgaaaagcaagtgctacgacgttatacacctgcagttgttgagaagggccattgttttagtggagaagtactgagctcctgctgcttgagaacaggaatgtccttggtttcttgaagaacaatagcctgcgaagcttctggtagatgatcaactcttcctgtctcgctaggtgaagggtccagacttcccgaaggaaagcaacatatactgcaaatgttcctgttattaatgcagttgatgagccaatgcgacatctaggtcggttatttacgtgaaaggttcttattgatggcatatccgacatgttatacggatctccaaagttgctacttgctgcagcaaacttccactgataaaaacaaaaaggtcgaacctccgcttcaatctcctccaaagaggtaagcttcaatatagtttcctcatatccataaaatgttaactattcttacatgtacttttacacaaaccacatatttgtacttcattacgtaacggacaataagattattacagttctacctttcatttaacatgctcaaataaagaccacttaaaaacagagattccacggatcaaaaagaaccaccaggaatcatatatggagccatacgaaactgattagttttagcactcttctacattttgtcatcttttgttatcgatcatacttatccttttgtaactaaatatactgcccgcacatataaataaccattcaaccgtagtactggatactaagatcagttgatgttgtctagcttataattattttggataatggcccacttagatgtattacaatatctcctttctacatacatttaaaaaaatcatacaaactatcgcgctgccacagatttctcattttgtttaaaactatttttcaaccgcgcaacaataagaagtaagcaccactttcttcatactcaaacttccaagagtaattggtttgttgtgaaatacctttttgtgagtttccttttgattagtttgtaaaacaatttttacacataaggaatcaagtaagcggagaacaaattcaacgcacgcatctttcagttttcatctattttcctttgtgatctcgacttctatgcattcccttatctatcaagtatttatagtctgtttattaggactgcatcataattggtttgcgctatttacagaatcatatattcacacttctctgtcctaaatttaataatatatcgagccatcaagtatttacagtctgaggactgaatcataattggtttgcgctactttaaatttacagtatttataactagcattataaatagtgaaaaatatagctgcactatatacactctaacacttggcagataattgcataagctaccatgtttatcagtcggaaagatagcaaccagtaaggaacttccacgatgttgacatacttcattttcaaagtgtctatatccttctcgctgctcaatgctaattatattttctaattcatccttatgtttatgcctgacagtcttgctttgactatgatcatgactaagtacaagggtgaaaactatattcggtttttcagcactagaacagattcatcctttcgtttatgcttcatattcttgctttgaccatgaccatgactaagtacaagggtgaaactatacttgattattctgcattacaacagtaaaaaataatttactatatattaaagccgagtcgaaaactgttacctggtgcgtccacgtcattctcttttgtgctgaccgttcgattgagtaacgacgggtaaaaacacctgcaactgacaaggactgatgcgtcgctgctccattcttcatgactattctggaaagtccaagcgtcggcgaaaaaaaatgttcaatatttatgcgaggcaatgaatccctccccgcttcttcgcttatggttcgccgtctcgcgcacccacttcctatgccgccgccaatcacttgctcagtttcgtgcccatcctcgaagtcgcctccgcctgcgatgtatccccaaggcccggatggggaacgagatgtctcgcattgccttgtgcctgccactctcgccggcaacgacacgcgcgaggcgaatgaggtcaccgccacggaggttcatgtggaggaagacaccgcgcggagggacgctgccctcgtcatgcagactacacccaatatggacgagtctcgcaccgagggagatccggacccaactggaagtggaagcggcatcttggggccaagcgccgccgaaagatagatacggagaagaaggggatcgcggcggcaacgagtcagcaggtccagcacccatgcttatccttcctttgtgtttctatttgatctgtttttttttctgcccgcgccatattgccggtttgcggccccggggctacccgccgtcgaaaggcagcagcggagaagaatgtggtcgtggctgtaatgggtcagcagggaactgtgtcctctataagctcacgctcgtgccgcacccggagcaccccttcttcctgcaagtctggttcaattaaatttttttgttctgtcatgttgcaaagtacttggcgagctatgatatgccattaccttagtgaaaaaactgcttctaatatatcagtattttttagttgtgcagatcatgtcatcatatagatgttgcaaacattataaaatagaggatccatttgaactcttgagattgtggagtgcatgcctagcctaaatatgaaacttagcgttggcattagtaatttcaagtgttatctgaatgaattgtttcatacttgaattgttttccctgtgttatttcaaatatgaagtaatcggtttctatttctggttttgttactgaaagtggcatgccatgattcttgccaagagaacaatagtgtccttggctgttgtgtgagttttcagaaagttcagattttttgcatgcctaacctaaatgtgagacttagcattgtcattagtaatttgaagcgttatctgaaggaattgctttatatttgaataactttccttatgttattcaaaaaaagttatcaatttctagctatggttttgctactaagagtgacgtcatgaagagtgttcaaagattttttttgacgttccaaagcatggtaaccaccaagg

SEQ ID NO: 54219 - DNA, 4002 bp, Zea Mays
gagaaatcggccacctcctctctctccctctccctcgtatggctcggtcgtcgcctcgtttcaccccgcccatcatgaccaccgctcacggcgccctcccgcaaccccgcatcttccctcccttcctcctcctaccgcagctccaatccatctattctctcctcctccgcctctgatgacgacaccgagcaccgccgccgcagcagcaagtgccaccaccacctccatcagcacccctcgcgagcgcaccttcatcgacgagtgtcgccgccgcgtgctccagcacctcggcgtcgcctccgacccaccgcctcccccaacttgccgctcgtcgtcacctgccgtgtcttccccttccttgccactggcacccccggaggagcccggatccagcgacgggcttgggaggccctccctggcgcgaaatcccagctctagaaactggactactacggcacatagctcgattttcagagaggtgcaggaggaggatgtggtgcacgaggtctgggaggggctgccttcatcgccgaggtcgacaagctcgccccaaggtagaaccagtctggcataccatctaactcataatatgcacctgagctgtgtagtcgatgttacaagaagaacgtgaaaggtgtattctatatttggaagctaacagcctaagacgaggaagccactgattgcaactactgaaaagcaagtgctacgacgttatacacctgcagttgttgagaagggccattgttttagtggagaagtactgagctcctgctgcttgagaacaggaatgtccttggtttcttgaagaacaatagcctgcgaagcttctggtagatgatcaactcttcctgtctcgctaggtgaagggtccagacttcccgaaggaaagcaacatatactgcaaatgttcctgttattaatgcagttgatgagccaatgcgacatctaggtcggttatttacgtgaaaggttcttattgatggcatatccgacatgttatacggatctccaaagttgctacttgctgcagcaaacttccactgataaaaacaaaaaggtcgaacctccgcttcaatctcctccaaagaggtaagcttcaatatagtttcctcatatccataaaatgttaactattcttacatgtacttttacacaaaccacatatttgtacttcattacgtaacggacaataagattattacagttctacctttcatttaacatgctcaaataaagaccacttaaaaacagagattccacggatcaaaaagaaccaccaggaatcatatatggagccatacgaaactgattagttttagcactcttctacattttgtcatcttttgttatcgatcatacttatccttttgtaactaaatatactgcccgcacatataaataaccattcaaccgtagtactggatactaagatcagttgatgttgtctagcttataattattttggataatggcccacttagatgtattacaatatctcctttctacatacatttaaaaaaatcatacaaactatcgcgctgccacagatttctcattttgtttaaaactatttttcaaccgcgcaacaataagaagtaagcaccactttcttcatactcaaacttccaagagtaattggtttgttgtgaaatacctttttgtgagtttccttttgattagtttgtaaaacaatttttacacataaggaatcaagtaagcggagaacaaattcaacgcacgcatctttcagttttcatctattttcctttgtgatctcgacttctatgcattcccttatctatcaagtatttatagtctgtttattaggactgcatcataattggtttgcgctatttacagaatcatatattcacacttctctgtcctaaatttaataatatatcgagccatcaagtatttacagtctgaggactgaatcataattggtttgcgctactttaaatttacagtatttataactagcattataaatagtgaaaaatatagctgcactatatacactctaacacttggcagataattgcataagctaccatgtttatcagtcggaaagatagcaaccagtaaggaacttccacgatgttgacatacttcattttcaaagtgtctatatccttctcgctgctcaatgctaattatattttctaattcatccttatgtttatgcctgacagtcttgctttgactatgatcatgactaagtacaagggtgaaaactatattcggtttttcagcactagaacagattcatcctttcgtttatgcttcatattcttgctttgaccatgaccatgactaagtacaagggtgaaactatacttgattattctgcattacaacagtaaaaaataatttactatatattaaagccgagtcgaaaactgttacctggtgcgtccacgtcattctcttttgtgctgaccgttcgattgagtaacgacgggtaaaaacacctgcaactgacaaggactgatgcgtcgctgctccattcttcatgactattctggaaagtccaagcgtcggcgaaaaaaaatgttcaatatttatgcgaggcaatgaatccctccccgcttcttcgcttatggttcgccgtctcgcgcacccacttcctatgccgccgccaatcacttgctcagtttcgtgcccatcctcgaagtcgcctccgcctgcgatgtatccccaaggcccggatggggaacgagatgtctcgcattgccttgtgcctgccactctcgccggcaacgacacgcgcgaggcgaatgaggtcaccgccacggaggttcatgtggaggaagacaccgcgcggagggacgctgccctcgtcatgcagactacacccaatatggacgagtctcgcaccgagggagatccggacccaactggaagtggaagcggcatcttggggccaagcgccgccgaaagatagatacggagaagaaggggatcgcggcggcaacgagtcagcaggtccagcacccatgcttatccttcctttgtgtttctatttgatctgtttttttttctgcccgcgccatattgccggtttgcggccccggggctacccgccgtcgaaaggcagcagcggagaagaatgtggtcgtggctgtaatgggtcagcaggtacatcatccacacttatcatttcctttgttttttgtttgatcaatttttaaaatttctttatcagttggattggtatccacttgcatccgctcacagtttgattcgtgttcgttggatggcgacgtctcaggttttgtacagttcactaaatttattttgctcgattgcaagggaactgtgtcctctataagctcacgctcgtgccgcacccggagcaccccttcttcctgcaagtctggttcaattaaatttttttgttctgtcatgttgcaaagtacttggcgagctatgatatgccattaccttagtgaaaaaactgcttctaatatatcagtattttttagttgtgcagatcatgtcatcatatagatgttgcaaacattataaaatagaggatccatttgaactcttgagattgtggagtgcatgcctagcctaaatatgaaacttagcgttggcattagtaatttcaagtgttatctgaatgaattgtttcatacttgaattgttttccctgtgttatttcaaatatgaagtaatcggtttctatttctggttttgttactgaaagtggcatgccatgattcttgccaagagaacaatagtgtccttggctgttgtgtgagttttcagaaagttcagattttttgcatgcctaacctaaatgtgagacttagcattgtcattagtaatttgaagcgttatctgaaggaattgctttatatttgaataactttccttatgttattcaaaaaaagttatcaatttctagctatggttttgctactaagagtgacgtcatgaagagtgttcaaagattttttttgacgttccaaagcatggtaaccaccaagg

SEQ ID NO: 54220 - DNA, 3997 bp, Zea Mays
gagaaatcggccacctcctctctctccctctccctcgtatggctcggtcgtcgcctcgtttcaccccgcccatcatgaccaccgctcacggcgccctcccgcaaccccgcatcttccctcccttcctcctcctaccgcagctccaatccatctattctctcctcctccgcctctgatgacgacaccgagcaccgccgccgcagcagcaagtgccaccaccacctccatcagcacccctcgcgagcgcaccttcatcgacgagtgtcgccgccgcgtgctccagcacctcggcgtcgcctccgacccaccgcctcccccaacttgccgctcgtcgtcacctgccgtgtcttccccttccttgccactggcacccccggaggagcccggatccagcgacgggcttgggaggccctccctggcgcgaaatcccagctctagaaactggactactacggcacatagctcgattttcagagaggtgcaggaggaggatgtggtgcacgaggtctgggaggggctgccttcatcgccgaggtcgacaagctcgccccaaggtagaaccagtctggcataccatctaactcataatatgcacctgagctgtgtagtcgatgttacaagaagaacgtgaaaggtgtattctatatttggaagctaacagcctaagacgaggaagccactgattgcaactactgaaaagcaagtgctacgacgttatacacctgcagttgttgagaagggccattgttttagtggagaagtactgagctcctgctgcttgagaacaggaatgtccttggtttcttgaagaacaatagcctgcgaagcttctggtagatgatcaactcttcctgtctcgctaggtgaagggtccagacttcccgaaggaaagcaacatatactgcaaatgttcctgttattaatgcagttgatgagccaatgcgacatctagttatttacgtgaaaggttcttattgatggcatatccgacatgttatacggatctccaaagttgctacttgctgcagcaaacttccactgataaaaacaaaaaggtcgaacctccgcttcaatctcctccaaagaggtaagcttcaatatagtttcctcatatccataaaatgttaactattcttacatgtacttttacacaaaccacatatttgtacttcattacgtaacggacaataagattattacagttctacctttcatttaacatgctcaaataaagaccacttaaaaacagagattccacggatcaaaaagaaccaccaggaatcatatatggagccatacgaaactgattagttttagcactcttctacattttgtcatcttttgttatcgatcatacttatccttttgtaactaaatatactgcccgcacatataaataaccattcaaccgtagtactggatactaagatcagttgatgttgtctagcttataattattttggataatggcccacttagatgtattacaatatctcctttctacatacatttaaaaaaatcatacaaactatcgcgctgccacagatttctcattttgtttaaaactatttttcaaccgcgcaacaataagaagtaagcaccactttcttcatactcaaacttccaagagtaattggtttgttgtgaaatacctttttgtgagtttccttttgattagtttgtaaaacaatttttacacataaggaatcaagtaagcggagaacaaattcaacgcacgcatctttcagttttcatctattttcctttgtgatctcgacttctatgcattcccttatctatcaagtatttatagtctgtttattaggactgcatcataattggtttgcgctatttacagaatcatatattcacacttctctgtcctaaatttaataatatatcgagccatcaagtatttacagtctgaggactgaatcataattggtttgcgctactttaaatttacagtatttataactagcattataaatagtgaaaaatatagctgcactatatacactctaacacttggcagataattgcataagctaccatgtttatcagtcggaaagatagcaaccagtaaggaacttccacgatgttgacatacttcattttcaaagtgtctatatccttctcgctgctcaatgctaattatattttctaattcatccttatgtttatgcctgacagtcttgctttgactatgatcatgactaagtacaagggtgaaaactatattcggtttttcagcactagaacagattcatcctttcgtttatgcttcatattcttgctttgaccatgaccatgactaagtacaagggtgaaactatacttgattattctgcattacaacagtaaaaaataatttactatatattaaagccgagtcgaaaactgttacctggtgcgtccacgtcattctcttttgtgctgaccgttcgattgagtaacgacgggtaaaaacacctgcaactgacaaggactgatgcgtcgctgctccattcttcatgactattctggaaagtccaagcgtcggcgaaaaaaaatgttcaatatttatgcgaggcaatgaatccctccccgcttcttcgcttatggttcgccgtctcgcgcacccacttcctatgccgccgccaatcacttgctcagtttcgtgcccatcctcgaagtcgcctccgcctgcgatgtatccccaaggcccggatggggaacgagatgtctcgcattgccttgtgcctgccactctcgccggcaacgacacgcgcgaggcgaatgaggtcaccgccacggaggttcatgtggaggaagacaccgcgcggagggacgctgccctcgtcatgcagactacacccaatatggacgagtctcgcaccgagggagatccggacccaactggaagtggaagcggcatcttggggccaagcgccgccgaaagatagatacggagaagaaggggatcgcggcggcaacgagtcagcaggtccagcacccatgcttatccttcctttgtgtttctatttgatctgtttttttttctgcccgcgccatattgccggtttgcggccccggggctacccgccgtcgaaaggcagcagcggagaagaatgtggtcgtggctgtaatgggtcagcaggtacatcatccacacttatcatttcctttgttttttgtttgatcaatttttaaaatttctttatcagttggattggtatccacttgcatccgctcacagtttgattcgtgttcgttggatggcgacgtctcaggttttgtacagttcactaaatttattttgctcgattgcaagggaactgtgtcctctataagctcacgctcgtgccgcacccggagcaccccttcttcctgcaagtctggttcaattaaatttttttgttctgtcatgttgcaaagtacttggcgagctatgatatgccattaccttagtgaaaaaactgcttctaatatatcagtattttttagttgtgcagatcatgtcatcatatagatgttgcaaacattataaaatagaggatccatttgaactcttgagattgtggagtgcatgcctagcctaaatatgaaacttagcgttggcattagtaatttcaagtgttatctgaatgaattgtttcatacttgaattgttttccctgtgttatttcaaatatgaagtaatcggtttctatttctggttttgttactgaaagtggcatgccatgattcttgccaagagaacaatagtgtccttggctgttgtgtgagttttcagaaagttcagattttttgcatgcctaacctaaatgtgagacttagcattgtcattagtaatttgaagcgttatctgaaggaattgctttatatttgaataactttccttatgttattcaaaaaaagttatcaatttctagctatggttttgctactaagagtgacgtcatgaagagtgttcaaagattttttttgacgttccaaagcatggtaaccaccaagg

SEQ ID NO: 54221 - DNA, 7667 bp, Zea Mays
ccgataagcctagtacttgattgaacctgtctgtagactttactcctcactggacctgagacggagtctcccatgccggattatggtgggtacaagtgtggatattgcacggcggcggccggggtcaatagagcatggtacgccaagaccgtgagccctgatctgttgacggggaatcgatggggacggctgatatgtgtggggacggagtgcccctacatgtcgtgtgtttaggtttaccttacaaggttaaaactcgattcgaatcgtctgcttctcgcagctaatgagactgcttgatccattgtactacattgagtaataagtggaaatgaggatactggcaaaagatgttgattgacataatgtttaataccatgtatggatagttaggtgctcatctagtctaaaattattattctagaaccggaaaagttaaaacttgttttagactcaactagtgtttttggcaaaccaaacccctcagccaaacagcttcatggtctagaggtagaggaatagactcctcacaccgggtaagtctagctgagttttagtatattcaaccttccttgtggcataatttttacagttacttccttggatgattagttgatggtgtgacttggcctccatccctgccaccgggatagacggttgagtgggttgctgcttccgcaggagaggaccaagaggaatagcatggccaggcttcgccatgttactcggttttctccattagttatttccgctgcattaaaaactatggttactatttctgaaactccgataatgtaatcactactgttactttcttaatttatggtattatgctttattgtatttctctgtgcctcaccttcgagtgaactagtggtattcgatccttgataagtggctttatcggactagatccgagggactgacgggttattccgatttaagtgtgttgttgcctccaaggcgtgactcgggcacttaaactggaataatctgggtggttccgccacaatcaaggcgtgctacatcagcaccaaggaccagcttgcggacctactcacggagccccttgggagggtcaagttctttgagctttgctctaggtcctgaatggctcaacttcccaaaagagaacgcaaagatttagggagagaatgatagaataagttttgtggcctttgtgggagacacaccatcttcttactatagttagtggacagtatctctgtagtttagctgcagtttgactgctttaaaggacagatcttcttgctgcagttagagcacagcatctctacatgtttagcatctctaggagcatcttagtatatgttcggcagtcccttgggctataaatatgtaaccacaacccttagatgggtatgtcattgtgtagtgtgagaaataaacaagaaaaaaattcttaactcgtagtgtcatcgtctcgatgagagtaagagtcacgttatttatagtttgtagttgcaatatgtgtttatttggcaatcaaacaagacatcatcagctccaagggtatttaggtccttttacatttagaacagacaaccttcttgcagaaaattaggattgcaaaacacttagattcttcagctagcaggttctctagatagaccgcttctcataaaagctctacagaaataagttgtcccaaaaggtcctatgaaatcccacatcagctttctacacactaatagaatcaccagacaatgaaaatctagtaaccaaacagagtttgcttcacatgttcctccaatgaatgctcataattgataattctccattagtattaaaagggagtataacaaaactgaaatgtaatgattctccatgagatatcccgcacaatataacacggtttcatcagagaataagcaccagcataacaacaatctaagaacacaaaacaggaagaatcaaagatattgtttttttgtcgatttatattctgtcaaacaaaaggtagggcatactgaacataatggcaggctacatctcagtggtggaaactagagccaagcgaagtgagagctgctccatgccagtcctcaagccccccacaagtacactcgattagattaatttggacactttgataattagacaaccaaataaaaaataaaggtaaacaaccacaacagatggttcagcctcttcagcaacgaacatgtagtttgtttggtttgaggagccactatatccaagatgaggcgatgcatcaagggttcattcttcgtaatagtactaattattatcttgtgaggcatgaggtgatgatgtcatgtatgaatctattttattccacaaaccaaacaaaaaagtgaggaatgagtcgatgttggactaactcattactcaaaccaaacaccatatttattagtaattttagtacacaaactggagcatgaaaaccacagaagaaaagtctacaccatgcaggcagaagtaaaaagtgggagaagtctacactatgcaagcagaagtaaaaagtggaaggtagattacttacaatcactcaaatacaaaattattacatgaaattaactactaagttgaagcaaacaaaataacaggaacgtgtgtgccaagaattacaagcaaggaaagcaaagaacaattccactgacctgaagacatcattgccgtctagcatgaacacctcggtaattcttccatcatctgcagataaagctgcaatgggaccaagacgcctcctctccccttcctcccacatgtctccaatcaccctccacttaccactccatagtcccaacgccaccgcgtcccgacagtacacgtcatttggcaccactcctcccaacgtggtgtatccatcatagccgcccatcacccagaactcatcctcaccaccatcccctgctccgcgtgccaggaacccaacacacccagcccgatcacgaggcatcgaggcaccaaggtgccacgagtgcgtggtggcatcataccactcggtgctgccggtgcggctgccgttggaggggaacatggggtgtcgggacccgccaccggcgacgaggagcccgccagcactgggcgcgtgggcacacgcgaagcttccccgcgggagctgcatgtcgggaaggcgttcccagcaatgtcgagagttggcaaggtcaagccggtagaccgccgccgaggcggagggttgccccaaagggtagctgcgggcgtcgaagcaagacccgccgaggacgtagaggtggcggccaacggcgagggcggtaaagttggcgaggccgtaaagctgcggcgaacaggggagcggcgggaggggccaccaggtggtaggtgcggcggggtcgagcaggatcggggaggcgagggatgggtcggtggggaagaggcagagaaggtggcggcgcgggagacggaggctacggcggagcgggaggagcgtagccgcagagaggagcaagcaccaagcgcgcgaggtggcgcggaggcgggactggtcggggaaggtgagcaggcagagaatgacagctgcaacgtcgtccgggagccccgggattagcgacgccgccgctaaggccgagctcgtacgcaaggctagggttccggcgatgcggccggagtcagaggaggacgaggccatttcggtcccctcgtcgcaggattccagaagaggtcagaaagtatagtccgcctatttccttttcctatatatatatatattattctttaaagccggttagaaacggagatgctagggctatccacgtcgacagaaaaacttcaagccgctcgatcatgaatctacgacgcggctctatcacatttttatacccggcagctcgtgcagccacgcaatgcttctagagaaatcggccacctcctctctctccctctccctcgtatggctcggtcgtcgcctcgtttcaccccgcccatcatgaccaccgctcacggcgccctcccgcaaccccgcatcttccctcccttcctcctcctaccgcagctccaatccatctattctctcctcctccgcctctgatgacgacaccgagcaccgccgccgcagcagcaagtgccaccaccacctccatcagcacccctcgcgagcgcaccttcatcgacgagtgtcgccgccgcgtgctccagcacctcggcgtcgcctccgacccaccgcctcccccaacttgccgctcgtcgtcacctgccgtgtcttccccttccttgccactggcacccccggaggagcccggatccagcgacgggcttgggaggccctccctggcgcgaaatcccagctctagaaactggactactacggcacatagctcgattttcagagaggtgcaggaggaggatgtggtgcacgaggtctgggaggggctgccttcatcgccgaggtcgacaagctcgccccaagtcgatgttacaagaagaacgtgaaaggtgtattctatatttggaagctaacagcctaagacgaggaagccactgattgcaactactgaaaagcaagtgctacgacgttatacacctgcagttgttgagaagggccattgttttagtggagaagtactgagctcctgctgcttgagaacaggaatgtccttggtttcttgaagaacaatagcctgcgaagcttctggtagatgatcaactcttcctgtctcgctaggtgaagggtccagacttcccgaaggaaagcaacatatactgcaaatgttcctgttattaatgcagttgatgagccaatgcgacatctagttatttacgtgaaaggttcttattgatggcatatccgacatgttatacggatctccaaagttgctacttgctgcagcaaacttccactgataaaaacaaaaaggtcgaacctccgcttcaatctcctccaaagaggtaagcttcaatatagtttcctcatatccataaaatgttaactattcttacatgtacttttacacaaaccacatatttgtacttcattacgtaacggacaataagattattacagttctacctttcatttaacatgctcaaataaagaccacttaaaaacagagattccacggatcaaaaagaaccaccaggaatcatatatggagccatacgaaactgattagttttagcactcttctacattttgtcatcttttgttatcgatcatacttatccttttgtaactaaatatactgcccgcacatataaataaccattcaaccgtagtactggatactaagatcagttgatgttgtctagcttataattattttggataatggcccacttagatgtattacaatatctcctttctacatacatttaaaaaaatcatacaaactatcgcgctgccacagatttctcattttgtttaaaactatttttcaaccgcgcaacaataagaagtaagcaccactttcttcatactcaaacttccaagagtaattggtttgttgtgaaatacctttttgtgagtttccttttgattagtttgtaaaacaatttttacacataaggaatcaagtaagcggagaacaaattcaacgcacgcatctttcagttttcatctattttcctttgtgatctcgacttctatgcattcccttatctatcaagtatttatagtctgtttattaggactgcatcataattggtttgcgctatttacagaatcatatattcacacttctctgtcctaaatttaataatatatcgagccatcaagtatttacagtctgaggactgaatcataattggtttgcgctactttaaatttacagtatttataactagcattataaatagtgaaaaatatagctgcactatatacactctaacacttggcagataattgcataagctaccatgtttatcagtcggaaagatagcaaccagtaaggaacttccacgatgttgacatacttcattttcaaagtgtctatatccttctcgctgctcaatgctaattatattttctaattcatccttatgtttatgcctgacagtcttgctttgactatgatcatgactaagtacaagggtgaaaactatattcggtttttcagcactagaacagattcatcctttcgtttatgcttcatattcttgctttgaccatgaccatgactaagtacaagggtgaaactatacttgattattctgcattacaacagtaaaaaataatttactatatattaaagccgagtcgaaaactgttacctggtgcgtccacgtcattctcttttgtgctgaccgttcgattgagtaacgacgggtaaaaacacctgcaactgacaaggactgatgcgtcgctgctccattcttcatgactattctggaaagtccaagcgtcggcgaaaaaaaatgttcaatatttatgcgaggcaatgaatccctccccgcttcttcgcttatggttcgccgtctcgcgcacccacttcctatgccgccgccaatcacttgctcagtttcgtgcccatcctcgaagtcgcctccgcctgcgatgtatccccaaggcccggatggggaacgagatgtctcgcattgccttgtgcctgccactctcgccggcaacgacacgcgcgaggcgaatgaggtcaccgccacggaggttcatgtggaggaagacaccgcgcggagggacgctgccctcgtcatgcagactacacccaatatggacgagtctcgcaccgagggagatccggacccaactggaagtggaagcggcatcttggggccaagcgccgccgaaagatagatacggagaagaaggggatcgcggcggcaacgagtcagcaggtccagcacccatgcttatccttcctttgtgtttctatttgatctgtttttttttctgcccgcgccatattgccggtttgcggccccggggctacccgccgtcgaaaggcagcagcggagaagaatgtggtcgtggctgtaatgggtcagcaggttttgtacagttcactaaatttattttgctcgattgcaagggaactgtgtcctctataagctcacgctcgtgccgcacccggagcaccccttcttcctgcaagtctggttcaattaaatttttttgttctgtcatgttgcaaagtacttggcgagctatgatatgccattaccttagtgaaaaaactgcttctaatatatcagtattttttagttgtgcagatcatgtcatcatatagatgttgcaaacattataaaatagaggatccatttgaactcttgagattgtggagtgcatgcctagcctaaatatgaaacttagcgttggcattagtaatttcaagtgttatctgaatgaattgtttcatacttgaattgttttccctgtgttatttcaaatatgaagtaatcggtttctatttctggttttgttactgaaagtggcatgccatgattcttgccaagagaacaatagtgtccttggctgttgtgtgagttttcagaaagttcagattttttgcatgcctaacctaaatgtgagacttagcattgtcattagtaatttgaagcgttatctgaaggaattgctttatatttgaataactttccttatgttattcaaaaaaagttatcaatttctagctatggttttgctactaagagtgacgtcatgaagagtgttcaaagattttttttgacgttccaaagcatggtaaccaccaagg

SEQ ID NO: 54222 - DNA, 957 bp, Zea Mays
cctccttgcgccctctccaaaggaaactttttctaattttatcaatggccttaatagcccaagagggaatatttactgccatagaaagataaataagcattccggtaagcacatgctgaacttgcactttacgacctgctcttgtcatcaaatctgctttccagcctggcagctgatcagcaattctatccacaataggctgcacctgatccttggtgagatttttcagggacagaggcagccccaggtatttacacggaaaggtcgagatgccacaagggagaagatcttgcttgaagtatttacacggaaaggtcgagatgccacaaggtcgagatgccccagcaattctatcaagaattatgaatggaacattaatcgatcacgtgatgtggaggacaagagttggattaatctcaaggtgatgctgatgaacgaagccaaagtggatgaatcaaacaagtgccaggatggatgatacttgccaagaaaatattatctaacaacactaacttagtgttgtccctggaaagccccgatgcatttgctacctcattgttgttataaaacttttatcacttatatgttgcattaggtgataggagttgagtgatgaaataattgatgcattgccattccttgaaatttgattatcttccttgatacctgttttataaagagaactaatgatgcttagacctgcctagagaattaaaacttgtttctagaatgatgtgtaacactaggtatgagtttgttttatgaaaaaggacttgcaatggtgagatcatcatctacaatgatgaattcatcattcaattatggtacctctgtcaagtatatgattttgggaaggaaataataattctagaccagacgttgagcaggaaaggtcgtccgcctgtgccgattaaggaccgcaacgattgttggcctgctgatgtaggaccctttaac

SEQ ID NO: 54223 - DNA, 868 bp, Zea Mays
cccattcctgctgaggccgacgcctccatcccctcccatctccttcgagacaccaagtcccatggctgctgtcctccagccccaagctgtgacgcaccccgtaggtgttcaatggaatggctgtaaaatgctacagtgtgcagccccgtcccgcgacatcatttgccgttgatattggatgagagcaaccaaggtctaggtgatgtttattaggtgttcgatagaaagattgaatcagagatcctcgctatttagcattttttggctcatgttcgtattggaacattaatcgatcacgtgatgtggaggacaagagttggattaatctcaaggtgatgctgatgaacgaagccaaagtggatgaatcaaacaagtgccaggatggatgatacttgccaagaaaatattatctaacaacactaacttagtgttgtccctggaaagccccgatgcatttgctacctcattgttgttataaaacttttatcacttatatgttgcattaggtgataggagttgagtgatgaaataattgatgcattgccattccttgaaatttgattatcttccttgatacctgttttataaagagaactaatgatgcttagacctgcctagagaattaaaacttgtttctagaatgatgtgtaacactaggtatgagtttgttttatgaaaaaggacttgcaatggtgagatcatcatctacaatgatgaattcatcattcaattatggtacctctgtcaagtatatgattttgggaaggaaataataattctagaccagacgttgagcaggaaaggtcgtccgcctgtgccgattaaggaccgcaacgattgttggcctgctgatgtaggaccctttaac

SEQ ID NO: 54224 - DNA, 1579 bp, Zea Mays
gcctaaaccatctctgccttatccccttcgtgaagccaccattcctggtgccgatctcatcctccccatgctcaaaattctccaccatagtttccttctccccttttgacgtctccctcacgcgagcagctcctggcagcagcactggccgccctccattcccagccgcgcctgctttcttccaggtcgccatcatccctagctaagctcgccctcacctgctcgacgccggtgatggccgccgttggtccctgcgtccttccccggccgcctcacctccactccatgcccctgctttttccccggctccggcgtccatcgcgtcctgcccctccctcaacttccgcccctgaccatggacatcggtagtccccagctcccttccatggccgcctacagccctccctagtggctgagccattttccagccgctccttctccagcacagagccccctccactcgcactcccattcctgctgaggccgacgcctccatcccctcccatctccttcgagacaccaagtcccatggctgctgtcctccagccccaagctgtgacgcaccccgtaggtgttcaatggaatggctgtaaaatgctacagtgtgcagccccgtcccgcgacatcatttgccgttggtgagtctgcgcggtttgtggtttgctcgttccccatccgacacgtgtatcctactaatacttgtgtgtatttgtgcatgtgatgtgacggagagaaaatcctagatattggatgagagcaaccaaggtctaggtgatgtttattaggtgttcgatagaaagattgaatcagagatcctcgctatttagcattttttggctcatgttcgtattgggacagaggcagccccaggtatttacacggaaaggtcgagatgccacaagggagaagatcttgcttgaagtatttacacggaaaggtcgagatgccacaaggtcgagatgccccagcaattctatcaagaattatgaatgaacattaatcgatcacgtgatgtggaggacaagagttggattaatctcaaggtgatgctgatgaacgaagccaaagtggatgaatcaaacaagtgccaggatggatgatacttgccaagaaaatattatctaacaacactaacttagtgttgtccctggaaagccccgatgcatttgctacctcattgttgttataaaacttttatcacttatatgttgcattaggtgataggagttgagtgatgaaataattgatgcattgccattccttgaaatttgattatcttccttgatacctgttttataaagagaactaatgatgcttagacctgcctagagaattaaaacttgtttctagaatgatgtgtaacactaggtatgagtttgttttatgaaaaaggacttgcaatggtgagatcatcatctacaatgatgaattcatcattcaattatggtacctctgtcaagtatatgattttgggaaggaaataataattctagaccagacgttgagcaggaaaggtcgtccgcctgtgccgattaaggaccgcaacgattgttggcctgctgatgtaggaccctttaac

SEQ ID NO: 54225 - DNA, 2379 bp, Zea Mays
tcgcgccgtagttttgagtcgtcatgtcctgtcatcgagtcgtcttctcctgccaccatctgttaagacgacgagctcgccccaagctccttctatggccgtcatggctccttccccaggcccttcgcgcgctctacttccaccccaccgtcgatttggtggctgcgcccaggctgcagtttccagcgtgctcgcctctacatcctagccaccacgacgtcttctagctcaaactgcaccaccgatttaccctgcctctgtctttaaggttcagctcacgtacgcacgccggacgcgtttgccgctaggccctgtgtcgttaggctcgtcaaccatggtctctgccgcgcgcacactcttctttgtcgtcgagtccgcgtgcgctgctcgcctcgagccgccccgccgttgtaaaacaccgcgcaggtctctaacctcactgcccactctcgccatcatttttgtatgctgtgtttggggtaaaggaatcctaggagcaccctaccagccattgtcctacgctaccaggccccaccgtcaatcccgtctaggccctggcatcggcttagtgcgctccaccttgaggtggtgtccgccgtcgtggagcaccgctgcgagctcccagcgccctcgcctccagtctcgccctagtcatggacgcccaacgctctatctcatcgtcactgttcgcgacggatgtcaaacctccgcatgcccccagatgcgtcgtcaccacgttcatgcgttgccgtccgtgccttgtgttcatgccggcaaaagaatcccaaaacagtgtgtagaagcaagctccaggtcgatgcccccaagtgctcggcgaaaggcctgaacaaggatcatcgccatttgtgcggaattctagtcaatatggagagattccaagagttgtggatggaggagcactacagtaaactgatgaatatccgacggtcactctatctccgacgacttcctacgaggccgtcggatattatcttatgtccgacggccaacatgggctctcggaaatatagacttatctccgacggctagttacgagaccgtcggacataaggttatatccgacggcctcgtaactagccgtcggagataagcttttttaacacggtcccggcccggtgcgcggttcattttcacgcgcgcgcgctcgcttctctcttctctctgtctctgcccgctcgccgccgtcgacgcccgcccgccgtcggccgccggtgtaagaaacggtacaagttgccggacgatggatcatatgatatgaacgctcgttacgtgtttgagtataacgcgaacgatgtcgttgcagatgcaatgtactatgcacgaattcaggctataaaggcatggtacagagcaaatgctgatgatcgaccgatgccaaataccaaggtcgagtggtcatcaatttacttgagggaggagcaatacctagaggtgtcggtgccatggatggccacccgatcagacggttatcgggcattgtgcagatggtgggcttcccctgagtttcgtgccatttccgaaaggaacaggggaaaccgtggaactgagtcgttccacaactacggcggtgatggtcatgtgcgcttggctaagcgaatggaagtcaaatccggtcgtatgcccacggatgtggaggtgtatatgcaagggcataggggttttgatcctcagaatcctgatgtgttatgcactcagacggccaccgaccgtctagcttcgtatgggcaggagatggttcaacgccatggggaggagtacgattggaggagccagccaatcgaccctcaggcagcatatgctagcgcaggaggacaagcccatggacggttgggtatttttgattctacgattgattccagagagctgagacgtcgtggacgacaatccacatcgtcgtcttcacagtcgtcccgttcacgatcagcagcccatgagatagagcttgcggtgttgcgtcaacaggcagagtaccatcaatcagtcttgagggaacaattggagtaccagaggcaacaatctgaataccagagacaacaagccgagtaccagaagaagagggacgagtattatccaagcctccaggcccaaaatcaagctcttctctcgcaactatcccaacaagcgggcgtcccgatgccgacatatgggatgccgcctccggactttgcactgccaatgccaatgttggcgcctccgcctccgcctccgtcacaattccctatgggatttcagacaccacccgcttcagttgccgcacctggagatgggtctggtcaagacgacacaacacattcgtgggtgaataatcttttcagcacgcatagtccagccggaggaggtggcgatggatatgagtga

SEQ ID NO: 54226 - DNA, 1270 bp, Zea Mays
ctcaacctcctctctgtttcagccgtggagcatcagcgcttcacctcatctcccatggccgagcggctccctcgtggtgcccaggatcccctcccgcacatcttcctactggagctcgagctcaacccagaaacggtacaagttgccggacgatggatcatatgatatgaacgctcgttacgtgtttgagtataacgcgaacgatgtcgttgcagatgcaatgtactatgcacgaattcaggctataaaggcatggtacagagcaaatgctgatgatcgaccgatgccaaataccaaggtcgagtggtcatcaatttacttgagggaggagcaatacctagaggtgtcggtgccatggatggccacccgatcagacggttatcgggcattgtgcagatggtgggcttcccctgagtttcgtgccatttccgaaaggaacaggggaaaccgtggaactgagtcgttccacaactacggcggtgatggtcatgtgcgcttggctaagcgaatggaagtcaaatccggtcgtatgcccacggatgtggaggtgtatatgcaagggcataggggttttgatcctcagaatcctgatgtgttatgcactcagacggccaccgaccgtctagcttcgtatgggcaggagatggttcaacgccatggggaggagtacgattggaggagccagccaatcgaccctcaggcagcatatgctagcgcaggaggacaagcccatggacggttgggtatttttgattctacgattgattccagagagctgagacgtcgtggacgacaatccacatcgtcgtcttcacagtcgtcccgttcacgatcagcagcccatgagatagagcttgcggtgttgcgtcaacaggcagagtaccatcaatcagtcttgagggaacaattggagtaccagaggcaacaatctgaataccagagacaacaagccgagtaccagaagaagagggacgagtattatccaagcctccaggcccaaaatcaagctcttctctcgcaactatcccaacaagcgggcgtcccgatgccgacatatgggatgccgcctccggactttgcactgccaatgccaatgttggcgcctccgcctccgcctccgtcacaattccctatgggatttcagacaccacccgcttcagttgccgcacctggagatgggtctggtcaagacgacacaacacattcgtgggtgaataatcttttcagcacgcatagtccagccggaggaggtggcgatggatatgagtga

SEQ ID NO: 54227 - DNA, 2959 bp, Zea Mays
gatttttcagccgttagccttatccctcgcccttcctcctctccaacgcacggcgctccctctatcctcttcccatggctgagcgcgcttggatcttctccctgccaggcgttcggcagctcggccgctcgttcctctccgctgctcgccggttccctttccccaagctccatggctgctgcacctccccagccgagcggctcttccccacggcgctccctccctgcttctccttccctctcgcgtcttctcctcgccggcgtgctcctgctccagccataggacgcgcccctgcttccatggatgccgcacccgctgcttgctccccttgcttctccagtccgagctccttcccctcgccttcccatggccagcttcgagctcacccagccctttctctgtttctttcacggccgagtctctttttccatggttgcagccgttttcctgtgccgcggcctcgcccagccgttcctcctctttcctctagctcgggttcagtccagttcgcccttgcgcttgccatggtggccgtcgtgcccatgccgaccggagctcgctcggctgcggtctcgtcccggctccctgctacggctcgccacgtccctgtgtttgaattcgtcgaccttcactcttctccccatggtcggacaacctcgtcgatgctgctatttggtggtcgcctcttggcctaatttcgtcatcacatccgcgctcctttgcttggcccgtcgtcgttctccagctgttctgcgcgtttgtcgggccgtgctgtgtgccagagttccctcccggcagacctcgtcgtcgccaatggtcacagatctcgtcctcgcctcctgtgcgcactgacagcaccgtctcctctgtgctcgctggccatcacggtgtccccagtctgtcgcgccgcactctagtcgtcgattcgcggtcgtgtctgtttcttcatcgatctccctcaacagactcgcccttcacctctggtcgtgccagcaggaacttgagtcgccatccttgacgtttgttgatgcgcaggtcgccttggcctaggccgtcgtctttcacctagcagctcgtcacgggaccaggtgtcgagctcctttcccaacaaacgctagacctgctcctgcgttcgccatcagccttagctcgtcggtcacgctcgccagatgttcgatcaaggacttcaactgaaggccattgtcgttcgtgcaaacatcgaatcaaattgtcatgtggtatgataattcatcatgtgatgcgaaagacgagctgagtcgaccccaagatgctgttaagcgtggcttcttcgcaaagtgatactgatgaatgaacctgaagatgggatgatctgatcaagtgccaggacaaggctgattgtcaagtgatcgacgtctaacaacactaacctagtgttatccaggcaagccccggtgcatttgccacctccttgctgttttaaatctttatcaccttatatgatgcattaggtgataggagttgtgtgctaaaccgttgctgcatttccttccttggaaaattaattacccttccttgatacccttttatgaaaaggatttttctgatgcttagtcctgctttagaaagacaaatgttttgttttaaaacaaaaggtgatgcttcacagtggatgggatgttttcaaaaataaagcttgatggtggatccatcatggccatgatgggttcaacacggaaaagatgtacctctgacaggtaccaaactttgggtttaaaatgataaagctgagaccagacgggtgacttgcacgagaagagagtctcggtatagtgtctccgtctgagtcgattaaggaccttgtcgatgtaggctggatgatcgaggaccctttaactggtcacatgcctcgtcatgggtaagctttgccttgggcagactaatactagaaaggccaacacgcaatagaagtggagagatggcgagagtagcgtgtaccctccgggcaagaggctggacggtggtgtatctgtgctctcggttggcgtgaacccggtttggtcttaagaaccccggtggcaagttgacatatgcaagggttaagtgctacatatgtcgtgtgattggagatcctcaactgagtattaatcgattcagatcgccgttacttcccggacatgaagacttggtcactaacttacacgtagcaattcagtgaactgaagggttgataaaaagacggctagtgtaggccaagtgtttgaagtaggatagaaagaattctagatgtaggtaaattttacttaacttgacaagtaaaaatggattttaaggatccactcatagtaagcttttctgcaaaacagagtctttgattcttgataagccttaccttgaatcccttttaaaaccagcatacccttgagagtctattctttagtcgggttagtcctgctgagtacttgcgtacttggggttttattcccaatgttgctgcaggttacgagtcacattgattgtgattggtgttaagcgccggtgggcacgacattcttataagtctaagtacttcttctatacttcttattgaggatgatcacttaagctagcatatatttcaaaactacacaataatttatgacagttcaaagttatttctttgaatcacttttgtaatcactccgatcatgtacattgtaaaacttgatgtaacttgtaaaatttggtaataagatttccgctgcaaaatgttggtgtgtgtgatttgtgtttacttaatcctgcggtcctggttgtaagtggtttatccggggtcctttgggcacttggatggatcctgttaagttatctggtgcacatgcataaccgtctgaggtctttgagacaaggacaggtgcatgtgggcccaataacttgggaggttctgccacagtattcactcgcacgtcacacttggattctcaccttctgtcaagccaaa

SEQ ID NO: 54228 - DNA, 282 bp, Zea Mays
atggacgccatctcctccaccgaaagctcgccccatctccctggtgtcgagctcgtcttccacctcgccccatggcgctcgaccgtcacatctatggccacaccgtcactcgccctgcccgtagccgccgctcctcgtccaagcctgctggtgcagtcgagtcccctctccatggccgcgtctgctctctggcgggtgctcggcgctccagctcgcctagctgcggcctcgccctggagctcctacgcgcccatctccctggctcggtcctactcgccctag

SEQ ID NO: 54229 - DNA, 831 bp, Zea Mays
cctaccctaacttgtttggcattaaaagtttatccactgggaaaaaggacgtgatgtgtttgaaaggctactgatagattctgactgggccattaacaacggcaactggctgtggctctcttgctcatccttcttctaccagtaccacagaatttactcccctattacattcgggaagaagtatgatcctaacgggaactacattaggcatttcatcccagtgctgaaagacatgccaagggagtacatttacgagccttggactgctcccactagcatccagaagaaagccaattgtattattggcaaagactacccaaaaccagtggttgatcatgagactgcaagcaaagagtgtagaaagaggatgggagaagcttatgcgttgagtcgcgttgatgccaaacctagcaaagggaagacgttgaactcacgccgaaaaatgctacatggtgaccgagacacgtctaactcaaccattgctaagcgactgaagaggaatagccgagctgagtgatgcgcagctcctcccgtgacaactttacactacttgttccaccttcagcattttttttttattttcagttgtgttacctgcatctgtcatatgtagctcgtctgacattttaccaaagtagtctgaccgtaaggaaatgacttgagcccgtagctagtgtgatatcctacactgaaggacatatctgtaatatatgctcatgtaataacaggtgtaataataataactgccgcccatgtactctaggtcttatttggaaggtgtgtgcagcaaatgaacagttcaagtgcaatccattaaagcaggtcgtttgg

SEQ ID NO: 54230 - DNA, 823 bp, Zea Mays
attactggcactactagcagtttatccactgggaaaaaggacgtgatgtgtttgaaaggctactgatagattctgactgggccattaacaacggcaactggctgtggctctcttgctcatccttcttctaccagtaccacagaatttactcccctattacattcgggaagaagtatgatcctaacgggaactacattaggcatttcatcccagtgctgaaagacatgccaagggagtacatttacgagccttggactgctcccactagcatccagaagaaagccaattgtattattggcaaagactacccaaaaccagtggttgatcatgagactgcaagcaaagagtgtagaaagaggatgggagaagcttatgcgttgagtcgcgttgatgccaaacctagcaaagggaagacgttgaactcacgccgaaaaatgctacatggtgaccgagacacgtctaactcaaccattgctaagcgactgaagaggaatagccgagctgagtgatgcgcagctcctcccgtgacaactttacactacttgttccaccttcagcattttttttttattttcagttgtgttacctgcatctgtcatatgtagctcgtctgacattttaccaaagtagtctgaccgtaaggaaatgacttgagcccgtagctagtgtgatatcctacactgaaggacatatctgtaatatatgctcatgtaataacaggtgtaataataataactgccgcccatgtactctaggtcttatttggaaggtgtgtgcagcaaatgaacagttcaagtgcaatccattaaagcaggtcgtttgg

SEQ ID NO: 54231 - DNA, 1996 bp, Zea Mays
aatcttccgcactctgtaaccccgcccgcgatggaggccgcaaccgccgccacggcggcgatgatgtggttccggaagggcctgcgcgtgcacgacaacccggcgctggacgcggcccgccgacacggggccggcgctgcatccgcgcggctgtacccggtgttcgtgctcgatccgcgctaccttcgcccggatgccgtcgcggcgtccccaggttccgcgcgcgccggggtcgcccgcatccgcttcctcctcgagagcctcagcgacctcgacgctcgtctccgccgcctagggtcccgcctcctcctcctgcgcgcccgcgacgacgtcgccgacgctgtctgcgcggccctaaaggactggaacattggcaagctgtgcttcgagtccgataccgagccgtacgcgctggcccgcgataagaaggtcacggattttgcattggcgtccggcatcgaggtgctcacgcccgtcagccacaccctcttcgacccagaagaaattataaagaagaacggtggtcggccgcctttgacatatcaatcctttgtctccattgctggggagccgccagctcccgccatggaggaatactccgagctcccaccgctaggagacacaggggaatacgagctgttgccggtgcctacggtggaggagcttgggtacggcgatatcagccaggaggagattccaccattccatggcggagagacagaagctctgaggagaatgaaagaatcgcttcaaaataaggaatgggttgccaaatttgagaaaccaaagggtgacccctctgcctttgtgaaaccttcaacaaccgttttgtcaccatatctaaagtttgggtgcctgtcttccagatatttttaccactgcattcaggatgtgcacaggagcgtcagaaaccatacaaaaccacctgtttcattgacaggacagttgctgtggcgagacttcttttacacagtgtcttatggaacacctaattttgatcggatgaaagggaacaaaatatgcaagcagtttagattccgtggagcgagaacgaagatctatttgttgcatggagagatggccagacaggatatccgtggatcgatgctatcatgattcagctgaggaactggggttggatgcatcacctcgcacgccattctgttgcttgtttcttgactcgcggtgatatgtttatccactgggaaaaaggacgtgatgtgtttgaaaggctactgatagattctgactgggccattaacaacggcaactggctgtggctctcttgctcatccttcttctaccagtaccacagaatttactcccctattacattcgggaagaagtatgatcctaacgggaactacattaggcatttcatcccagtgctgaaagacatgccaagggagtacatttacgagccttggactgctcccactagcatccagaagaaagccaattgtattattggcaaagactacccaaaaccagtggttgatcatgagactgcaagcaaagagtgtagaaagaggatgggagaagcttatgcgttgagtcgcgttgatgccaaacctagcaaagggaagacgttgaactcacgccgaaaaatgctacatggtgaccgagacacgtctaactcaaccattgctaagcgactgaagaggaatagccgagctgagtgatgcgcagctcctcccgtgacaactttacactacttgttccaccttcagcattttttttttattttcagttgtgttacctgcatctgtcatatgtagctcgtctgacattttaccaaagtagtctgaccgtaaggaaatgacttgagcccgtagctagtgtgatatcctacactgaaggacatatctgtaatatatgctcatgtaataacaggtgtaataataataactgccgcccatgtactctaggtcttatttggaaggtgtgtgcagcaaatgaacagttcaagtgcaatccattaaagcaggtcgtttgg

SEQ ID NO: 54232 - DNA, 1996 bp, Zea Mays
aatcttccgcactctgtaaccccgcccgcgatggaggccgcaaccgccgccacggcggcgatgatgtggttccggaagggcctgcgcgtgcacgacaacccggcgctggacgcggcccgccgacacggggccggcgctgcatccgcgcggctgtacccggtgttcgtgctcgatccgcgctaccttcgcccggatgccgtcgcggcgtccccaggttccgcgcgcgccggggtcgcccgcatccgcttcctcctcgagagcctcagcgacctcgacgctcgtctccgccgcctagggtcccgcctcctcctcctgcgcgcccgcgacgacgtcgccgacgctgtctgcgcggccctaaaggacttcagtggaacattggcaagctgtgcttcgagtccgataccgagccgtacgcgctggcccgcgataagaaggtcacggattttgcattggcgtccggcatcgaggtgctcacgcccgtcagccacaccctcttcgacccagaagaaattataaagaagaacggtggtcggccgcctttgacatatcaatcctttgtctccattgctggggagccgccagctcccgccatggaggaatactccgagctcccaccgctaggagacacaggggaatacgagctgttgccggtgcctacggtggaggagcttgggtacggcgatatcagccaggaggagattccaccattccatggcggagagacagaagctctgaggagaatgaaagaatcgcttcaaaataaggaatgggttgccaaatttgagaaaccaaagggtgacccctctgcctttgtgaaaccttcaacaaccgttttgtcaccatatctaaagtttgggtgcctgtcttccagatatttttaccactgcattcaggatgtgcacaggagcgtcagaaaccatacaaaaccacctgtttcattgacaggacagttgctgtggcgagacttcttttacacagtgtcttatggaacacctaattttgatcggatgaaagggaacaaaatatgcaagcagattccgtggagcgagaacgaagatctatttgttgcatggagagatggccagacaggatatccgtggatcgatgctatcatgattcagctgaggaactggggttggatgcatcacctcgcacgccattctgttgcttgtttcttgactcgcggtgatatgtttatccactgggaaaaaggacgtgatgtgtttgaaaggctactgatagattctgactgggccattaacaacggcaactggctgtggctctcttgctcatccttcttctaccagtaccacagaatttactcccctattacattcgggaagaagtatgatcctaacgggaactacattaggcatttcatcccagtgctgaaagacatgccaagggagtacatttacgagccttggactgctcccactagcatccagaagaaagccaattgtattattggcaaagactacccaaaaccagtggttgatcatgagactgcaagcaaagagtgtagaaagaggatgggagaagcttatgcgttgagtcgcgttgatgccaaacctagcaaagggaagacgttgaactcacgccgaaaaatgctacatggtgaccgagacacgtctaactcaaccattgctaagcgactgaagaggaatagccgagctgagtgatgcgcagctcctcccgtgacaactttacactacttgttccaccttcagcattttttttttattttcagttgtgttacctgcatctgtcatatgtagctcgtctgacattttaccaaagtagtctgaccgtaaggaaatgacttgagcccgtagctagtgtgatatcctacactgaaggacatatctgtaatatatgctcatgtaataacaggtgtaataataataactgccgcccatgtactctaggtcttatttggaaggtgtgtgcagcaaatgaacagttcaagtgcaatccattaaagcaggtcgtttgg

SEQ ID NO: 54233 - DNA, 2131 bp, Zea Mays
gcaagaacggccaaaaggtaactgacgtggccacttcccgcgccactcgctacggttactgctcccttgttcaaacctgcgccgtccaattccccatcaatggcccgcaccatctctcccagtctccatactcccaactccaccgctggcaaaatcccccaatcttccgcactctgtaaccccgcccgcgatggaggccgcaaccgccgccacggcggcgatgatgtggttccggaagggcctgcgcgtgcacgacaacccggcgctggacgcggcccgccgacacggggccggcgctgcatccgcgcggctgtacccggtgttcgtgctcgatccgcgctaccttcgcccggatgccgtcgcggcgtccccaggttccgcgcgcgccggggtcgcccgcatccgcttcctcctcgagagcctcagcgacctcgacgctcgtctccgccgcctagggtcccgcctcctcctcctgcgcgcccgcgacgacgtcgccgacgctgtctgcgcggccctaaaggactggaacattggcaagctgtgcttcgagtccgataccgagccgtacgcgctggcccgcgataagaaggtcacggattttgcattggcgtccggcatcgaggtgctcacgcccgtcagccacaccctcttcgacccagaagaaattataaagaagaacggtggtcggccgcctttgacatatcaatcctttgtctccattgctggggagccgccagctcccgccatggaggaatactccgagctcccaccgctaggagacacaggggaatacgagctgttgccggtgcctacggtggaggagcttgggtacggcgatatcagccaggaggagattccaccattccatggcggagagacagaagctctgaggagaatgaaagaatcgcttcaaaataaggaatgggttgccaaatttgagaaaccaaagggtgacccctctgcctttgtgaaaccttcaacaaccgttttgtcaccatatctaaagatatttttaccactgcattcaggatgtgcacaggagcgtcagaaaccatacaaaaccacctgtttcattgacaggacagttgctgtggcgagacttcttttacacagtgtcttatggaacacctaattttgatcggatgaaagggaacaaaatatgcaagcagattccgtggagcgagaacgaagatctatttgttgcatggagagatggccagacaggatatccgtggatcgatgctatcatgattcagctgaggaactggggttggatgcatcacctcgcacgccattctgttgcttgtttcttgactcgcggtgatatgtttatccactgggaaaaaggacgtgatgtgtttgaaaggctactgatagattctgactgggccattaacaacggcaactggctgtggctctcttgctcatccttcttctaccagtaccacagaatttactcccctattacattcgggaagaagtatgatcctaacgggaactacattaggcatttcatcccagtgctgaaagacatgccaagggagtacatttacgagccttggactgctcccactagcatccagaagaaagccaattgtattattggcaaagactacccaaaaccagtggttgatcatgagactgcaagcaaagagtgtagaaagaggatgggagaagcttatgcgttgagtcgcgttgatgccaaacctagcaaagggaagacgttgaactcacgccgaaaaatgctacatggtgaccgagacacgtctaactcaaccattgctaagcgactgaagaggaatagccgagctgagtgatgcgcagctcctcccgtgacaactttacactacttgttccaccttcagcattttttttttattttcagttgtgttacctgcatctgtcatatgtagctcgtctgacattttaccaaagtagtctgaccgtaaggaaatgacttgagcccgtagctagtgtgatatcctacactgaaggacatatctgtaatatatgctcatgtaataacaggtgtaataataataactgccgcccatgtactctaggtcttatttggaaggtgtgtgcagcaaatgaacagttcaagtgcaatccattaaagcaggtcgtttgg

SEQ ID NO: 54234 - DNA, 1297 bp, Zea Mays
aatcttccgcactctgtaaccccgcccgcgatggaggccgcaaccgccgccacggcggcgatgatgtggttccggaagggcctgcgcgtgcacgacaacccggcgctggacgcggcccgccgacacggggccggcgctgcatccgcgcggctgtacccggtgttcgtgctcgatccgcgctaccttcgcccggatgccgtcgcggcgtccccaggttccgcgcgcgccggggtcgcccgcatccgcttcctcctcgagagcctcagcgacctcgacgctcgtctccgccgcctagggtcccgcctcctcctcctgcgcgcccgcgacgacgtcgccgacgctgtctgcgcggccctaaaggactggaacattggcaagctgtgcttcgagtccgataccgagccgtacgcgctggcccgcgataagaaggtcacggattttgcattggcgtccggcatcgaggtgctcacgcccgtcagccacaccctcttcgacccagaagaaattataaagaagaacggtggtcggccgcctttgacatatcaatcctttgtctccattgctggggagccgccagctcccgccatggaggaatactccgagctcccaccgctaggagacacaggggaatacgagctgttgccggtgcctacggtggaggagcttgggtacggcgatatcagccaggaggagattccaccattccatggcggagagacagaagctctgaggagaatgaaagaatcgcttcaaaataaggaatgggttgccaaatttgagaaaccaaagggtgacccctctgcctttgtgaaaccttcaacaaccgttttgtcaccatatctaaagtttgggtgcctgtcttccagatatttttaccactgcattcaggatgtgcacaggagcgtcagaaaccatacaaaaccacctgtttcattgacaggacagttgctgtggcgagacttcttttacacagtgtcttatggaacacctaattttgatcggatgaaagggaacaaaatatgcaagcagtttagattccgtggagcgagaacgaagatctatttgttgcatggagagatggccagacaggatatccgtggatcgatgctatcatgattcagctgaggaactggggttggatgcatcacctcgcacgccattctgttgcttgtttcttgactcgcggtgatatgggaactttgacataatgacatgccttgagacgaagggttgcatcgacttaaagatgaaaagacagatcagcccatgataatttgtgttatgattgtaatcgatt

SEQ ID NO: 54235 - DNA, 790 bp, Zea Mays
cagttgtattcagactgtcaatttcatgtcctcacttgtttcgttgttgaatactgcagtagctcatgcagatgttccagcagcttcatttccttgtgcccgagctataggaaaatgcatttattttatgccagcatttctgttcttgtcatttgaactctcttcaaaggaaccatagtctatgttctgaagtaccgttggaatctgcagaataccaacaagtacttctttttcttccatgtctagatcaatcttttcccttgggtttctcacatctagcctaatgtatggagtgtagaagccaggcttcaagtgcgccctcacctacccatgaacggaaatctttcatcggagcctcagaggtggtatcttggtaaagaacacttctgagaacttttctgcaatgcttttctggtagggattgtccttgtcataatggtatctaaagttttcatatgttgcctgcaaaatatgtaagtagtaactggtattaatcaaaaggattggaggttgtaagtactaatacgattacagtagacattgcaacttatggaattctgcagatcataatcaacttaatattttggataacgtaaggaggtttatacatgtagtacatgttgtaaaaatacattttgcccttttattttcattatgtatgtagtatgtccagtctttgcatttaatgacatttttaagtagaggtttccccatgccaaaaggtaatccaattaaaatatttggtcgttacaaatatagttgttaaggcggcaaggcgaggtaagttgac

SEQ ID NO: 54236 - DNA, 476 bp, Zea Mays
cgagctctactcacagaccactgcatgggtgttgaggttcttgtattcctgctagtgatgaccctctaccacagccaccaagtctgctctgtccagagcatcaagtgccagtggtgaccacgctcacaattcttcaccccaccatagccagaacattctagggagttgctggcctgtatgaagcttgttccgtaatcatctcaggtactagatctatgctgctgttgatggtgctaagtgtcggtgggctcggcgttcttataggttaaagtagctcttctatacttctttatgaggatgatcacttaagctagcatgtatttcaaacttatgaaaattatacatgcttcaaagtgaaatactttggatttactttataatcactctgatcttgtatagtataatcttaatgtaacttgtaactttttgtaataaagaaatttcgctacaagtgttggtgtgtgatttgtgtttac

SEQ ID NO: 54237 - DNA, 234 bp, Zea Mays
cgagctctactcacagaccactgcatgggtgttgaggttcttgtattcctgctagtgatgaccctctaccacagccaccaagtctgctctgtccagagcatcaagtgccagtggtgaccacgctcacaattcttcaccccaccatagccagaacattctagggagttgctggcctgtatgaagcttgttccgtaatcatctcagtattttatttgcaaacagcataagcataag

SEQ ID NO: 54238 - DNA, 239 bp, Zea Mays
cgagctctactcacagaccactgcatgggtgttgaggttcttgtattcctgctagtgatgaccctctaccacagccaccaagtctgctctgtccagagcatcaagtgccagtggtgaccacgctcacaattcttcaccccaccatagccagaacattctagggagttgctggcctgtatgaagcttgttccgtaatcatctcaggggcttgttgttgctggacgataggacgaggcgtg

SEQ ID NO: 54239 - DNA, 1279 bp, Zea Mays
cagcgttgcgtctccaatgaacgtgtgtgtcaccggggagaggcgagggcaggcggtggtggcgatgccgattgcgtccatcgacgtgcgcttggtggggattgcctcctccatttgcacaaactttcaaagcattttgacccaccttccttcaatcaagcgatcccttccctgccgatcacttcctggccagtaccatggcattgggtcgagctcagcttcctccatgccaacctacaacagcagcagcaggcgccgggtcttaagacctgaaaaggaggcggcgcggatctgcagtcagtagtatcttgtgcgacaccactgcttgtggccggcggggcaacgacaaacaccaagccgaagtggtccgctctcgaagaaagattgaagattatgcatcagcgacaagtaacgaccgcccggaaagagagccggaaaaaaggcaggaaatcgccaccgctcgcccctatttgagcagccgcttgttccttccgcgtcctcgctgctcctcaattcaattggctccgtgccgacctccaggttgagaaggaaagcatcgcgagttcgccatacggatgggttctaaagcgcctttctgtctcacgctcctcttgctgctcgccgcagcctgtggacctgctgcacatgccacaatgctggcatgcaacatcgaggttactttgtttgttggatgaattcagtacggtaagggcattctaactgaagatggcattggtctgcttggagacaatgtgaggacgaaccagaagggcgagttctgggtggcgatccactgtcggagaagtatgtatcctcggctaatgagctgccatgtcaagctgaggaagtttttgctcagcttcccaatccctgccaagtaccactacctgatgcatatcgatagcaagctctacgcgttgatcatcagggacagcccgatggccagatgcttcacatcatggaggacggcaagggagaggtggtgagagttatcatcgaagtggagggtccgtctgatgccattcatcgttgtctttgacctcgtgaaggcgtcttagccacttcaatttgattggaaatattgttgttttaagatacgggtccatggttaatgttgtacgcttctctgcttctctgagaagacctgtcattttaataatttggttctggagcaacctggagctgtatattgatctagcttcttttagtaacaaatgtaagttgctcacattttctttagatcgtctatagaactttgaacgaccagctcgtcccttct

SEQ ID NO: 54240 - DNA, 1215 bp, Zea Mays
cagcgttgcgtctccaatgaacgtgtgtgtcaccggggagaggcgagggcaggcggtggtggcgatgccgattgcgtccatcgacgtgcgcttggtggggattgcctcctccatttgcacaaactttcaaagcattttgacccaccttccttcaatcaagcgatcccttccctgccgatcacttcctggccagtaccatggcattgggtcgagctcagcttcctccatgccaacctacaacagcagcagcaggcgccgggtcttaagacctgaaaaggaggcggcgcggatctgcagtcagtagtatcttgtgcgacaccactgcttgtggccggcggggcaacgacaaacaccaagccgaagtggtccgctctcgaagaaagattgaagattatgcatcagcgacaagtaacgaccgcccggaaagagagccggaaaaaaggcaggaaatcgccaccgctcgcccctatttgagcagccgcttgttccttccgcgtcctcgctgctcctcaattcaattggctccgtgccgacctccaggttgagaaggaaagcatcgcgagttcgccatacggatgggttctaaagcgcctttctgtctcacgctcctcttgctgctcgccgcagcctgtggacctgctgcacatgccacaatgctggcatgcaacatcgaggttactttgtttgttggatgaattcagtacggtaagggcattctaactgaagatggcattggtctgcttggaggtacttccagtcattttgcaaactatgatccccccatatgacaatgtgaggacgaaccagaagggcgagttctgggtggcgatccactgtcggagaactctacgcgttgatcatcagggacagcccgatggccagatgcttcacatcatggaggacggcaagggagaggtggtgagagttatcatcgaagtggagggtccgtctgatgccattcatcgttgtctttgacctcgtgaaggcgtcttagccacttcaatttgattggaaatattgttgttttaagatacgggtccatggttaatgttgtacgcttctctgcttctctgagaagacctgtcattttaataatttggttctggagcaacctggagctgtatattgatctagcttcttttagtaacaaatgtaagttgctcacattttctttagatcgtctatagaactttgaacgaccagctcgtcccttct

SEQ ID NO: 54241 - DNA, 1808 bp, Zea Mays
ctcgcatcagcgttgcgtctccaatgaacgtgtgtgtcaccggggagaggcgagggcaggcggtggtggcgatgccgattgcgtccatcgacgtgcgcttggtggggattgcctcctccatttgcacaaactttcaaagcattttgacccaccttccttcaatcaagcgatcccttccctgccgatcacttcctggccagtaccatggcattgggtcgagctcagcttcctccatgccaacctacaacagcagcagcaggcgccgggtcttaagacctgaaaaggaggcggcgcggatctgcagtcagtagtatcttgtgcgacaccactgcttgtggccggcggggcaacgacaaacaccaagccgaagtggtccgctctcgaagaaagattgaagattatgcatcagcgacaagtaacgaccgcccggaaagagagccggaaaaaaggcaggaaatcgccaccgctcgcccctatttgagcagccgcttgttccttccgcgtcctcgctgctcctcaattcaattggctccgtgccgacctccaggttgagaaggaaagcatcgcgagttcgccatacggatgggttctaaagcgcctttctgtctcacgctcctcttgctgctcgccgcagcctgtggacctgctgcacatgccacaatgctggtaacagattgtgttatgttctcatcagtcatcactctggatttgcaccgttgagttgatttacccacttaggctgtcgatttgcactgtagattacaccgtttgcattgtgagaaataggggatagatatgatagctactgcagagtggagacagccttgctgaaaaaccataatcaccatcggtcgtattagatatttatagggcaattatcaacacgagtaccacctctcctctgaaactctgggactccggtcatatcagcaccattgagttgatttacccacttaggctgggatttgcactgataagggataagaaaggatagctgctgcagagtagagacaactttgctgcgaaaccataatcactatcggtcgtattagatatttatagggtacttatcaacacgagtaccaaacaagctgaaaatgagcatgtttattttcagctctaggttttatgctcaatttgtttttcaggcatgcaacatcgaggttactttgtttgttggatgaattcagtacggtaagggcattctaactgaagatggcattggtctgcttggaggtacttccagtcattttgcaaactatgatccccccatatgacaatgtgaggacgaaccagaagggcgagttctgggtggcgatccactgtcggagaagtatgtatcctcggctaatgagctgccatgtcaagctgaggaagtttttgctcagcttcccaatccctgccaagtaccactacctgatgcatatcgatagcaagctctacgcgttgatcatcagggacagcccgatggccagatgcttcacatcatggaggacggcaagggagaggtggtgagagttatcatcgaagtggagggtccgtctgatgccattcatcgttgtctttgacctcgtgaaggcgtcttagccacttcaatttgattggaaatattgttgttttaagatacgggtccatggttaatgttgtacgcttctctgcttctctgagaagacctgtcattttaataatttggttctggagcaacctggagctgtatattgatctagcttcttttagtaacaaatgtaagttgctcacattttctttagatcgtctatagaactttgaacgaccagctcgtcccttct

SEQ ID NO: 54242 - DNA, 515 bp, Zea Mays
gcttgacccagccgactcggtcattggccctcacctgcatataatccacaaccacctctccgttgcggccccgcgaaaccagcgcagccacgaagtcgagttgagaaccaccaagacgccctgtgtagcgggacagaggggagagtgcagccgccatcattgatccgccacgggcgaaatcattgagcgttgtcgctccagcaccggcagatggctttgaagcttcgcgggatcaaatcgagcgtgtgtgtggtggtggaggtcacggtgtatagcgggcaagatgtgaattgttcgccagagctggggatttccgccatggccatccttcctcgacgacgggactctgccggatgccatcattgtaaggtcacgaggatctgaagaatcattctggtacctggaatctcaagtgacaggcaagttatgcccttgaccacatttattacccaataatgttctttattatcactattcaatgcataggtttgatgggacccaataggtcatcctag

SEQ ID NO: 54243 - DNA, 1683 bp, Zea Mays
aggaattgttataaaaggcgcccgtccctcccatggctcaagaacaagggaatcgaagccattccctcttcaagaggggatcatcagattgggcttattattccttattactccaggcaaggatcggagttgctctgaattgactgaaccatggcggcgacaatggcagtgacgacgatggtgacgaggagcaaggagagctggtcgtcattgcaggtcccggcggtggcattcccttggaagccacgaggtggcaagaccggcggcctcgagttccctcgccggcttggcgccgccgttcccgggcagcaggccgcctgggaggcggaggaagaggcagcgaagaggaggaagcagaagggcggcggcagcaagaagcagcagcagctgggcgatctgagcctgaggaaggtcagggtcaagatcgccaacccgcacctgcggcgcctggttagcggcgccatcgccggcgccgtgtccaggacgtttgtggcgccgctggagacgatccggacgcacttgatggtcggcagcatcggcgtcgactccatggccggggtgttccagtggatcatgcagaacgaagggtggaccggcctgttccgcggcaacgccgtcaacgtcctgcgcgtcgctccgagcaaggctatcgagcatttcacctatgacacggccaagaagttcctaacccccaagggcgacgagccgcccaagatcccgatccccactccgctggttgccggagctctagccggattcgcctcaaccttgtgcacctaccccatggagctgatcaagaccagggtcaccatcgagaaggacgtatacgacaacgtcgcgcacgcgttcgtgaagatcctacgcgacgagggcccgtcggagctgtaccgtgggctgacacccagcctgatcggcgtggtgccgtacgcggcctgtaacttctacgcctacgagacgctgaagcggctctaccgtcgcgcgaccgggcggcgtcccggcgcggacgtgggccccgtggcgacgctgctcatcgggtccgcggcgggcgccatcgccagctcggccacgttcccgctagaggtggcccgcaagcagatgcaggtgggcgctgtgggcgggaggcaggtgtaccagaacgtcctccacgctatctactgcatcctcaagaaggagggcgccggcggcctgtaccgaggtctcggccctagctgcatcaagctcatgcccgccgccggcatcgccttcatgtgctacgaggcgtgcaagaagatcctcgtcgacaaggaggatgaggaggaggaggacgaagccggcggcggagaggatgacaagaaaaaggttgaatgatcaaagttcttggccaagaaggtagcaatgtcgtgaagcgtacgtgaactggaaacggatggacaagtatatttggagtttgatgtggtgtttccggatcgtgtgtttgtctcagatgaaaaaaatacaatattttgagtccaagttaatcaatgttccatttgcctatccggagctcaatttgttaggttgcatgttccatgtaattactatatttgcctatttcaattttcaagctcttttcgttgtgtttagtaaactgtggtgtgaccacttacggtcacaataaccatttttatctgtttttggtataataagcatgtctgtgttcggtcc

SEQ ID NO: 54244 - DNA, 1732 bp, Zea Mays
gggcatttgatttttgtgtgtatattaattacaaatgataaatcatgtaatgtgttggtatttgcccgaatgatgcctattcccttggcaccattaagccagttgggagatgctttgtgcatttatgaataagacaagaaaacatgattacttctggtgtttttaggaatgctagtaactaaaaagctaatgttatctaccgatttgtgattttcggacttgagtctaaatgtaattatgaagtttaacatagcaagactggagacgtcgtttgagagggccgatgagaaacacagccaaataacctccaactaacctttgtggtaccaatgtcaagatagctgccattccttcaagcgtcgtggttctgacttcagagacctttgactcaattgtccttgatgagttttatgccccatggtgtggtcactgcaagcatcttgctccgatttatgagaagctggcttcagttttcaagcaggacgacagtgttgtgattgccaatcttgatgctgacaagcacactgacttggctaaaaaatatggtgtttctagtttccctacattgaagttcttccctaagggaaacaaagccggtgaagattatgatggtggccgggacttggatgactttgtcaagttcattaatgagaagtgtggcaccagccgggatccaaagggccacctgacttcagaggctaggcttgtgccaagcttgaatcctcttgtgaaggagtttctcaatgctgttgatgacaagcggaaggaagtcctctctaaaatagaagaggatgttgctaagctcagcggttctgcagccaagcatggaaatatatatgtgacagctgcaaagaagatcatggacaagggctctgactacactaagaaggagactgagaggcttcaccgcatgctggagaagtggtgtagctagttcagtaaagatgaaaagcgtcaaactagttgtggaatggtggtattgtttatagtacatgtgtttggactttggacactgggttccaatgacattatgagattccaagttcacacagcaggagttgctagcttgcaagccgattcttactccaaaatgggtaggcttacgggttgtgaagattatgatgctactggtaacgcctaatctttatggcaatttggtggctaacacggctgcaggtattgttggagggacgggcatcatgcctagagactttgtggcatatggaacttcttggagctttttgctatggtcttcatcaagttttataccaatgactttatctcccgctaccccgacccgctcatcaaggccatcgacaccatcaagatcgatctggagaccaacaagatcatggacttcatcaagtttgacgtcggcaacgtggtcatggtgactggcgggaggaacaccgggcgtgtaggagtcatcaagaacagggagaagcacaagggcatctttgagaccatccacatgctgcttggagctttttgctatgtctagttttctcctatttgttgtacaggaaaacatagaatagaattcaaatttggtggtcgcaaaagtgtggagactttaattcatataaagttaggcttaacattagtgcaaacagttgtattttagtttagatttagagtacacttatgtatgtgttgtttgacaatgcttatttatgatatattgaatggtacttatttatattatattaattataatgttgttcaatatatg

SEQ ID NO: 54245 - DNA, 1638 bp, Zea Mays
ctcataacacagggaaatagggcatttgatttttgtgtgtatattaattacaaatgataaatcatgtaatgtgttggtatttgcccgaatgatgcctattcccttggcaccattaagccagttgggagatgctttgtgcatttatgaataagacaagaaaacatgattacttctggtgtttttaggaatgctagtaactaaaaagctaatgttatctaccgatttgtgattttcggacttgagtctaaatgtaattatgaagtttaacatagcaagactggagacgtcgtttgagagggccgatgagaaacacagccaaataacctccaactaacctttgtggtaccaatgtcaagatagctgccattccttcaagcgtcgtggttctgacttcagagacctttgactcaattgtccttgatgagttttatgccccatggtgtggtcactgcaagcatcttgctccgatttatgagaagctggcttcagttttcaagcaggacgacagtgttgtgattgccaatcttgatgctgacaagcacactgacttggctaaaaaatatggtgtttctagtttccctacattgaagttcttccctaagggaaacaaagccggtgaagattatgatggtggccgggacttggatgactttgtcaagttcattaatgagaagtgtggcaccagccgggatccaaagggccacctgacttcagaggctaggcttgtgccaagcttgaatcctcttgtgaaggagtttctcaatgctgttgatgacaagcggaaggaagtcctctctaaaatagaagaggatgttgctaagctcagcggttctgcagccaagcatggaaatatatatgtgacagctgcaaagaagatcatggacaagggctctgactacactaagaaggagactgagaggcttcaccgcatgctggagaagattccaagttcacacagcaggagttgctagcttgcaagccgattcttactccaaaatgggtaggcttacgggttgtgaagattatgatgctactggtaacgcctaatctttatggcaatttggtggctaacacggctgcaggtattgttggagggacgggcatcatgcctagagactttgtggcatatggaacttcttggagctttttgctatggtcttcatcaagttttataccaatgactttatctcccgctaccccgacccgctcatcaaggccatcgacaccatcaagatcgatctggagaccaacaagatcatggacttcatcaagtttgacgtcggcaacgtggtcatggtgactggcgggaggaacaccgggcgtgtaggagtcatcaagaacagggagaagcacaagggcatctttgagaccatccacatgctgcttggagctttttgctatgtctagttttctcctatttgttgtacaggaaaacatagaatagaattcaaatttggtggtcgcaaaagtgtggagactttaattcatataaagttaggcttaacattagtgcaaacagttgtattttagtttagatttagagtacacttatgtatgtgttgtttgacaatgcttatttatgatatattgaatggtacttatttatattatattaattataatgttgttcaatatatg

SEQ ID NO: 54246 - DNA, 1688 bp, Zea Mays
ttcgtggccctgctcgtagcttggaggcggcgacattctccggcaatgggggtcaaggggggcgacaagcccaagcccaactaccgcaagggcctgtggtcgctggaggaggaccagaagctccgcgactacattctcctccacggccacggctgctggagcgcgctccccatgaaagccggaggagtgctcctacctggcacagatgctctacggtagggtcatcatggatgtggtcaccaagagcaggcgtgcatcgcagattcacagtacacaactctaaggtaccaatgtcaagatagctgccattccttcaagcgtcgtggttctgacttcagagacctttgactcaattgtccttgatgagttttatgccccatggtgtggtcactgcaagcatcttgctccgatttatgagaagctggcttcagttttcaagcaggacgacagtgttgtgattgccaatcttgatgctgacaagcacactgacttggctaaaaaatatggtgtttctagtttccctacattgaagttcttccctaagggaaacaaagccggtgaagattatgatggtggccgggacttggatgactttgtcaagttcattaatgagaagtgtggcaccagccgggatccaaagggccacctgacttcagaggcttgtgccaagcttgaatcctcttgtgaaggagtttctcaatgctgttgatgacaagcggaaggaagtcctctctaaaatagaagaggatgttgctaagctcagcggttctgcagccaagcatggaaatatatatgtgacagctgcaaagaagatcatggacaagggctctgactacactaagaaggagactgagaggcttcaccgcatgctggagaagtggtgtagctagttcagtaaagatgaaaagcgtcaaactagttgtggaatggtggtattgtttatagtacatgtgtttggactttggacactgggttccaatgacattatgagattccaagttcacacagcaggagttgctagcttgcaagccgattcttactccaaaatgggtaggcttacgggttgtgaagattatgatgctactggtaacgcctaatctttatggcaatttggtggctaacacggctgcaggtattgttggagggacgggcatcatgcctagagactttgtggcatatggaacttcttggagctttttgctatggtcttcatcaagttttataccaatgactttatctcccgctaccccgacccgctcatcaaggccatcgacaccatcaagatcgatctggagaccaacaagatcatggacttcatcaagtttgacgtcggcaacgtggtcatggtgactggcgggaggaacaccgggcgtgtaggagtcatcaagaacagggagaagcacaagggcatctttgagaccatccacatgctgcttggagctttttgctatgtctagttttctcctatttgttgtacaggaaaacatagaatagaattcaaatttggtggtcgcaaaagtgtggagactttaattcatataaagttaggcttaacattagtgcaaacagttgtattttagtttagatttagagtacacttatgtatgtgttgtttgacaatgcttatttatgatatattgaatggtacttatttatattatattaattataatgttgttcaatatatg

SEQ ID NO: 54247 - DNA, 1580 bp, Zea Mays
ttcgtggccctgctcgtagcttggaggcggcgacattctccggcaatgggggtcaaggggggcgacaagcccaagcccaactaccgcaagggcctgtggtcgctggaggaggaccagaagctccgcgactacattctcctccacggccacggctgctggagcgcgctccccatgaaagccggaggagtgctcctacctggcacagatgctctacggtagggtcatcatggatgtggtcaccaagagcaggcgtgcatcgcagattcacagtacacaactctaaggtaccaatgtcaagatagctgccattccttcaagcgtcgtggttctgacttcagagacctttgactcaattgtccttgatgagttttatgccccatggtgtggtcactgcaagcatcttgctccgatttatgagaagctggcttcagttttcaagcaggacgacagtgttgtgattgccaatcttgatgctgacaagcacactgacttggctaaaaaatatggtgtttctagtttccctacattgaagttcttccctaagggaaacaaagccggtgaagattatgatggtggccgggacttggatgactttgtcaagttcattaatgagaagtgtggcaccagccgggatccaaagggccacctgacttcagaggctaggcttgtgccaagcttgaatcctcttgtgaaggagtttctcaatgctgttgatgacaagcggaaggaagtcctctctaaaatagaagaggatgttgctaagctcagcggttctgcagccaagcatggaaatatatatgtgacagctgcaaagaagatcatggacaagggctctgactacactaagaaggagactgagaggcttcaccgcatgctggagaagattccaagttcacacagcaggagttgctagcttgcaagccgattcttactccaaaatgggtaggcttacgggttgtgaagattatgatgctactggtaacgcctaatctttatggcaatttggtggctaacacggctgcaggtattgttggagggacgggcatcatgcctagagactttgtggcatatggaacttcttggagctttttgctatggtcttcatcaagttttataccaatgactttatctcccgctaccccgacccgctcatcaaggccatcgacaccatcaagatcgatctggagaccaacaagatcatggacttcatcaagtttgacgtcggcaacgtggtcatggtgactggcgggaggaacaccgggcgtgtaggagtcatcaagaacagggagaagcacaagggcatctttgagaccatccacatgctgcttggagctttttgctatgtctagttttctcctatttgttgtacaggaaaacatagaatagaattcaaatttggtggtcgcaaaagtgtggagactttaattcatataaagttaggcttaacattagtgcaaacagttgtattttagtttagatttagagtacacttatgtatgtgttgtttgacaatgcttatttatgatatattgaatggtacttatttatattatattaattataatgttgttcaatatatg

SEQ ID NO: 54248 - DNA, 1477 bp, Zea Mays
ttcgtggccctgctcgtagcttggaggcggcgacattctccggcaatgggggtcaaggggggcgacaagcccaagcccaactaccgcaagggcctgtggtcgctggaggaggaccagaagctccgcgactacattctcctccacggccacggctgctggagcgcgctccccatgaaagccggtaccaatgtcaagatagctgccattccttcaagcgtcgtggttctgacttcagagacctttgactcaattgtccttgatgagttttatgccccatggtgtggtcactgcaagcatcttgctccgatttatgagaagctggcttcagttttcaagcaggacgacagtgttgtgattgccaatcttgatgctgacaagcacactgacttggctaaaaaatatggtgtttctagtttccctacattgaagttcttccctaagggaaacaaagccggtgaagattatgatggtggccgggacttggatgactttgtcaagttcattaatgagaagtgtggcaccagccgggatccaaagggccacctgacttcagaggctaggcttgtgccaagcttgaatcctcttgtgaaggagtttctcaatgctgttgatgacaagcggaaggaagtcctctctaaaatagaagaggatgttgctaagctcagcggttctgcagccaagcatggaaatatatatgtgacagctgcaaagaagatcatggacaagggctctgactacactaagaaggagactgagaggcttcaccgcatgctggagaagattccaagttcacacagcaggagttgctagcttgcaagccgattcttactccaaaatgggtaggcttacgggttgtgaagattatgatgctactggtaacgcctaatctttatggcaatttggtggctaacacggctgcaggtattgttggagggacgggcatcatgcctagagactttgtggcatatggaacttcttggagctttttgctatggtcttcatcaagttttataccaatgactttatctcccgctaccccgacccgctcatcaaggccatcgacaccatcaagatcgatctggagaccaacaagatcatggacttcatcaagtttgacgtcggcaacgtggtcatggtgactggcgggaggaacaccgggcgtgtaggagtcatcaagaacagggagaagcacaagggcatctttgagaccatccacatgctgcttggagctttttgctatgtctagttttctcctatttgttgtacaggaaaacatagaatagaattcaaatttggtggtcgcaaaagtgtggagactttaattcatataaagttaggcttaacattagtgcaaacagttgtattttagtttagatttagagtacacttatgtatgtgttgtttgacaatgcttatttatgatatattgaatggtacttatttatattatattaattataatgttgttcaatatatg

SEQ ID NO: 54249 - DNA, 1693 bp, Zea Mays
ttcgtggccctgctcgtagcttggaggcggcgacattctccggcaatgggggtcaaggggggcgacaagcccaagcccaactaccgcaagggcctgtggtcgctggaggaggaccagaagctccgcgactacattctcctccacggccacggctgctggagcgcgctccccatgaaagccggaggagtgctcctacctggcacagatgctctacggtagggtcatcatggatgtggtcaccaagagcaggcgtgcatcgcagattcacagtacacaactctaaggtaccaatgtcaagatagctgccattccttcaagcgtcgtggttctgacttcagagacctttgactcaattgtccttgatgagttttatgccccatggtgtggtcactgcaagcatcttgctccgatttatgagaagctggcttcagttttcaagcaggacgacagtgttgtgattgccaatcttgatgctgacaagcacactgacttggctaaaaaatatggtgtttctagtttccctacattgaagttcttccctaagggaaacaaagccggtgaagattatgatggtggccgggacttggatgactttgtcaagttcattaatgagaagtgtggcaccagccgggatccaaagggccacctgacttcagaggctaggcttgtgccaagcttgaatcctcttgtgaaggagtttctcaatgctgttgatgacaagcggaaggaagtcctctctaaaatagaagaggatgttgctaagctcagcggttctgcagccaagcatggaaatatatatgtgacagctgcaaagaagatcatggacaagggctctgactacactaagaaggagactgagaggcttcaccgcatgctggagaagtggtgtagctagttcagtaaagatgaaaagcgtcaaactagttgtggaatggtggtattgtttatagtacatgtgtttggactttggacactgggttccaatgacattatgagattccaagttcacacagcaggagttgctagcttgcaagccgattcttactccaaaatgggtaggcttacgggttgtgaagattatgatgctactggtaacgcctaatctttatggcaatttggtggctaacacggctgcaggtattgttggagggacgggcatcatgcctagagactttgtggcatatggaacttcttggagctttttgctatggtcttcatcaagttttataccaatgactttatctcccgctaccccgacccgctcatcaaggccatcgacaccatcaagatcgatctggagaccaacaagatcatggacttcatcaagtttgacgtcggcaacgtggtcatggtgactggcgggaggaacaccgggcgtgtaggagtcatcaagaacagggagaagcacaagggcatctttgagaccatccacatgctgcttggagctttttgctatgtctagttttctcctatttgttgtacaggaaaacatagaatagaattcaaatttggtggtcgcaaaagtgtggagactttaattcatataaagttaggcttaacattagtgcaaacagttgtattttagtttagatttagagtacacttatgtatgtgttgtttgacaatgcttatttatgatatattgaatggtacttatttatattatattaattataatgttgttcaatatatg

SEQ ID NO: 54250 - DNA, 2418 bp, Zea Mays
ttcgtggccctgctcgtagcttggaggcggcgacattctccggcaatgggggtcaaggggggcgacaagcccaagcccaactaccgcaagggcctgtggtcgctggaggaggaccagaagctccgcgactacattctcctccacggccacggctgctggagcgcgctccccatgaaagccggaggagtgctcctacctggcacagatgctctacggtagggtcatcatggatgtggtcaccaagagcaggcgtgcatcgcagattcacagtacacaactctaaggtattaaaatatgatgcatcaacgtcgtttaatttagcaagcaaaaaatgttctttcttccactcataacacagggaaatagggcatttgatttttgtgtgtatattaattacaaatgataaatcatgtaatgtgttggtatttgcccgaatgatgcctattcccttggcaccattaagccagttgggagatgctttgtgcatttatgaataagacaagaaaacatgattacttctggtgtttttaggaatgctagtaactaaaaagctaatgttatctaccgatttgtgattttcggacttgagtctaaatgtaattatgaagtttaacatagcaagactggagacgtcgtttgagagggccgatgagaaacacagccaaataacctccaactaacctttgtggtgagtagtttgtttttgctatggataagcccgtaagccatttgctatcatgcgaaagctcctcaattaattatgttttatgcacatgatgttatctttattttgattgaagtcctatcaagtgctacctgttgaagaattggatgttgtcaactaatgcacattgtttcaggtaccaatgtcaagatagctgccattccttcaagcgtcgtggttctgacttcagagacctttgactcaattgtccttgatgagttttatgccccatggtgtggtcactgcaagcatcttgctccgatttatgagaagctggcttcagttttcaagcaggacgacagtgttgtgattgccaatcttgatgctgacaagcacactgacttggctaaaaaatatggtgtttctagtttccctacattgaagttcttccctaagggaaacaaagccggtgaagattatgatggtggccgggacttggatgactttgtcaagttcattaatgagaagtgtggcaccagccgggatccaaagggccacctgacttcagaggcttgtgccaagcttgaatcctcttgtgaaggagtttctcaatgctgttgatgacaagcggaaggaagtcctctctaaaatagaagaggatgttgctaagctcagcggttctgcagccaagcatggaaatatatatgtgacagctgcaaagaagatcatggacaagggctctgactacactaagaaggagactgagaggcttcaccgcatgctggagaagtggtgtagctagttcagtaaagatgaaaagcgtcaaactagttgtggaatggtggtattgtttatagtacatgtgtttggactttggacactgggttccaatgacattatgagattccaagttcacacagcaggagttgctagcttgcaagccgattcttactccaaaatgggtaggcttacgggttgtgaagattatgatgctactggtaacgcctaatctttatggcaatttggtggctaacacggctgcaggtattgttggagggacgggcatcatgcctagaggtagggattgcagctaattctttattatttgttgttttcccctatgaaaaaaattgttctagcagcgtttcatttctgtaatttattacaaaaaaataatattttgggcatgacttatctccctttgtccctacattgttacatatttgtaaagactttgtggcatatggaacttcttggagctttttgctatggtcttcatcaagttttataccaatgactttatctcccgctaccccgacccgctcatcaaggccatcgacaccatcaagatcgatctggagaccaacaagatcatggacttcatcaagtttgacgtcggcaacgtggtcatggtgactggcgggaggaacaccgggcgtgtaggagtcatcaagaacagggagaagcacaagggcatctttgagaccatccacatgctgcttggagctttttgctatgtctagttttctcctatttgttgtacaggaaaacatagaatagaattcaaatttggtggtcgcaaaagtgtggagactttaattcatataaagttaggcttaacattagtgcaaacagttgtattttagtttagatttagagtacacttatgtatgtgttgtttgacaatgcttatttatgatatattgaatggtacttatttatattatattaattataatgttgttcaatatatg

SEQ ID NO: 54251 - DNA, 617 bp, Zea Mays
aaaaatcttgctcaaggtgaatagtcatagatttcctgtggtatcttctatggcaaagaggttcttggctgttccagctagcagtgtgtcatcagaatccacttttagcactagaggtaggatccttgatgattacaagagttcattgaagccagcaacagttcaggctttggtgtgtgcttctagttggatatgtgggtctcgaagttcacctattcttgtaactggagaaggtgatgatggtgacatcgagtccgtggaatttccaaagtgtgtggtggcaagtaattaggcacatagtcacatactcacatggaggaggtggaggagagggagagctaggacccgagagaggagacaagagaggcacatggtcattatattttgttggctctaactgtaagcctataattgttggttgcaacttgtaagttgcaattgttgctaacctggcatattttgttggctccctaaaactttgtcctgaactcctgaacctgaagtcctgatctataattgttggctgcatcactgcatgtattttggttctagaactgaaactctgaaagtatggaattatggattatggaatggaatgaaactattatgaactataa

SEQ ID NO: 54252 - DNA, 3526 bp, Zea Mays
cttgattcccaaatccagcatacccttgagagtcttttctttagtcgggtaagtcttgttgagtaattccatactcagggttttattccctgttgtttttcaggttctaactttgtgctgcttttgatggtgttaagtgcacgtgggctcggccttcttatatagtataacccgtctttatcttcttactgaggatggtcatttgagctagcatatatttcaaacttatacttttgtaatcactccgataaaataatataaaatttttgtaacttgtaaaatttggtaataagatttccgctgcaaaaatattggtgtgtgtgatttgtgttacttaatcccgcggttctggttgtaagtggtttatccggtgtccttggggcaatcggacggatcctgttaagttatctggtgcacatgcatggccgtctgaggtctttgagacaaggacaggtgcatgtgggcccgataacttggaggttctgccacacttcccacttcaactgtagcttgcctactgtgtttgggttggcaactctccgaagtaccaagtgtcctggcttaatattttttaaccaaacctttctgtcacgccattttattgtttcggcttgatatttattgatattctccacagcctgaagcctgatcccttctatagcatcttttgccacagaataatcagcttcgtcctctgccgaagccactgttcttattgatcccgctttagcttcttctggggttattgcttcgtcaccaaacatcaatttgaatggtgtaaaacctgttgaccttgacattgttgtgttgtggctccataccacttttattaattcatccagccacttccccctgggctggttgaagattagcttcattattcctgtcattataatgccattagctctttcgataagtccatttgactccgggatgccgaactgatgcaaaatggatcttcgtgccaatttgttcacaaaactctctgaaagcttcggcatcaaatttgcgttccattgtccacggtaatggccttcggcactccgaagcgacacacaatattttgccagaaaaacttttgaacagtgaccgaagttattgtggctaaaggcttcgcctcaatccatttagaaaaatattctactgccactacaacatatcttaaattcccttgtgctggtggaagtgggcctagcaaatcaaggccccatcttggcagtggccaagtgggctgtattaattaagttagagacgaaggttgttttttatctcttgcacatttttgacaaccttcgcatttttggactaactttgctgcatctgaagctgccttcggccaatagaatccttgacgaaaaactttacccaacaaaggcctagatccgatgtgagatccacacaggcctgcatgtatttctttcatcaactctataccttcagctctggataaacatttgagtaatggagaacaaactccatgcttgtataactccccttctattattacatatggacgggctcttgccgttattctcttatgataagcttcgtcatctgaaaggaaattgccctgaagaaaagacatgatctcagttctccagtcttcgctataaacaggagatatattgagcactgctctttcaagaaggtcaaccgaaggtgcttttgttgtttcaaagaatacttccgaaggtaatggcagcccctgtgccgctgacttggctagtaaattagcgtgttcattttctcctcgtggaatattcttgacagaaaacccttcgaaggaagcttcaagtcttcgaactgtatccaaatatttctcaagctttggatctcttgctttgcaacttttgtcaacatggccagaaataacttgggaatcagttttgagaaccgcccttcttatccccattgccttcaactttcgaagacccaaaaagcaaagcttcgtattcagcaatattatttgtacaaataaaatcaagtttcactgcgtagcatgttctgactttggatggtgcaattaaaacggcagctgcacctgccccgaaggttcctcaggaaccatcgtagaatactgtccaagcttcggcatctttacttgcttcttcttcctgagcccctggcgtccagtcggcgatgaaatctgctagcgcctaggactgaatcgaagatctatgcacataatcaatgcagaactcattgagttccgcagcccactttccaatccttccagtagcttctctgtttctcataatatccttcaaaggctgtgatgaaggaacaattatatggtatgcttgaaaataatgtcgaagcttcctggaggccattaaaacaacatacaacaccttctccaattatgtatagtttttctttgataaactgagaacttcagaaacaaagtatactggagcctgctttttcaattgcccttcaagcttctcctgaacaagcgccgcacttactgaagagtgcaaagctgccacatacatcagcagaggagcccctggcgctagtggagttagagttgttaaatctatcaaatactgtttcagttcttcgaaggctttttgctgagctgatccccattgaaaaacttcggctgacttcagcacttcaaagaatggtaaatttctctctgtcgatctggatataaatcgattcaaagatgccagtcttcctgtcagccgttgagcccctttctttgtgcttggcggctccatccgaaggatagcttctattttatttggattagcttcgatcccttttgttgaaaccaaacaaccaaggaatttccccttctttaccccgaagacacatttttccggattcagcttcagactagcttgcctaaaattagcgaatgtctcctgcagatcagcaatgtgattttcttgctttgtgctttttactatgatatcatcaacatatgttagcacgtttctgcctatctgagaatgaaggacctttgctgtcattctgctgaagcttcctctagcattcttgagcccctcaggcatccgaaggtaacaatatgtaccactgggggtgatgaagctggtttttggctcgtcttctttcttcatccagattttatggtagcctaaataacaatctagtaaactcatgagctctgacaaacctgctgcgtctatgagagaatctatccttggtaatggaaattcatctttcggacaagccttgttgagatcagtaaaatcaatgcacattctccatttaccattggctttcttcaccataacagtgttagctagccattctggatattttattctctgatgactccagcgctgaggagtcttttcacttcattccgagcaccttcggctttgtcatcagacatcttccgaagcctctgctttctgggcctaaaggatgggtcaacattgagcgagtgttcaataacatccctgttgacaccatagagatcattagctgaccatgcgaagacatctttgttgttgaacaggaaccttattagggttttctcctgctcttcaga

SEQ ID NO: 54253 - DNA, 1447 bp, Zea Mays
tcgctcctgcatctcctagctcgagctcgcctctactccggtgcccagtcgctagactctcgctttcctgtgccgctctcgtccgtggttgtctctctgcccagcctccatctcccttcccagccatggccttcctagtgcctgcccttcccctgccgcccctctccgtggacgccgcccatggagggtcgccggctgcactgcttcccatctatcccaccgccatggagctcgccggattgcgtccctgcatccatggcggctgcttggccccagctccttgccgcgcccttccagtccctctgccggccatagagctcggccctagctcggattcttgcgccgcgcccggctgtttctccctggcgctcgaaacccagtcgcccagcccagctgcagctcgtcgtgccctcgctgctccctgctccttgttcttctcggcacgacagagagtttcctcggccgcgcgtccctacttcccctgcgcgtacgtgcttgcttcctctgtcgcagcagcgaagctgtttcttccccgtcgcgcgcagccacgtctgctccgtgcgcacgcgctcaacctgttcgccatggttgctgcgcgccgcgcatactgctctttggagctcggtcgtaacctcgtcatcgttcggcagctctagcgcctctgtttttttcctgcgcgcgctggtgcccagcttgtttggggctgcgtgtgctcctacgtcgcgctctgcttgcagagttccttcgcatcgtgcatctccagctcgccgagtctgaccccaaaccgttgtgcgccgcctgggcccggtgtctctttctcgtcaccagctcgcgcgcccctgttttctttgtcgtcggtcgtcgtcttcgagttgatttttagctgttgtagtatttttagttatcccggctgcgtctgtggccgtcaaatcatcggagtcgctcaactcaccaatcgtatcttggtcagtcatcgatttcatgtttttcatggtcctcacgtcagccgtccctatccaaacttgccagctcgccgactgaccgtcgtgttccttgaaatccctcgtcggccgatctcgcaacttagttcgtcgtgtcgtgtgtgccgctctatatatgccaccctcctatatcgtcgtcgaagctgtcatctccggctcgatccccacctcaccagttcgctccagactttaattgaaggtcgtcgtcgatctgtgcgtcatcaagaaattccaagagtcaagtgaagacggagccagcaacgtgatattcaccaagtgcgcgacaaaaagctcgagccaggatttatcagcattcgtacgagatttgggtcgcgtttgatgctggatgaagctgatggattaatctgaagacgggtaattggagcaatgcgaagacaaaggatgatcgtcaagtggtcatcgtctaacaacactaacctagtgtt

SEQ ID NO: 54254 - DNA, 254 bp, Zea Mays
gggaattcaggcaaggttggccgggggtgccatgaaattcgggcgggctgttgacacctaatttcgggggccatcaaaccacaccggggcccagaagttcatcctcccacgctcgcctctatctattctggattggcgcctgcataacagaccgccagacgagcaagccacagaggatcaagggcttcaacaggtggagactgctgagcaggagctcattgaaggcaagttgtgcccttgatcacttccttttt

SEQ ID NO: 54255 - DNA, 569 bp, Zea Mays
cgggcgggctgttgacacctaattccgggggataaagtgccgaaccatgcggcctcgccacaaaccacaccggggcctagaagttcatcctcccacactcgcctcaatctattatggattagcgcctgcataacagaccaccagggaattccgctctcacctcattggggtcctggtgggcgaataagcaccaagccctccgcttggatcgaccatcgtgcgcgtcccttgctcgcgtcgagagatttccaacgccgagctagcgcacagggaagggagagaaaagtgagtgccaccgcggggacgagggaaactcgactcaccacctatcgctccttggagttgtgtcctggggattctccgggcttggaggaggaaggttgaagcagctcttccggggattcgtgttcaacgttgtgggaattcctcgccaccaggaactaccctgccgtggaccgcgggtccgcgtggccaagactgtcctcgctgctagccttgacgagcaagccacacatgatcgagtgcttcagtaggtggagactgctgagcaggagctcattgaaggcaag

SEQ ID NO: 54256 - DNA, 683 bp, Zea Mays
gctcttaaccttgtggtcgtgggttcgagccccacggtgggcgccaaatgttgggaccgactgacatgtggtcaggtgggcccaatcactcgagaaggagggaactcaggtgctcaacaaaacaggcaggtgaatggatcctctaagtactgttatgcccccggttacctgctacacccagaatattcccccttacggggtcattacagtgacgagaagtacaatctgattagacatactatgaaacctaccatgaggatggcttacaaatcggcccaaaaggagatagagcgcagcctaggccccaccattgaacggtgtggccttcgcccgtacgcggcgcccttcactctgcgaagtcgagccttcgacctcgctaggactgtcgtcatgcagaaccgtacgagccaatgggggtgccttcgcaaggctgcaatgagcccacttttaaatagtgcggcccttcgctccgatgccccggcaactccggtcgaagacatcgatactggttgtggttggagtacccttcgcttcctgtacctacgacaaaacctcgtctgattgatgttaaaggtctgaccgagggggcgatcggcctttactccaacaatgagtaagttgtatcttgttttggtctattgggcagcagtgttaatctcgacacaagatcatggtacaacttg

SEQ ID NO: 54257 - DNA, 357 bp, Zea Mays
aattgggtcgtgctcgtgtgcacctcccgcttctgcccccgcataacactaggtgccatcatagtggattgtccaatgtttttctgagtctgggtgacgagaaggcgaagaccatgtttaggctactataaagttagcgaggacttgtgaattgattaaatttcttgactcgaagactatatggtaccatgagagctttattgtccacttgcatatcttggttgtaccttctcggttgctgaaaagatcattgaggctttggtctgatccacccttatcttgtgtgcttcgaagtaatgatgcaatttttgtgatgccatgagtactgtgtatgctgttttttccattttcgtcacg

SEQ ID NO: 54258 - DNA, 1601 bp, Zea Mays
gaagattgctgataggcttccaggtagcatggcagtggttacctttcacgtcatccgcacgaactgataaccttcaactctatcactgggttagagttgttaatggtattcagccaactggggattatcagtttgcaaaatataacaagagggcggatgttcttaaatatacggatgaagagtatgagaagtatttagttgaccctgattggagcaaggaagaaacagatcaactatttgaattatgtgaacgatttgaccttcgcttcataataatagcagataagtttccaactgctcgcagtgtggaagatctgaaaagtccttactattctgcttctcgggctcttctaattcatagagctaggtcattcgaagatgtttctgggaatccccttgtgaaggatgcctatgatgctgctcatgagactgagaggaagcgtgcattatcagcacttctctcccaaacaaagcagcaagaacgaaaggacgccgagactttagcagaagcaaaacgtatcatggaatctcgtgctgctagcaaaaatgttgatgtagctgtaatgcctccgaactctgataatgctatggtacctgttgatggtgtatctccttcaagcagtactcatccatctttagcacatccaaatacatcagctaacatcttgatacctaattcactacgaacgcttcgagtgtatttgagaacccatgcgcttgaccaaatggtccaagcagtaggtgcttcagctggccttagagttatcaaaagggttgatcagacactacaagagctagcggtgaatttgaagcctaaggtcccaacgaaagcagtttgcatagagcatattgaactgcggaatgagctactcacattgcttaacctacaaaagcagctgcaaaataaagaggctgaagtttcagctaaccgggaaagttccttcacagaggcaccaagcacacctaagcgttctaatagggacattgatcggcccttcatccctgatacaagtgggtttacaggtgaaagagcaggcaaacgggatcacaagcggaagtccactggaagatttatagatgcgcctccatcaccaccccagtcgaagcggcctagaaaattgaagggatctgactgatagtgctgttcaaatgtcaggatgaaaactctagtcaaacaaccaagcacttgcagtcttacagtagagatgaactagtagaacctaataggtcagcaacggcatcaatggaaatccgttgggctggccagtcatgcaggaaccgactttcgctgcttgccctgacttcgggccatatgctgggtggaccggttttggatttataatgtatctatctattattgtcatgtaatgttacacagataactgagaggtcgaaatcgtcacttttcagcagatttctgaattctgagtatgggagaccggtaagcccgacaattccgtttttgctcctgtccaaccagcacggtcaatcggttcacccaatagacgttcaacaaacaggctttgagagcacgctagtgcctgtttgttcaccatgccttcccggaagctcatctgacagctcctttactttgtttgggt

SEQ ID NO: 54259 - DNA, 1642 bp, Zea Mays
aataacctgattggttcgacgaatgcaagggatttcagcctggatcttaccggttttcataaaggtagcatggcagtggttacctttcacgtcatccgcacgaactgataaccttcaactctatcactgggttagagttgttaatggtattcagccaactggggattatcagtttgcaaaatataacaagagggcggatgttcttaaatatacggatgaagagtatgagaagtatttagttgaccctgattggagcaaggaagaaacagatcaactatttgaattatgtgaacgatttgaccttcgcttcataataatagcagataagtttccaactgctcgcagtgtggaagatctgaaaagtccttactattctgcttctcgggctcttctaattcatagagctaggtcattcgaagatgtttctgggaatccccttgtgaaggatgcctatgatgctgctcatgagactgagaggaagcgtgcattatcagcacttctctcccaaacaaagcagcaagaacgaaaggacgccgagactttagcagaagcaaaacgtatcatggaatctcgtgctgctagcaaaaatgttgatgtagctgtaatgcctccgaactctgataatgctatggtacctgttgatggtgtatctccttcaagcagtactcatccatctttagcacatccaaatacatcagctaacatcttgatacctaattcactacgaacgcttcgagtgtatttgagaacccatgcgcttgaccaaatggtccaagcagtaggtgcttcagctggccttagagttatcaaaagggttgatcagacactacaagagctagcggtgaatttgaagcctaaggtcccaacgaaagcagtttgcatagagcatattgaactgcggaatgagctactcacattgcttaacctacaaaagcagctgcaaaataaagaggctgaagtttcagctaaccgggaaagttccttcacagaggcaccaagcacacctaagcgttctaatagggacattgatcggcccttcatccctgatacaagtgggtttacaggtgaaagagcaggcaaacgggatcacaagcggaagtccactggaagatttatagatgcgcctccatcaccaccccagtcgaagcggcctagaaaattgaagggatctgactgatagtgctgttcaaatgtcaggatgaaaactctagtcaaacaaccaagcacttgcagtcttacagtagagatgaactagtagaacctaataggtcagcaacggcatcaatggaaatccgttgggctggccagtcatgcaggaaccgactttcgctgcttgccctgacttcgggccatatgctgggtggaccggttttggatttataatgtatctatctattattgtcatgtaatgttacacagataactgagaggtcgaaatcgtcacttttcagcagatttctgaattctgagtatgggagaccggtaagcccgacaattccgtttttgctcctgtccaaccagcacggtcaatcggttcacccaatagacgttcaacaaacaggctttgagagcacgctagtgcctgtttgttcaccatgccttcccggaagctcatctgacagctcctttactttgtttgggt

SEQ ID NO: 54260 - DNA, 1885 bp, Zea Mays
ctctcctccgtggatctccgcgcagtcgtggcggcagcggcgtgcgtccctgctagccaaaccctaaccctagcttcctccagtgcgccttcctcgtgaggccgtatacatggacgcgaaggacatactagggcttccgaagacccccttctcgtcctcccaggagaagaaatcgcggccgcccaaggagccgcagcgcaagcctgatggcgtctcgcgcgaggtctatgccctcaccggaggggtgggaatgcccccgctcatgccgaccattgaggcatcgcacctgaagaggcggcctgctgcggagaaagagaaggtagcatggcagtggttacctttcacgtcatccgcacgaactgataaccttcaactctatcactgggttagagttgttaatggtattcagccaactggggattatcagtttgcaaaatataacaagagggcggatgttcttaaatatacggatgaagagtatgagaagtatttagttgaccctgattggagcaaggaagaaacagatcaactatttgaattatgtgaacgatttgaccttcgcttcataataatagcagataagtttccaactgctcgcagtgtggaagatctgaaaagtccttactattctgcttctcgggctcttctaattcatagagctaggtcattcgaagatgtttctgggaatccccttgtgaaggatgcctatgatgctgctcatgagactgagaggaagcgtgcattatcagcacttctctcccaaacaaagcagcaagaacgaaaggacgccgagactttagcagaagcaaaacgtatcatggaatctcgtgctgctagcaaaaatgttgatgtagctgtaatgcctccgaactctgataatgctatggtacctgttgatggtgtatctccttcaagcagtactcatccatctttagcacatccaaatacatcagctaacatcttgatacctaattcactacgaacgcttcgagtgtatttgagaacccatgcgcttgaccaaatggtccaagcagtaggtgcttcagctggccttagagttatcaaaagggttgatcagacactacaagagctagcggtgaatttgaagcctaaggtcccaacgaaagcagtttgcatagagcatattgaactgcggaatgagctactcacattgcttaacctacaaaagcagctgcaaaataaagaggctgaagtttcagctaaccgggaaagttccttcacagaggcaccaagcacacctaagcgttctaatagggacattgatcggcccttcatccctgatacaagtgaaagagcaggcaaacgggatcacaagcggaagtccactggaagatttatagatgcgcctccatcaccaccccagtcgaagcggcctagaaaattgaagggatctgactgatagtgctgttcaaatgtcaggatgaaaactctagtcaaacaaccaagcacttgcagtcttacagtagagatgaactagtagaacctaataggtcagcaacggcatcaatggaaatccgttgggctggccagtcatgcaggaaccgactttcgctgcttgccctgacttcgggccatatgctgggtggaccggttttggatttataatgtatctatctattattgtcatgtaatgttacacagataactgagaggtcgaaatcgtcacttttcagcagatttctgaattctgagtatgggagaccggtaagcccgacaattccgtttttgctcctgtccaaccagcacggtcaatcggttcacccaatagacgttcaacaaacaggctttgagagcacgctagtgcctgtttgttcaccatgccttcccggaagctcatctgacagctcctttactttgtttgggt

SEQ ID NO: 54261 - DNA, 1761 bp, Zea Mays
atcggagcgtggtgcggcgtgccacgggcgtgcggagctctcctccgtggatctccgcgcagtcgtggcggcagcggcgtgcgtccctgcttgcgccttcctcgtgaggccgtatacatggacgcgaaggacatactagggcttccgaagacccccttctcgtcctcccaggagaagaaatcgcggccgcccaaggagccgcagcgcaagcctgatggcgtctcgcgcgaggtctatgccctcaccggaggggtgggaatgcccccgctcatgccgaccattgaggcatcgcacctgaagaggcggcctgctgcggagaaagagaaggtagcatggcagtggttacctttcacgtcatccgcacgaactgataaccttcaactctatcactgggttagagttgttaatggtattcagccaactggggattatcagtttgcaaaatataacaagagggcggatgttcttaaatatacggatgaagagtatgagaagtatttagttgaccctgattggagcaaggaagaaacagatcaactatttgaattatgtgaacgatttgaccttcgcttcataataatagcagataagtttccaactgctcgcagtgtggaagatctgaaaagtccttactattctgcttctcgggctcttctaattcatagagctaggtcattcgaagatgtttctgggaatccccttgtgaaggatgcctatgatgctgctcatgagactgagaggaagcgtgcattatcagcacttctctcccaaacaaagcagcaagaacgaaaggacgccgagactttagcagaagcaaaacgtatcatggaatctcgtgctgctagcaaacttcgagtgtatttgagaacccatgcgcttgaccaaatggtccaagcagtaggtgcttcagctggccttagagttatcaaaagggttgatcagacactacaagagctagcggtgaatttgaagcctaaggtcccaacgaaagcagtttgcatagagcatattgaactgcggaatgagctactcacattgcttaacctacaaaagcagctgcaaaataaagaggctgaagtttcagctaaccgggaaagttccttcacagaggcaccaagcacacctaagcgttctaatagggacattgatcggcccttcatccctgatacaagtgggtttacaggtgaaagagcaggcaaacgggatcacaagcggaagtccactggaagatttatagatgcgcctccatcaccaccccagtcgaagcggcctagaaaattgaagggatctgactgatagtgctgttcaaatgtcaggatgaaaactctagtcaaacaaccaagcacttgcagtcttacagtagagatgaactagtagaacctaataggtcagcaacggcatcaatggaaatccgttgggctggccagtcatgcaggaaccgactttcgctgcttgccctgacttcgggccatatgctgggtggaccggttttggatttataatgtatctatctattattgtcatgtaatgttacacagataactgagaggtcgaaatcgtcacttttcagcagatttctgaattctgagtatgggagaccggtaagcccgacaattccgtttttgctcctgtccaaccagcacggtcaatcggttcacccaatagacgttcaacaaacaggctttgagagcacgctagtgcctgtttgttcaccatgccttcccggaagctcatctgacagctcctttactttgtttgggt

SEQ ID NO: 54262 - DNA, 1928 bp, Zea Mays
aacgacttaacgtaggcgcggagatcggagcgtggtgcggcgtgccacgggcgtgcggagctctcctccgtggatctccgcgcagtcgtggcggcagcggcgtgcgtccctgcttgcgccttcctcgtgaggccgtatacatggacgcgaaggacatactagggcttccgaagacccccttctcgtcctcccaggagaagaaatcgcggccgcccaaggagccgcagcgcaagcctgatggcgtctcgcgcgaggtctatgccctcaccggaggggtgggaatgcccccgctcatgccgaccattgaggcatcgcacctgaagaggcggcctgctgcggagaaagagaaggtagcatggcagtggttacctttcacgtcatccgcacgaactgataaccttcaactctatcactgggttagagttgttaatggtattcagccaactggggattatcagtttgcaaaatataacaagagggcggatgttcttaaatatacggatgaagagtatgagaagtatttagttgaccctgattggagcaaggaagaaacagatcaactatttgaattatgtgaacgatttgaccttcgcttcataataatagcagataagtttccaactgctcgcagtgtggaagatctgaaaagtccttactattctgcttctcgggctcttctaattcatagagctaggtcattcgaagatgtttctgggaatccccttgtgaaggatgcctatgatgctgctcatgagactgagaggaagcgtgcattatcagcacttctctcccaaacaaagcagcaagaacgaaaggacgccgagactttagcagaagcaaaacgtatcatggaatctcgtgctgctagcaaaaatgttgatgtagctgtaatgcctccgaactctgataatgctatggtacctgttgatggtgtatctccttcaagcagtactcatccatctttagcacatccaaatacatcagctaacatcttgatacctaattcactacgaacgcttcgagtgtatttgagaacccatgcgcttgaccaaatggtccaagcagtaggtgcttcagctggccttagagttatcaaaagggttgatcagacactacaagagctagcggtgaatttgaagcctaaggtcccaacgaaagcagtttgcatagagcatattgaactgcggaatgagctactcacattgcttaacctacaaaagcagctgcaaaataaagaggctgaagtttcagctaaccgggaaagttccttcacagaggcaccaagcacacctaagcgttctaatagggacattgatcggcccttcatccctgatacaagtgggtttacaggtgaaagagcaggcaaacgggatcacaagcggaagtccactggaagatttatagatgcgcctccatcaccaccccagtcgaagcggcctagaaaattgaagggatctgactgatagtgctgttcaaatgtcaggatgaaaactctagtcaaacaaccaagcacttgcagtcttacagtagagatgaactagtagaacctaataggtcagcaacggcatcaatggaaatccgttgggctggccagtcatgcaggaaccgactttcgctgcttgccctgacttcgggccatatgctgggtggaccggttttggatttataatgtatctatctattattgtcatgtaatgttacacagataactgagaggtcgaaatcgtcacttttcagcagatttctgaattctgagtatgggagaccggtaagcccgacaattccgtttttgctcctgtccaaccagcacggtcaatcggttcacccaatagacgttcaacaaacaggctttgagagcacgctagtgcctgtttgttcaccatgccttcccggaagctcatctgacagctcctttactttgtttgggt

SEQ ID NO: 54263 - DNA, 1919 bp, Zea Mays
aacgacttaacgtaggcgcggagatcggagcgtggtgcggcgtgccacgggcgtgcggagctctcctccgtggatctccgcgcagtcgtggcggcagcggcgtgcgtccctgcttgcgccttcctcgtgaggccgtatacatggacgcgaaggacatactagggcttccgaagacccccttctcgtcctcccaggagaagaaatcgcggccgcccaaggagccgcagcgcaagcctgatggcgtctcgcgcgaggtctatgccctcaccggaggggtgggaatgcccccgctcatgccgaccattgaggcatcgcacctgaagaggcggcctgctgcggagaaagagaaggtagcatggcagtggttacctttcacgtcatccgcacgaactgataaccttcaactctatcactgggttagagttgttaatggtattcagccaactggggattatcagtttgcaaaatataacaagagggcggatgttcttaaatatacggatgaagagtatgagaagtatttagttgaccctgattggagcaaggaagaaacagatcaactatttgaattatgtgaacgatttgaccttcgcttcataataatagcagataagtttccaactgctcgcagtgtggaagatctgaaaagtccttactattctgcttctcgggctcttctaattcatagagctaggtcattcgaagatgtttctgggaatccccttgtgaaggatgcctatgatgctgctcatgagactgagaggaagcgtgcattatcagcacttctctcccaaacaaagcagcaagaacgaaaggacgccgagactttagcagaagcaaaacgtatcatggaatctcgtgctgctagcaaaaatgttgatgtagctgtaatgcctccgaactctgataatgctatggtacctgttgatggtgtatctccttcaagcagtactcatccatctttagcacatccaaatacatcagctaacatcttgatacctaattcactacgaacgcttcgagtgtatttgagaacccatgcgcttgaccaaatggtccaagcagtaggtgcttcagctggccttagagttatcaaaagggttgatcagacactacaagagctagcggtgaatttgaagcctaaggtcccaacgaaagcagtttgcatagagcatattgaactgcggaatgagctactcacattgcttaacctacaaaagcagctgcaaaataaagaggctgaagtttcagctaaccgggaaagttccttcacagaggcaccaagcacacctaagcgttctaatagggacattgatcggcccttcatccctgatacaagtgggtttacaggtgaaagagcaggcaaacgggatcacaagcggaagtccactggaagatttatagatgcgcctccatcaccaccccagtcgaagcggcctagaaaattgaagggatctgactgatagtgctgttcaaatgtcaggatgaaaactctagtcaaacaaccaagtcttacagtagagatgaactagtagaacctaataggtcagcaacggcatcaatggaaatccgttgggctggccagtcatgcaggaaccgactttcgctgcttgccctgacttcgggccatatgctgggtggaccggttttggatttataatgtatctatctattattgtcatgtaatgttacacagataactgagaggtcgaaatcgtcacttttcagcagatttctgaattctgagtatgggagaccggtaagcccgacaattccgtttttgctcctgtccaaccagcacggtcaatcggttcacccaatagacgttcaacaaacaggctttgagagcacgctagtgcctgtttgttcaccatgccttcccggaagctcatctgacagctcctttactttgtttgggt

SEQ ID NO: 54264 - DNA, 1388 bp, Zea Mays
aaacgacttaacgtaggcgcggagatcggagcgtggtgcggcgtgccacgggcgtgcggagctctcctccgtggatctccgcgcagtcgtggcggcagcggcgtgcgtccctgctgtgagcttcctcgcaccgtgtctgtgcctcttgttggttgcttcgtacccctacattttcttctcttagcgcgcctcttcccatgtcgcggtagggcagagccaaaccctaaccctagcttcctccagtgcgccttcctcgtgaggccgtatacatggacgcgaaggacatactagggcttccgaagacccccttctcgtcctcccaggagaagaaatcgcggccgcccaaggagccgcagcgcaagcctgatggcgtctcgcgcgaggtctatgccctcaccggaggggtgggaatgcccccgctcatgccgaccattgaggcatcgcacctgaagaggcggcctgctgcggagaaagagaaggtagcatggcagtggttacctttcacgtcatccgcacgaactgataaccttcaactctatcactgggttagagttgttaatggtattcagccaactggggattatcagtttgcaaaatataacaagagggcggatgttcttaaatatacggatgaagagtatgagaagtatttagttgaccctgattggagcaaggaagaaacagatcaactatttgaattatgtgaacgatttgaccttcgcttcataataatagcagataagtttccaactgctcgcagtgtggaagatctgaaaagtccttactattctgcttctcgggctcttctaattcatagagctaggtcattcgaagatgtttctgggaatccccttgtgaaggatgcctatgatgctgctcatgagactgagaggaagcgtgcattatcagcacttctctcccaaacaaagcagcaagaacgaaaggacgccgagactttagcagaagcaaaacgtatcatggaatctcgtgctgctagcaaaaatgttgatgtagctgtaatgcctccgaactctgataatgctatggtacctgttgatggtgtatctccttcaagcagtactcatccatctttagcacatccaaatacatcagctaacatcttgatacctaattcactacgaacgcttcgagtgtatttgagaacccatgcgcttgaccaaatggtccaagcagtaggtgcttcagctggccttagagttatcaaaagggttgatcagacactacaagagctagcggtgaatttgaagcctaaggtcccaacgaaagcagtttgcatagagcatattgaactgcggaatgagctactcacattgcttaacctacaaaagcaggttgcagaagtgttgattcccaattttgatcttttt

SEQ ID NO: 54265 - DNA, 1235 bp, Zea Mays
gcagcgatttagtcaaagtcgggtagtgaatcgtcagtttgagatgtaggttatggaaatagagcttcagtaggtatacttgtcgagtatatttaaactagttaagttagttttaagtatggttatggccgattgtggttagcaccatcgacctatatcttatgcattttgattcacaacgtggaaacatatgtctagtgtaattggactgatctgatgttgtggtgtgcttgtgcgcaatggtgaattaatcacattgtataatgatcgtcgatgggtaggtcaggtgagtagtgccttgataggtgtatatgttaaatataattaaataggttccatgtatgtgatgagtagtggtcttaaatattggtaaaatgttatgttcatacggtaataggatgaaattagtattttgtagaatgctcgagttctatttatattatgtctgattatgttggtacatacataagaattaggttgtcgtgattatgatgatgacttaatcataatattatcttgcgatacccgtcttgatatgcattcatatacataatgcatttcattaggtacgctagttgatcgcgcgcggaaggcgagccaaatcgaccccaagcgcgggctactccgcatagtgaagctgatagatgaatctaaagatagataaactgaacaagtgtcagaccaaaagctgatcgtcaagcggacgtcgtctaacaacactaacctagtgttattcaggcaagccccggtgcatttgccacctcattgttgttttaaaatctttatcaccttatatgatgcattaggtgataggagttgtgtgctaaaccgttgatgcatttccttccttgaaaattgattacccttccttgatacctgttttgaaaagaattttatgatgcttagccttgctttagcaaacaaaaatgttttgttttaaaacaaaagtgatgcttcagtgggtgggaagttttcaaaaataaaacttgatggtggatccatcatgatcgtgatgggttcaacatcggaaaatatgtacctctgccaggtaccaaactttgggtttgaaatgataaagctgagaccgggcggttgacttgcacgagaagggagtctcggtgtagtgtctccgtctcaatcgattaaggaccgtgtcgatgtgggcctgctgactgaggaccctttaactggtcacatgcctcatcatgggtaagctttgcctcgggcagactaat

SEQ ID NO: 54266 - DNA, 804 bp, Zea Mays
ccgtactccgcgagaaagaaatctagggaaatctgggtaaagaaaaagtgaaccccattcatcgcttccatggtgtgctgagaaatgctcccaccgaacatcgtcgtcaatctcacgaattcagatcgggtttaggtacgctagttgatcgcgcgcggaaggcgagccaaatcgaccccaagcgcgggctactccgcatagtgaagctgatagatgaatctaaagatagataaactgaacaagtgtcagaccaaaagctgatcgtcaagcggacgtcgtctaacaacactaacctagtgttattcaggcaagccccggtgcatttgccacctcattgttgttttaaaatctttatcaccttatatgatgcattaggtgataggagttgtgtgctaaaccgttgatgcatttccttccttgaaaattgattacccttccttgatacctgttttgaaaagaattttatgatgcttagccttgctttagcaaacaaaaatgttttgttttaaaacaaaagtgatgcttcagtgggtgggaagttttcaaaaataaaacttgatggtggatccatcatgatcgtgatgggttcaacatcggaaaatatgtacctctgccaggtaccaaactttgggtttgaaatgataaagctgagaccgggcggttgacttgcacgagaagggagtctcggtgtagtgtctccgtctcaatcgattaaggaccgtgtcgatgtgggcctgctgactgaggaccctttaactggtcacatgcctcatcatgggtaagctttgcctcgggcagactaat

SEQ ID NO: 54267 - DNA, 1573 bp, Zea Mays
taaacacagtcaccaccacctacacccccgttgtctcctctccttccattgccacagtcggccttctccgtggaagccggcgggccgccgcctcctttgtccctgtcgtcgtgctcttccgtaccgccattccctagcactgtccacgggcgaggggaatcaaagccatgtacctaaggctgtcaaatctaagagtccaaggagtggagatgaaaatcagacaaggagaaaagctcccaactcttcttttcctaaggcacccattgtccaggagtcccatggtgactctggtgtcggcagtaataaagctggcaagaatgagtctcactcatccccaattgatgcagcattgcccgatgagtccaaggagaaaaggaaaactcaaaagccaccagcacagctctcttccatcaaaagagatgaagaacagtcaaatggtgagagtgcaaagcctcgaaaagttggaagcacgccatcatatggtttcaccttcaagtgtgatgagagatctgaaaaaagacgagagttctattcgaagcttgaggagaagattcatgcaagagagttagaaataagcaatttgcaagccaagtcaaaggaaactgaagaagcagaactcaaaatgctgagaaagagtttgaatttcaaggcaacaccaatgccaagcttttataaggaaccaacccctgccaaggttgaattgaaaaagtggcagaatgtcaaagtccaagcaaaataacctactctacaaagtaaatttcaattcctctaaaaatgaatggattcaaatggcctgcaatgccgtggtggggtagtctctctcccccacccctggaccctgatccccccaaccagagctaaatcaccaaagcttggtcggtctaaaaacaagtccatatcagagactgaagaaaatactactacggaccaacctgcccgtctgagccttgacgaaaaggtttctcaaaacggtgtgaaaaaaccaaccccgtcgagttcagcaaagaagccccagagaaagtcactccccaggctgccatctgaagaaacttgtccgcttgatgccacctcaaggcagctgaagaacaacaaactggatgaagttaatgctcaggagacaggatcagctacagggcaggtacaaggaagtgagacggaaacagattctgttcagagcgcaactcaagctggagctaaccctgatgaacagagtgtcgctcagtgaacagagtgtcgctcagtgaagatctcggtggccaagccaagtgatttgtgatggatggtgtgccttatctttgtgtgatgttgtgcttgtctactagagtgacttgtggcctgtatcatgctgtgttatactcctgtttttgttttcctgcgattgagcctgtatgttgcttatcaatctagatagcttttgttcataatctacagatatatccaaattgtcctaagtcatttgcagctggtcgcaagtgcagtcaccgtaaaatcccttaacgcctgtatggttgggttttgaggttgcttttgcttcccaaaagcctaaccaaaacggctgtttttttttaaaaaa

SEQ ID NO: 54268 - DNA, 1313 bp, Zea Mays
aaacgtgtaaccacctccagcctaaacacagtcaccaccacctacacccccgttgtctcctctccttccattgccacagtcggccttctccgtggaagccggcgggccgccgcctcctttgtccctgtcgtcgtgctcttccgtaccgccattccctagcactgtccacgggcgagaaagctggcaagaatgagtctcactcatccccaattgatgcagcattgcccgatgagtccaaggagaaaaggaaaactcaaaagccaccagcacagctctcttccatcaaaagagatgaagaacagtcaaatggtgagagtgcaaagcctcgaaaagttggaagcacgccatcatatggtttcaccttcaagtgtgatgagagatctgaaaaaagacgagagttctattcgaagcttgaggagaagattcatgcaagagagttagaaataagcaatttgcaagccaagtcaaaggaaactgaagaagcagaactcaaaatgctgagaaagagtttgaatttcaaggcaacaccaatgccaagcttttataaggaaccaacccctgccaaggttgaattgaaaaagatccccccaaccagagctaaatcaccaaagcttggtcggtctaaaaacaagtccatatcagagactgaagaaaatactactacggaccaacctgcccgtctgagccttgacgaaaaggtttctcaaaacggtgtgaaaaaaccaaccccgtcgagttcagcaaagaagccccagagaaagtcactccccaggctgccatctgaagaaacttgtccgcttgatgccacctcaaggcagctgaagaacaacaaactggatgaagttaatgctcaggagacaggatcagctacagggcaggtacaaggaagtgagacggaaacagattctgttcagagcgcaactcaagctggagctaaccctgatgaacagagtgtcgctcagtgaacagagtgtcgctcagtgaagatctcggtggccaagccaagtgatttgtgatggatggtgtgccttatctttgtgtgatgttgtgcttgtctactagagtgacttgtggcctgtatcatgctgtgttatactcctgtttttgttttcctgcgattgagcctgtatgttgcttatcaatctagatagcttttgttcataatctacagatatatccaaattgtcctaagtcatttgcagctggtcgcaagtgcagtcaccgtaaaatcccttaacgcctgtatggttgggttttgaggttgcttttgcttcccaaaagcctaaccaaaacggctgtttttttttaaaaaa

SEQ ID NO: 54269 - DNA, 571 bp, Zea Mays
ctgccgccgaggtccgagcaaactgtcgtacagactgagacgcttgcgcgattagcgaacggaacggaaggaagaccgtggaagcaaaggcgcgcaggcgcaagggagcagagcacacggcacaccacaagagaacaaatacacctcaggtggccttcctaagatcgccgactgaatctacctcgcttcgcgcctccagttccgcaccgggactgccgaatctgtgctcgggatcgtctcttccagcggcaatgggggccgattctgaggacgccgtcaagcagctcagcctcctcatggagcaagtggaggccccgctgaagagatcatttcagaatatgcaccagggctatcccaaagaaacactggtgcgtttccttaaggctagagagtggaacgtaccaaaggctcataaaatgattgttgattctttggattggaggattgaaaatgaaattgatagtgtgctagagagacctatagtcccagtagatttatacagatcaatacgtgattcacaacttattggcctgtcaggatacacaaaggaggctacaactacagccaaaat

SEQ ID NO: 54270 - DNA, 583 bp, Zea Mays
ctgccgccgaggtccgagcaaactgtcgtacagactgagacgcttgcgcgattagcgaacggaacggaaggaagaccgtggaagcaaaggcgcgcaggcgcaagggagcagagcacacggcacaccacaagagaacaaatacacctcaggtggccttcctaagatcgccgactgaatctacctcgcttcgcgcctccagttccgcaccgggactgccgaatctgtgctcgggatcgtctcttccagcggcaatgggggccgattctgaggacgccgtcaagcagctcagcctcctcatggagcaagtggaggccccgctgaagagatcatttcagaatatgcaccagggctatcccaaagaaacactggtgcgtttccttaaggctagagagtggaacgtaccaaaggctcataaaatgattgttgattctttggattggaggattgaaaatgaaattgatagtgtgctagagagacctatagtcccagtagatttatacagatcaatacgtgattcacaacttattggcctgtcaggatacacaaaggagtggcaatatcgtcggctctgcccgcgcgtcag

SEQ ID NO: 54271 - DNA, 4452 bp, Zea Mays
ggcttttcaacaagcatggtataagaaatttgattggttagaatatagtgtgtccaaggatgcagcattttgtttctattgttttctcttcaaggaaccgggaagggcagaatttcatggatttgatgtattcaataaactaggatttaacaattggaagatggcatataaatcattgcctgagcatgttggtggtataaatagtggtcacaacaaatgtgttgaacaatgcgatgattttaaaaatcaaaggcaaagtatatcaagtaagctctcaagtgcaactagagaagctgaagaattatatcagacgcgtttgacttcatctctagagtgcttgaggtttcttataggacaagggatggcttttcgtgggcatgatgaatcctcgtcctctctaaataagggtaattttctagagatgatagattggtacaaagaacataatgaattagtgagacattctttcaaccgtggtggtttgaattgtcaaatgatttctccaaaaattcaaaaagatcttgcaagatgttgtgcggaagaggtcactgatgtgatcatgggagaacttggtgataagcatttctccatactaattgatgagtctcgtgatatatccgtaaaagagcaaatggcattaatgttgaggtatgtcaataatcaaggaaaggttgtggaacgatttcttgcactacaacatgtcattgataccacatccgagtcactaaaggtatctttgcttgctcttcttgacaaatacaacttatcaatttcgaagataagaggacaaggatatgatggtgcatcaaatatgagaggtgaatttaatggcttgcaaaggaaaatcttagaggaaaatccatatgctacatatgtccattgctttgcccatcaattgcaattagtggttgtctcagttgtagttgttgctcttctattcgagatttctttgattatgtctctttaattgtgaccactacaagtacatcttgtaagagaagagaagctttggtagaacatcatcatgaaagacttctgttgctacttgatagtggtgaggtaagtacaggaaggggacaactacaggaaaccaaccttactaggcctggtgatactaggtggggttcacatcaaaaaactttgctacgtatagagctaatgtgggactctgtcatagaagtgcttgggattgttgaaagggatggacgcatatcgtctgcagctggagggttgattgaaaaaatggagaattttaagtttgtcttcattttaaagcttatgggtaacttgttttctatcacaaatgatctttcacaagtcttgcaaaggaaggatataaatattatccatgccattgatttagttgatgatgtgaaatatcaattgattgccttgagggatcatggttgggaagactttcttgatgaggtcaaaaagttttgtgaagcaaaatgtgttctagtgccaaatatggatgatgagataccatgtagaagccgctcaaggcgtgaaaggcttatcatcacaaatcttcatcactaccgtgttgagcttttttatgtcacaattgatcaaatcattgctgatatgaatcatcggtttaatgaagcaactacagagatcttaacatgcttttcatgtcttgatccaaagaataatttctccaagtttgacaccgataagctcttccggcttgctgaaatttatgatgcagatttctctaatagtgatcgttctttaataaggggccaacttgagacttatatactacaagttagaaggcatgctgcttttgcatcttgtaaagatgtagcaagtttggctataaagatggttgaaacggggaagcacttggtttttccattggtatacaaattaattgagttggttttgatattgcctgtgtcaacagcatctgttgaaagatctttctcagccatgaaaattattaagtccaaattacgcaataagattggagatgagtggttcaatcatttgatggtgtgctatacggagcgtgagatattcaagggtcttgatgatgttacaatcatgcgaagattccaaaacatcaagacaagaaaaatgaatttaccttgtggtagaaattagtggatcttcttgtgtggacatttactctagtccttaatgccaccaaggaatcagcactgaccgccggcaacactactgaggaaaaggcaggctttagaaagtttatgtcaattgcttgcccacgttggaatgtgccatctagaagaaccctcactagagacactgtgtctacatactttgaagagaaagcaaagctcaaaaccttttttaagcaacaatgtgaaagagtttgtcttacaactgatgcttggacttctcaacaacaagatagttatatggctgtaacagcacattttatagattctgattggaaattgcacaagaaggttattagttttttcttagtgaagggtcataaaggtgatgatattggaaaaaacattatgaggtgtttggttgaatgggggattactaaaatcatgacaattacagttgataatgctagctctaatgattctggtgttgattatgttcgaagacaaatgaataataaaaaaaaactagcattgctatgggcaagtttcttcacatgaggtgtgctgcacatatacttaacttgattgtttctgatggattaaaagaaatggatgactcagttaaacgtgtaagggctgctgttaggtttattaagaattcaccttctaggttggcaaagtttaagaaaattgcagaggaggagaatgtacaaaccagtgcttttttgaaactagatgtttgcactaggtggaattcaacatatcttatcttacacagtgcaatcagttatgagaaagctttttgcaaaatatgaggaagatgatccaacctacactattgagttatgtggagacaaaggttatggaattccacttgaagatgattgggaaaatgcaaaaaagatggctgaatttcttggccatttttatgatatcactcttcgtgtttccactcaactaactatgacaactaattagtactttcatgagattggtgaagtgaagatgctgctacgacaatgggctgatagtgacgattatttgcgccaaacaatggctacgagaatgaaggataagtataacaagtattggggaaattggcatgacaatgagaatgacaatgagaatgcaaatgaggggaggggaaagggcaagttgaaggagaaggagaacatgaacttgctcatctttgttgccacagctcttgatccaaggtacaagctatctaattacaccaagttagcaattggggaaatgtttggtgaggaaaaaggagaaaatgtttggaatgcagtgaggcaatgtttctatgatttgtttgaagaatatagaagcatgtattctccaaatgatgattcgatggcagaagttaatgaagatcaaactcaaaaaagagggggaagaatgatgagatcgttgattgctaaaaagatgaaggttggcagtggttccatatgcattaccaaatctgaaattgacaaataccttagtgaggacaatgaagatgacaacaacaaatttgatattcttgcatggtggaaagtgaatgaatctagatttcctatattggcatgtatagctcgtgatgtgttggcaattccgatatcaacggttgcatccgaatcagtttttagtacaggtgggcggattttagatgattttagatcctctctaactccgttcatggtccaagctcttatttgtacacaagattggttgcgacgatcaactctaatcaacattgaggaagatgtggaagagctaactaaactagaagaagaattaattgcagaacataatgatgcaaaggctatggagaaagctgctaaaagtaaatccataaccaaaccaagttcagatgttatttctcatgattaaggaggtagttgtggcgatgacagctgcggagtggaggatggaagaaagagcttttggtcattctgggcatcttgcttagtccgggtccattgttcaaaagtggaaacatattttagtccaagaataataaccattgttggcactgggagagtagtagttggtctattaggaatatatgtgcgtgtcttatcagaaatgaaattttagtattttccagttatgtaaggtccaaacttcagaaaaggtacctgttttagcattgggggcataccaattggtccattatgcagtgccatagcactctggtttttcaaatcactctggatcttctggtgctcagttgtatgactgtattgtgtattcacatttttataaccaggatggactaagttgtatttgtataaccagggaaacatttgtattgtgtatttgtatgactgtattgtgtattcacatttttatatttccaggatggactaagttgtat

SEQ ID NO: 54272 - DNA, 4545 bp, Zea Mays
ggcttttcaacaagcatggtataagaaatttgattggttagaatatagtgtgtccaaggatgcagcattttgtttctattgttttctcttcaaggaaccgggaagggcagaatttcatggatttgatgtattcaataaactaggatttaacaattggaagatggcatataaatcattgcctgagcatgttggtggtataaatagtggtcacaacaaatgtgttgaacaatgcgatgattttaaaaatcaaaggcaaagtatatcaagtaagctctcaagtgcaactagagaagctgaagaattatatcagacgcgtttgacttcatctctagagtgcttgaggtttcttataggacaagggatggcttttcgtgggcatgatgaatcctcgtcctctctaaataagggtaattttctagagatgatagattggtacaaagaacataatgaattagtgagacattctttcaaccgtggtggtttgaattgtcaaatgatttctccaaaaattcaaaaagatcttgcaagatgttgtgcggaagaggtcactgatgtgatcatgggagaacttggtgataagcatttctccatactaattgatgagtctcgtgatatatccgtaaaagagcaaatggcattaatgttgaggtatgtcaataatcaaggaaaggttgtggaacgatttcttgcactacaacatgtcattgataccacatccgagtcactaaaggtatctttgcttgctcttcttgacaaatacaacttatcaatttcgaagataagaggacaaggatatgatggtgcatcaaatatgagaggtgaatttaatggcttgcaaaggaaaatcttagaggaaaatccatatgctacatatgtccattgctttgcccatcaattgcaattagtggttgtctcagttgtagttgttgctcttctattcgagatttctttgattatgtctctttaattgtgaccactacaagtacatcttgtaagagaagagaagctttggtagaacatcatcatgaaagacttctgttgctacttgatagtggtgaggtaagtacaggaaggggacaactacaggaaaccaaccttactaggcctggtgatactaggtggggttcacatcaaaaaactttgctacgtatagagctaatgtgggactctgtcatagaagtgcttgggattgttgaaagggatggacgcatatcgtctgcagctggagggttgattgaaaaaatggagaattttaagtttgtcttcattttaaagcttatgggtaacttgttttctatcacaaatgatctttcacaagtcttgcaaaggaaggatataaatattatccatgccattgatttagttgatgatgtgaaatatcaattgattgccttgagggatcatggttgggaagactttcttgatgaggtcaaaaagttttgtgaagcaaaatgtgttctagtgccaaatatggatgatgagataccatgtagaagccgctcaaggcgtgaaaggcttatcatcacaaatcttcatcactaccgtgttgagcttttttatgtcacaattgatcaaatcattgctgatatgaatcatcggtttaatgaagcaactacagagatcttaacatgcttttcatgtcttgatccaaagaataatttctccaagtttgacaccgataagctcttccggcttgctgaaatttatgatgcagatttctctaatagtgatcgttctttaataaggggccaacttgagacttatatactacaagttagaaggcatgctgcttttgcatcttgtaaagatgtagcaagtttggctataaagatggttgaaacggggaagcacttggtttttccattggtatacaaattaattgagttggttttgatattgcctgtgtcaacagcatctgttgaaagatctttctcagccatgaaaattattaagtccaaattacgcaataagattggagatgagtggttcaatcatttgatggtgtgctatacggagcgtgagatattcaagggtcttgatgatgttacaatcatgcgaagattccaaaacatcaagacaagaaaaatgaatttaccttgtggtagaaattagtggatcttcttgtgtggacatttactctagtccttaatgccaccaaggaatcagcactgaccgccggcaacactactgaggaaaaggcaggctttagaaagtttatgtcaattgcttgcccacgttggaatgtgccatctagaagaaccctcactagagacactgtgtctacatactttgaagagaaagcaaagctcaaaaccttttttaagcaacaatgtgaaagagtttgtcttacaactgatgcttggacttctcaacaacaagatagttatatggctgtaacagcacattttatagattctgattggaaattgcacaagaaggttattagttttttcttagtgaagggtcataaaggtgatgatattggaaaaaacattatgaggtgtttggttgaatgggggattactaaaatcatgacaattacagttgataatgctagctctaatgattctggtgttgattatgttcgaagacaaatgaataataaaaaaaaactagcattgctatgggcaagtttcttcacatgaggtgtgctgcacatatacttaacttgattgtttctgatggattaaaagaaatggatgactcagttaaacgtgtaagggctgctgttaggtttattaagaattcaccttctaggttggcaaagtttaagaaaattgcagaggaggagaatgtacaaaccagtgcttttttgaaactagatgtttgcactaggtggaattcaacatatcttatcttacacagtgcaatcagttatgagaaagctttttgcaaaatatgaggaagatgatccaacctacactattgagttatgtggagacaaaggttatggaattccacttgaagatgattgggaaaatgcaaaaaagatggctgaatttcttggccatttttatgatatcactcttcgtgtttccactcaactaactatgacaactaattagtactttcatgagattggtgaagtgaagatgctgctacgacaatgggctgatagtgacgattatttgcgccaaacaatggctacgagaatgaaggataagtataacaagtattggggaaattggcatgacaatgagaatgacaatgagaatgcaaatgaggggaggggaaagggcaagttgaaggagaaggagaacatgaacttgctcatctttgttgccacagctcttgatccaaggtacaagctatctaattacaccaagttagcaattggggaaatgtttggtgaggaaaaaggagaaaatgtttggaatgcagtgaggcaatgtttctatgatttgtttgaagaatatagaagcatgtattctccaaatgatgattcgatggcagaagttaatgaagatcaaactcaaaaaagagggggaagaatgatgagatcgttgattgctaaaaagatgaaggttggcagtggttccatatgcattaccaaatctgaaattgacaaataccttagtgaggacaatgaagatgacaacaacaaatttgatattcttgcatggtggaaagtgaatgaatctagatttcctatattggcatgtatagctcgtgatgtgttggcaattccgatatcaacggttgcatccgaatcagtttttagtacaggtgggcggattttagatgattttagatcctctctaactccgttcatggtccaagctcttatttgtacacaagattggttgcgacgatcaactctaatcaacattgaggaagatgtggaagagctaactaaactagaagaagaattaattgcagaacataatgatgcaaaggctatggagaaagctgctaaaagtaaatccataaccaaaccaagttcagatgttatttctcatgattaagagttgtcactgccattgcctgagtgctttcttcagcatagacatttttaagtttgactgggcacttagaaacatataatgtgaagtatttggtgaggtagttgtggcgatgacagctgcggagtggaggatggaagaaagagcttttggtcattctgggcatcttgcttagtccgggtccattgttcaaaagtggaaacatattttagtccaagaataataaccattgttggcactgggagagtagtagttggtctattaggaatatatgtgcgtgtcttatcagaaatgaaattttagtattttccagttatgtaaggtccaaacttcagaaaaggtacctgttttagcattgggggcataccaattggtccattatgcagtgccatagcactctggtttttcaaatcactctggatcttctggtgctcagttgtatgactgtattgtgtattcacatttttataaccaggatggactaagttgtatttgtataaccagggaaacatttgtattgtgtatttgtatgactgtattgtgtattcacatttttatatttccaggatggactaagttgtat

SEQ ID NO: 54273 - DNA, 2798 bp, Zea Mays
aaaagacctgtgccctagagaccggatccgcccttccaaggcgtcggtagagcgcagtgccctcactgcacctgccactgatgcgccacctcagcttcctaatacgcagggaggagtgttagacaccagtgatcccgttctctcactcgaccaggatgactagtgccgcccctcaccttggccctaagctgtttggtctcaagggcgtgctggtcatgtggtacttcaattggatctgcaatttcagcaagcagcaactattacctgacaatttgagtaaaacatccgagtgctttcatcgagctctgctttcatgatcttacactggagtaatcttcatgctggacaccttggagggtcatcacctcctcgacaatccagtcattttggttcggtccttaatgccaccaaggaatcagcactgaccgccggcaacactactgaggaaaaggcaggctttagaaagtttatgtcaattgcttgcccacgttggaatgtgccatctagaagaaccctcactagagacactgtgtctacatactttgaagagaaagcaaagctcaaaaccttttttaagcaacaatgtgaaagagtttgtcttacaactgatgcttggacttctcaacaacaagatagttatatggctgtaacagcacattttatagattctgattggaaattgcacaagaaggttattagttttttcttagtgaagggtcataaaggtgatgatattggaaaaaacattatgaggtgtttggttgaatgggggattactaaaatcatgacaattacagttgataatgctagctctaatgattctggtgttgattatgttcgaagacaaatgaataataaaaaaaaactagcattgctatgggcaagtttcttcacatgaggtgtgctgcacatatacttaacttgattgtttctgatggattaaaagaaatggatgactcagttaaacgtgtaagggctgctgttaggtttattaagaattcaccttctaggttggcaaagtttaagaaaattgcagaggaggagaatgtacaaaccagtgcttttttgaaactagatgtttgcactaggtggaattcaacatatcttatcttacacagtgcaatcagttatgagaaagctttttgcaaaatatgaggaagatgatccaacctacactattgagttatgtggagacaaaggttatggaattccacttgaagatgattgggaaaatgcaaaaaagatggctgaatttcttggccatttttatgatatcactcttcgtgtttccactcaactaactatgacaactaattagtactttcatgagattggtgaagtgaagatgctgctacgacaatgggctgatagtgacgattatttgcgccaaacaatggctacgagaatgaaggataagtataacaagtattggggaaattggcatgacaatgagaatgacaatgagaatgcaaatgaggggaggggaaagggcaagttgaaggagaaggagaacatgaacttgctcatctttgttgccacagctcttgatccaaggtacaagctatctaattacaccaagttagcaattggggaaatgtttggtgaggaaaaaggagaaaatgtttggaatgcagtgaggcaatgtttctatgatttgtttgaagaatatagaagcatgtattctccaaatgatgattcgatggcagaagttaatgaagatcaaactcaaaaaagagggggaagaatgatgagatcgttgattgctaaaaagatgaaggttggcagtggttccatatgcattaccaaatctgaaattgacaaataccttagtgaggacaatgaagatgacaacaacaaatttgatattcttgcatggtggaaagtgaatgaatctagatttcctatattggcatgtatagctcgtgatgtgttggcaattccgatatcaacggttgcatccgaatcagtttttagtacaggtgggcggattttagatgattttagatcctctctaactccgttcatggtccaagctcttatttgtacacaagattggttgcgacgatcaactctaatcaacattgaggaagatgtggaagagctaactaaactagaagaagaattaattgcagaacataatgatgcaaaggctatggagaaagctgctaaaagtaaatccataaccaaaccaagttcagatgttatttctcatgattaagagttgtcactgccattgcctgagtgctttcttcagcatagacatttttaagtttgactgggcacttagaaacatataatgtgaagtatttggtgaggtagttgtggcgatgacagctgcggagtggaggatggaagaaagagcttttggtcattctgggcatcttgcttagtccgggtccattgttcaaaagtggaaacatattttagtccaagaataataaccattgttggcactgggagagtagtagttggtctattaggaatatatgtgcgtgtcttatcagaaatgaaattttagtattttccagttatgtaaggtccaaacttcagaaaaggtacctgttttagcattgggggcataccaattggtccattatgcagtgccatagcactctggtttttcaaatcactctggatcttctggtgctcagttgtatgactgtattgtgtattcacatttttataaccaggatggactaagttgtatttgtataaccagggaaacatttgtattgtgtatttgtatgactgtattgtgtattcacatttttatatttccaggatggactaagttgtat

SEQ ID NO: 54274 - DNA, 2705 bp, Zea Mays
aaaagacctgtgccctagagaccggatccgcccttccaaggcgtcggtagagcgcagtgccctcactgcacctgccactgatgcgccacctcagcttcctaatacgcagggaggagtgttagacaccagtgatcccgttctctcactcgaccaggatgactagtgccgcccctcaccttggccctaagctgtttggtctcaagggcgtgctggtcatgtggtacttcaattggatctgcaatttcagcaagcagcaactattacctgacaatttgagtaaaacatccgagtgctttcatcgagctctgctttcatgatcttacactggagtaatcttcatgctggacaccttggagggtcatcacctcctcgacaatccagtcattttggttcggtccttaatgccaccaaggaatcagcactgaccgccggcaacactactgaggaaaaggcaggctttagaaagtttatgtcaattgcttgcccacgttggaatgtgccatctagaagaaccctcactagagacactgtgtctacatactttgaagagaaagcaaagctcaaaaccttttttaagcaacaatgtgaaagagtttgtcttacaactgatgcttggacttctcaacaacaagatagttatatggctgtaacagcacattttatagattctgattggaaattgcacaagaaggttattagttttttcttagtgaagggtcataaaggtgatgatattggaaaaaacattatgaggtgtttggttgaatgggggattactaaaatcatgacaattacagttgataatgctagctctaatgattctggtgttgattatgttcgaagacaaatgaataataaaaaaaaactagcattgctatgggcaagtttcttcacatgaggtgtgctgcacatatacttaacttgattgtttctgatggattaaaagaaatggatgactcagttaaacgtgtaagggctgctgttaggtttattaagaattcaccttctaggttggcaaagtttaagaaaattgcagaggaggagaatgtacaaaccagtgcttttttgaaactagatgtttgcactaggtggaattcaacatatcttatcttacacagtgcaatcagttatgagaaagctttttgcaaaatatgaggaagatgatccaacctacactattgagttatgtggagacaaaggttatggaattccacttgaagatgattgggaaaatgcaaaaaagatggctgaatttcttggccatttttatgatatcactcttcgtgtttccactcaactaactatgacaactaattagtactttcatgagattggtgaagtgaagatgctgctacgacaatgggctgatagtgacgattatttgcgccaaacaatggctacgagaatgaaggataagtataacaagtattggggaaattggcatgacaatgagaatgacaatgagaatgcaaatgaggggaggggaaagggcaagttgaaggagaaggagaacatgaacttgctcatctttgttgccacagctcttgatccaaggtacaagctatctaattacaccaagttagcaattggggaaatgtttggtgaggaaaaaggagaaaatgtttggaatgcagtgaggcaatgtttctatgatttgtttgaagaatatagaagcatgtattctccaaatgatgattcgatggcagaagttaatgaagatcaaactcaaaaaagagggggaagaatgatgagatcgttgattgctaaaaagatgaaggttggcagtggttccatatgcattaccaaatctgaaattgacaaataccttagtgaggacaatgaagatgacaacaacaaatttgatattcttgcatggtggaaagtgaatgaatctagatttcctatattggcatgtatagctcgtgatgtgttggcaattccgatatcaacggttgcatccgaatcagtttttagtacaggtgggcggattttagatgattttagatcctctctaactccgttcatggtccaagctcttatttgtacacaagattggttgcgacgatcaactctaatcaacattgaggaagatgtggaagagctaactaaactagaagaagaattaattgcagaacataatgatgcaaaggctatggagaaagctgctaaaagtaaatccataaccaaaccaagttcagatgttatttctcatgattaaggaggtagttgtggcgatgacagctgcggagtggaggatggaagaaagagcttttggtcattctgggcatcttgcttagtccgggtccattgttcaaaagtggaaacatattttagtccaagaataataaccattgttggcactgggagagtagtagttggtctattaggaatatatgtgcgtgtcttatcagaaatgaaattttagtattttccagttatgtaaggtccaaacttcagaaaaggtacctgttttagcattgggggcataccaattggtccattatgcagtgccatagcactctggtttttcaaatcactctggatcttctggtgctcagttgtatgactgtattgtgtattcacatttttataaccaggatggactaagttgtatttgtataaccagggaaacatttgtattgtgtatttgtatgactgtattgtgtattcacatttttatatttccaggatggactaagttgtat

SEQ ID NO: 54275 - DNA, 398 bp, Zea Mays
ctcaccttggccctaagcctgcagctgtttggtctcaagggcgtgctggtcatgtggtacttcaattggatctgcaatttcagcaagcagcaactattacctgacaatttgagtaaaacatccgagtgctttcatcgagctctgctttcatgatcttacactggagtaatcttcatgctggacaccttggagggtcatcacctcctcgacaatccagtcattttggttcgaagaaaatgaggaggttcttggttgatagaagtttattgtctgcaccacaaggtcaaagtgcaatagcaacacaaccaaacccaccacaagctcaatctagaggtggcaacgagatcaatttggatgagattgtaagcgatcctgcacttagaaaacctatacatgag

SEQ ID NO: 54276 - DNA, 532 bp, Zea Mays
cccttccaaggcgtcggtagagcgcagtgccctcactgcacctgccactgatgcgccacctcagcttcctaatacgcagggaggagtgttagacaccagtgatcccgttctctcactcgaccaggatgactagtgccgcccctcaccttggccctaagctgtttggtctcaagggcgtgctggtcatgtggtacttcaattggatctgcaatttcagcaagcagcaactattacctgacaatttgagtaaaacatccgagtgctttcatcgagctctgctttcatgatcttacactggagtaatcttcatgctggacaccttggagggtcatcacctcctcgacaatccagtcattttggttcgaagaaaatgaggaggttcttggttgatagaagtttattgtctgcaccacaaggtcaaagtgcaatagcaacacaaccaaacccaccacaagctcaatctagaggtggcaacgagatcaatttggatgagattgtaagcgatcctgcacttagaaaacctatacatgag

SEQ ID NO: 54277 - DNA, 395 bp, Zea Mays
ctccgatgcaaagacatcgtcaaggatctgcatgtaaaagtatcaggtatttcttgtacttcttcttcagcatgactgtgatggagttcatttgctctccaaaaacagtgttcccacatgatatagtaaggtgccaaagctggtgcagcagaatctgttatggggccaaataaatctgacaagccagttggagaatattcatccagtgatttgtaattttcaaacagagctgcaaggagactcttaatccgatcttcacagtctatcaaaatacttcgctgtaacaaagaacaaaacacgataactgatgtgtactactgaaacctggaattgtagaaggttctcaatttgcccagtgtattttgtggacatgatttggtaaatattttgccgag

SEQ ID NO: 54278 - DNA, 1789 bp, Zea Mays
ggaccacctgttctagttctagtgatcagaggggagggaaggggaggtgaacggagggagcggaggaagatctcgggctctcagagctgcatcctgaacccatcgcgtaggaaggggcaaaggagtcggagctgatccggcagtcgctctctctgattgagtacgatttgacgcatttgcggccgagctttcttgcacccaagatgagtgggcatggtgacactgcgacctcagctaagatggcgaaactgaaggagttgttgcaaaagagtgaaaaccacatttgtgctgactgtggtgcatctgatcccaaatgggcgtaagtatttgtgtgagcatgaataggtcaccatgtgctcaatttcagtttgcttgaactttctgtcttttctcccatttggatatcagccctggcagctggcaatgcatttgtggaagacatatgagtagaacatgtagagcaataataaatcatgcataaccttgcaatataatttggaaaatcctctgtttggttccccattcttttctttttaacataaccaggtctgtatactatgcataggcctttgcttcaaacttttgtggctggagaaacacaaataactgaggtttatctttgcagatcagctaatattggggtattcatttgcgtaaaatgttctggcgtccatagaagtctcggtacacatatttcaaaggttctgtcagtgacactggacaagtggtctgacagtgaagttgactccatgatagaagttggtgggaattctcaggcaaacgcaatatatgaggcttttataccagagggctaccagaagccacattcagattctacccaggaagagcgagaaaaattcatcaggtctaaatatgagctgcaggaatttctgaagccaagcttgcgcattgtttctcatcagcctagtgactctggaaaacatgccggaaatgcttctcattctgatggttccaagagtcaagtcggcatgatcgagttcattggaatattgaatgtcaaggtgattggaggcaccaacctagccatcagggatatgtcaagcagtgacccttatgtcgtcctgacacttgggcaacagaaagcacaaacttcagtaatcaatggcaacctgaatcctgtctggaatgaagaactgaagctctctgttccccagcaatatggacctctgaagctgcaagtgttcgatcatgacatggtgtccaaggacgacctcatgggtgaggccgagatcgacctgcagacaatgatcaacgctgccgcagcatttggcgacccggagctgctgggcgacattcagatcggccggtggctcaagtccgaggataacgctctcgtcagggacagcgccgtggtggtctctggtggcaaggtgaagcaagggatggcactgaagctgcagcacaccgagtccggcgagctggagttggagatggagtggatgccgcttaacgtgtagaaatctgctcaagttgccacctttataatgggtgtgggatacaaagaatttgttttgcttttgttgccaagagaaattgttatattttggtaattggcaagggctctcttcaaaataaagatctgaatcgctaaaaggtgtgttgtggatactaaaatttgagagatgattcacaagaaactcctttttttctaatctaaattcaaggttcaccatgcagtttataacaatcaatgtcctctcgatttgttgatatcaatgtccattacatgcaaaacgacgcaaaatagaattgtgggtttgttttgcta

SEQ ID NO: 54279 - DNA, 1626 bp, Zea Mays
ggaccacctgttctagttctagtgatcagaggggagggaaggggaggtgaacggagggagcggaggaagatctcgggctctcagagctgcatcctgaacccatcgcgtaggaaggggcaaaggagtcggagctgatccggcagtcgctctctctcgacttgcgattcgcgattcttctctgagtaattgggctgccacctgcgcttggtcccaattcacagtaaaatctacgcattgcgtggccacgttggctaggaatttggaagcaagtactctccgctttcagtaatcccaacggattgagtacgatttgacgcatttgcggccgagctttcttgcacccaagatgagtgggcatggtgacactgcgacctcagctaagatggcgaaactgaaggagttgttgcaaaagagtgaaaaccacatttgtgctgactgtggtgcatctgatcccaaatgggcatcagctaatattggggtattcatttgcgtaaaatgttctggcgtccatagaagtctcggtacacatatttcaaaggttctgtcagtgacactggacaagtggtctgacagtgaagttgactccatgatagaagttggtgggaattctcaggcaaacgcaatatatgaggcttttataccagagggctaccagaagccacattcagattctacccaggaagagcgagaaaaattcatcaggtctaaatatgagctgcaggaatttctgaagccaagcttgcgcattgtttctcatcagcctagtgactctggaaaacatgccggaaatgcttctcattctgatggttccaagagtcaagtcggcatgatcgagttcattggaatattgaatgtcaaggtgattggaggcaccaacctagccatcagggatatgtcaagcagtgacccttatgtcgtcctgacacttgggcaacagaaagcacaaacttcagtaatcaatggcaacctgaatcctgtctggaatgaagaactgaagctctctgttccccagcaatatggacctctgaagctgcaagtgttcgatcatgacatggtgtccaaggacgacctcatgggtgaggccgagatcgacctgcagacaatgatcaacgctgccgcagcatttggcgacccggagctgctgggcgacattcagatcggccggtggctcaagtccgaggataacgctctcgtcagggacagcgccgtggtggtctctggtggcaaggtgaagcaagggatggcactgaagctgcagcacaccgagtccggcgagctggagttggagatggagtggatgccgcttaacgtgtagaaatctgctcaagttgccacctttataatgggtgtgggatacaaagaatttgttttgcttttgttgccaagagaaattgttatattttggtaattggcaagggctctcttcaaaataaagatctgaatcgctaaaaggtgtgttgtggatactaaaatttgagagatgattcacaagaaactcctttttttctaatctaaattcaaggttcaccatgcagtttataacaatcaatgtcctctcgatttgttgatatcaatgtccattacatgcaaaacgacgcaaaatagaattgtgggtttgttttgcta

SEQ ID NO: 54280 - DNA, 1556 bp, Zea Mays
ggaccacctgttctagttctagtgatcagaggggagggaaggggaggtgaacggagggagcggaggaagatctcgggctctcagagctgcatcctgaacccatcgcgtaggaaggggcaaaggagtcggagctgatccggcagtcgctctctctcgtaaaatctacgcattgcgtggccacgttggctaggaatttggaagcaagtactctccgctttcagtaatcccaacggattgagtacgatttgacgcatttgcggccgagctttcttgcacccaagatgagtgggcatggtgacactgcgacctcagctaagatggcgaaactgaaggagttgttgcaaaagagtgaaaaccacatttgtgctgactgtggtgcatctgatcccaaatgggcctaatattggggtattcatttgcgtaaaatgttctggcgtccatagaagtctcggtacacatatttcaaaggttctgtcagtgacactggacaagtggtctgacagtgaagttgactccatgatagaagttggtgggaattctcaggcaaacgcaatatatgaggcttttataccagagggctaccagaagccacattcagattctacccaggaagagcgagaaaaattcatcaggtctaaatatgagctgcaggaatttctgaagccaagcttgcgcattgtttctcatcagcctagtgactctggaaaacatgccggaaatgcttctcattctgatggttccaagagtcaagtcggcatgatcgagttcattggaatattgaatgtcaaggtgattggaggcaccaacctagccatcagggatatgtcaagcagtgacccttatgtcgtcctgacacttgggcaacagaaagcacaaacttcagtaatcaatggcaacctgaatcctgtctggaatgaagaactgaagctctctgttccccagcaatatggacctctgaagctgcaagtgttcgatcatgacatggtgtccaaggacgacctcatgggtgaggccgagatcgacctgcagacaatgatcaacgctgccgcagcatttggcgacccggagctgctgggcgacattcagatcggccggtggctcaagtccgaggataacgctctcgtcagggacagcgccgtggtggtctctggtggcaaggtgaagcaagggatggcactgaagctgcagcacaccgagtccggcgagctggagttggagatggagtggatgccgcttaacgtgtagaaatctgctcaagttgccacctttataatgggtgtgggatacaaagaatttgttttgcttttgttgccaagagaaattgttatattttggtaattggcaagggctctcttcaaaataaagatctgaatcgctaaaaggtgtgttgtggatactaaaatttgagagatgattcacaagaaactcctttttttctaatctaaattcaaggttcaccatgcagtttataacaatcaatgtcctctcgatttgttgatatcaatgtccattacatgcaaaacgacgcaaaatagaattgtgggtttgttttgcta

SEQ ID NO: 54281 - DNA, 1561 bp, Zea Mays
ggaccacctgttctagttctagtgatcagaggggagggaaggggaggtgaacggagggagcggaggaagatctcgggctctcagagctgcatcctgaacccatcgcgtaggaaggggcaaaggagtcggagctgatccggcagtcgctctctctcgtaaaatctacgcattgcgtggccacgttggctaggaatttggaagcaagtactctccgctttcagtaatcccaacggattgagtacgatttgacgcatttgcggccgagctttcttgcacccaagatgagtgggcatggtgacactgcgacctcagctaagatggcgaaactgaaggagttgttgcaaaagagtgaaaaccacatttgtgctgactgtggtgcatctgatcccaaatgggcatcagctaatattggggtattcatttgcgtaaaatgttctggcgtccatagaagtctcggtacacatatttcaaaggttctgtcagtgacactggacaagtggtctgacagtgaagttgactccatgatagaagttggtgggaattctcaggcaaacgcaatatatgaggcttttataccagagggctaccagaagccacattcagattctacccaggaagagcgagaaaaattcatcaggtctaaatatgagctgcaggaatttctgaagccaagcttgcgcattgtttctcatcagcctagtgactctggaaaacatgccggaaatgcttctcattctgatggttccaagagtcaagtcggcatgatcgagttcattggaatattgaatgtcaaggtgattggaggcaccaacctagccatcagggatatgtcaagcagtgacccttatgtcgtcctgacacttgggcaacagaaagcacaaacttcagtaatcaatggcaacctgaatcctgtctggaatgaagaactgaagctctctgttccccagcaatatggacctctgaagctgcaagtgttcgatcatgacatggtgtccaaggacgacctcatgggtgaggccgagatcgacctgcagacaatgatcaacgctgccgcagcatttggcgacccggagctgctgggcgacattcagatcggccggtggctcaagtccgaggataacgctctcgtcagggacagcgccgtggtggtctctggtggcaaggtgaagcaagggatggcactgaagctgcagcacaccgagtccggcgagctggagttggagatggagtggatgccgcttaacgtgtagaaatctgctcaagttgccacctttataatgggtgtgggatacaaagaatttgttttgcttttgttgccaagagaaattgttatattttggtaattggcaagggctctcttcaaaataaagatctgaatcgctaaaaggtgtgttgtggatactaaaatttgagagatgattcacaagaaactcctttttttctaatctaaattcaaggttcaccatgcagtttataacaatcaatgtcctctcgatttgttgatatcaatgtccattacatgcaaaacgacgcaaaatagaattgtgggtttgttttgcta

SEQ ID NO: 54282 - DNA, 667 bp, Zea Mays
ctcatatttcctctcatcaatttaacccaacactacaaacctgaccatcatcgtgaaccatgtcctccaacccacaaatcattgtgcaagcactatgtgccatagctcccaaacccaataccttagaaccctctgttgatggacgaaaagaggtgcgtaccatggaaaatttagggggcagtatgccacggcggagtctacgggtgcgtccaggaaaagatggacatttaggcatcgtctcactgaaactaacagatgaagagattgctgaggacttgtatgccatgaccggtgagctaccacgcggacaccctcgtcggagactatcccaggcacaaataatgcttaataagctggttcctggagcacccttggccggtatggcaccagagacttacccgatgtgtcaaaagaagaactagctttcctcgatggtactctagttcatgctactacatgttgtgttgtctacagaacctatatttactttatatttagtattccttataaatctagttgcttacttcattacatgggtgagaaaagttgcaaagggcactaacggaaacaaaacatactatctgatgaattcgtctgcttttcatgtaccatgttttagtcgatgaaatattatttattaattagcatgtgttttggttaatttttg

SEQ ID NO: 54283 - DNA, 249 bp, Zea Mays
cttgcttccccccgttcgccgcccgagaagaaaatagtagccgcagctggtgaaatctgactcaccgtcgacctcgccattggtggtgtgccaaggagttctctggacagggtgtgggcgggcgcatccgattagcgctagagttagccgctaggacaccctgaattcttcgccggacaaaggtctccgccgtgctcggtagattgtgggcaatacaacgttaatctggaggagccaatggctgaggat

SEQ ID NO: 54284 - DNA, 2131 bp, Zea Mays
aacgttctaatcattcgttcgctcgtccacatccatcgcccccctccctctcgctcctttccccccgccttcccctcccggatccccttgggcagccggatccggcgaggcagaaggcgcggctcccacagatccgaggcgcctccgctggggactcgtccggtttcggtgggctcgaccttacaggcggggggcgtaattctgacaggacgacggagccgggtggtgcatgagcgctgagaggccccgccgccgctctgcgtaggagcacggtgcgccgccgtgaggcgccatgatcgagcagttcgttaatttcgtcatccggccgccccggtcagaatataatccagatcagtatctatgggagaaagagtttatccttgctggacgtaaatacaaacgactagacttggagcttacaaatgcaagaggctatatcttaaaatgcagccactatgttcctgcttttatcccagagaatactgccctcccatgtgtggtctattgccatggaaataggtctatccggcggggattatgtcagtttgggttggcatgagaaagaagacctcaaatgtgcggtgtcatgtcttcgggacaataaacaagtttccactataggcctttgggggcgatcaatgggtgccgttacatgcctactctatggagcagaggacccttctattggtggcatgatattggatagtgccttcactaacctgtatgacttgatgatggaacttgttgacgtttacaaaattcgagttcctaaattcacggttaagatggctgtacagtacatgcggcgaatcattcagaaaagagctaagtttgacataatggatctaaatgttttaaggttggctcccaagatgtttatccctgtactatttggacatggtctgaatgatatgtttattcagcctcaccattgtgatcgtattcaccaggcatatgggggggataaaaatataattaaatttgatggtgatcataattctccaagacctcaatcatattatgattcagtttctatattcttctacaaatctttgcatcctcctctgctgcctgcagcacgatcaaagcttcatatgggagcatttaaagttggtaacataaccaatgagaatttcttctttgaaatcatcaatggtctacggccagcaaacactgcaggttgcagttcatcaaccgatgcacctaacatcccacatgatggcacatctgtaattgaattgttgtctgatagcatgaaccaactgtccattaagaatgagaatcacttgctgcaggactttcttttagatgaaaaccacagcctgccagagattgatagtgatagtgttggatcacgattgcaggataaaagaagtaggcgcaatgaggagtcattttcattcacaagctctaacagagaaagttggggcagatgttcatctttaggagcagccagtgatgaatcattctcaggcgataataatgataagcagaatttgacagtcaaggctttggctacgcctgtaagacaaaaccagaggcaaagccagaggaaaccgattgagaaagctaagcagaagaagattcaagccctatggaagaagattaagcgcgaaaaggtggagatgggggacagcctatcttcgcgtttgaagatgtgcctagggcaatctccgcagcacaagaggaatagatcgtctggaaccattacaacttcatagctctgacaactctactgaaccactgattgtccaccatagattctcccttattctgacctactcattgccacgttgtaacctatataccctaggtgaatatatgctacatgaccgcattgtagcatgccaggatgttcgaaagctgagaaagcacttgtatcatctcttgtaattgcctgaaacaagtgtaattgccatctctggctcgttgtcgcatgcaatttcctttcccctcttgcatcctgtgggccttgtatcatctcctgtaattgcctgaaacaagtgtaagtgccatctctggttcgttgttgaatgtaatttctttctcttgcatcctgtagtttgcggcgctgcaacgcaacaacggcatggtgatgaaatggaatggtacaatgggtttgttgttttca

SEQ ID NO: 54285 - DNA, 2150 bp, Zea Mays
aacgttctaatcattcgttcgctcgtccacatccatcgcccccctccctctcgctcctttccccccgccttcccctcccggatccccttgggcagccggatccggcgaggcagaaggcgcggctcccacagatccgaggcgcctccgctggggactcgtccggtttcggtgggctcgaccttacaggcggggggcgtaattctgacaggacgacggagccgggtggtgcatgagcgctgagaggccccgccgccgctctgcgtaggagcacggtgcgccgccgtgaggcgccatgatcgagcagttcgttaatttcgtcatccggccgccccggtcagaatataatccagatcagtatctatgggagaaagagtttatccttgctggacgtaaatacaaacgactagacttggaggcaagtacggagaccatttatcgagcttacaaatgcaagaggctatatcttaaaatgcagccactatgttcctgcttttatcccagagaatactgccctcccatgtgtggtctattgccatggaaataggtctatccggcggggattatgtcagtttgggttggcatgagaaagaagacctcaaatgtgcggtgtcatgtcttcgggacaataaacaagtttccactataggcctttgggggcgatcaatgggtgccgttacatgcctactctatggagcagaggacccttctattggtggcatgatattggatagtgccttcactaacctgtatgacttgatgatggaacttgttgacgtttacaaaattcgagttcctaaattcacggttaagatggctgtacagtacatgcggcgaatcattcagaaaagagctaagtttgacataatggatctaaatgttttaaggttggctcccaagatgtttatccctgtactatttggacatggtctgaatgatatgtttattcagcctcaccattgtgatcgtattcaccaggcatatgggggggataaaaatataattaaatttgatggtgatcataattctccaagacctcaatcatattatgattcagtttctatattcttctacaaatctttgcatcctcctctgctgcctgcagcacgatcaaagcttcatatgggagcatttaaagttggtaacataaccaatgagaatttcttctttgaaatcatcaatggtctacggccagcaaacactgcaggttgcagttcatcaaccgatgcacctaacatcccacatgatggcacatctgtaattgaattgttgtctgatagcatgaaccaactgtccattaagaatgagaatcacttggactttcttttagatgaaaaccacagcctgccagagattgatagtgatagtgttggatcacgattgcaggataaaagaagtaggcgcaatgaggagtcattttcattcacaagctctaacagagaaagttggggcagatgttcatctttaggagcagccagtgatgaatcattctcaggcgataataatgataagcagaatttgacagtcaaggctttggctacgcctgtaagacaaaaccagaggcaaagccagaggaaaccgattgagaaagctaagcagaagaagattcaagccctatggaagaagattaagcgcgaaaaggtggagatgggggacagcctatcttcgcgtttgaagatgtgcctagggcaatctccgcagcacaagaggaatagatcgtctggaaccattacaacttcatagctctgacaactctactgaaccactgattgtccaccatagattctcccttattctgacctactcattgccacgttgtaacctatataccctaggtgaatatatgctacatgaccgcattgtagcatgccaggatgttcgaaagctgagaaagcacttgtatcatctcttgtaattgcctgaaacaagtgtaattgccatctctggctcgttgtcgcatgcaatttcctttcccctcttgcatcctgtgggccttgtatcatctcctgtaattgcctgaaacaagtgtaagtgccatctctggttcgttgttgaatgtaatttctttctcttgcatcctgtagtttgcggcgctgcaacgcaacaacggcatggtgatgaaatggaatggtacaatgggtttgttgttttca

SEQ ID NO: 54286 - DNA, 2221 bp, Zea Mays
aacgttctaatcattcgttcgctcgtccacatccatcgcccccctccctctcgctcctttccccccgccttcccctcccggatccccttgggcagccggatccggcgaggcagaaggcgcggctcccacagatccgaggcgcctccgctggggactcgtccggtttcggtgggctcgaccttacaggcggggggcgtaattctgacaggacgacggagccgggtggtgcatgagcgctgagaggccccgccgccgctctgcgtaggagcacggtgcgccgccgtgaggcgccatgatcgagcagttcgttaatttcgtcatccggccgccccggtcagaatataatccagatcagtatctatgggagaaagagtttatccttgctggacgtaaatacaaacgactagacttggaggcaacttacaaatgcaagaggctatatcttaaaatgcagccactatgttcctgcttttatcccagagaatactgccctcccatgtgtggtctattgccatggaaatagcggatgccgagcagatgcaaatgaagccgctgttatacttcttccttcaaatatcactgttttcacacttgacttttctgggtcaggtctatccggcggggattatgtcagtttgggttggcatgagaaagaagacctcaaatgtgcggtgtcatgtcttcgggacaataaacaagtttccactataggcctttgggggcgatcaatgggtgccgttacatgcctactctatggagcagaggacccttctattggtggcatgatattggatagtgccttcactaacctgtatgacttgatgatggaacttgttgacgtttacaaaattcgagttcctaaattcacggttaagatggctgtacagtacatgcggcgaatcattcagaaaagagctaagtttgacataatggatctaaatgttttaaggttggctcccaagatgtttatccctgtactatttggacatggtctgaatgatatgtttattcagcctcaccattgtgatcgtattcaccaggcatatgggggggataaaaatataattaaatttgatggtgatcataattctccaagacctcaatcatattatgattcagtttctatattcttctacaaatctttgcatcctcctctgctgcctgcagcacgatcaaagcttcatatgggagcatttaaagttggtaacataaccaatgagaatttcttctttgaaatcatcaatggtctacggccagcaaacactgcaggttgcagttcatcaaccgatgcacctaacatcccacatgatggcacatctgtaattgaattgttgtctgatagcatgaaccaactgtccattaagaatgagaatcacttgctgcaggactttcttttagatgaaaaccacagcctgccagagattgatagtgatagtgttggatcacgattgcaggataaaagaagtaggcgcaatgaggagtcattttcattcacaagctctaacagagaaagttggggcagatgttcatctttaggagcagccagtgatgaatcattctcaggcgataataatgataagcagaatttgacagtcaaggctttggctacgcctgtaagacaaaaccagaggcaaagccagaggaaaccgattgagaaagctaagcagaagaagattcaagccctatggaagaagattaagcgcgaaaaggtggagatgggggacagcctatcttcgcgtttgaagatgtgcctagggcaatctccgcagcacaagaggaatagatcgtctggaaccattacaacttcatagctctgacaactctactgaaccactgattgtccaccatagattctcccttattctgacctactcattgccacgttgtaacctatataccctaggtgaatatatgctacatgaccgcattgtagcatgccaggatgttcgaaagctgagaaagcacttgtatcatctcttgtaattgcctgaaacaagtgtaattgccatctctggctcgttgtcgcatgcaatttcctttcccctcttgcatcctgtgggccttgtatcatctcctgtaattgcctgaaacaagtgtaagtgccatctctggttcgttgttgaatgtaatttctttctcttgcatcctgtagtttgcggcgctgcaacgcaacaacggcatggtgatgaaatggaatggtacaatgggtttgttgttttca

SEQ ID NO: 54287 - DNA, 2213 bp, Zea Mays
aacgttctaatcattcgttcgctcgtccacatccatcgcccccctccctctcgctcctttccccccgccttcccctcccggatccccttgggcagccggatccggcgaggcagaaggcgcggctcccacagatccgaggcgcctccgctggggactcgtccggtttcggtgggctcgaccttacaggcggggggcgtaattctgacaggacgacggagccgggtggtgcatgagcgctgagaggccccgccgccgctctgcgtaggagcacggtgcgccgccgtgaggcgccatgatcgagcagttcgttaatttcgtcatccggccgccccggtcagaatataatccagatcagtatctatgggagaaagagtttatccttgctggacgtaaatacaaacgactagacttggagcttacaaatgcaagaggctatatcttaaaatgcagccactatgttcctgcttttatcccagagaatactgccctcccatgtgtggtctattgccatggaaatagcggatgccgagcagatgcaaatgaagccgctgttatacttcttccttcaaatatcactgttttcacacttgacttttctgggtcaggtctatccggcggggattatgtcagtttgggttggcatgagaagacctcaaatgtgcggtgtcatgtcttcgggacaataaacaagtttccactataggcctttgggggcgatcaatgggtgccgttacatgcctactctatggagcagaggacccttctattggtggcatgatattggatagtgccttcactaacctgtatgacttgatgatggaacttgttgacgtttacaaaattcgagttcctaaattcacggttaagatggctgtacagtacatgcggcgaatcattcagaaaagagctaagtttgacataatggatctaaatgttttaaggttggctcccaagatgtttatccctgtactatttggacatggtctgaatgatatgtttattcagcctcaccattgtgatcgtattcaccaggcatatgggggggataaaaatataattaaatttgatggtgatcataattctccaagacctcaatcatattatgattcagtttctatattcttctacaaatctttgcatcctcctctgctgcctgcagcacgatcaaagcttcatatgggagcatttaaagttggtaacataaccaatgagaatttcttctttgaaatcatcaatggtctacggccagcaaacactgcaggttgcagttcatcaaccgatgcacctaacatcccacatgatggcacatctgtaattgaattgttgtctgatagcatgaaccaactgtccattaagaatgagaatcacttgctgcaggactttcttttagatgaaaaccacagcctgccagagattgatagtgatagtgttggatcacgattgcaggataaaagaagtaggcgcaatgaggagtcattttcattcacaagctctaacagagaaagttggggcagatgttcatctttaggagcagccagtgatgaatcattctcaggcgataataatgataagcagaatttgacagtcaaggctttggctacgcctgtaagacaaaaccagaggcaaagccagaggaaaccgattgagaaagctaagcagaagaagattcaagccctatggaagaagattaagcgcgaaaaggtggagatgggggacagcctatcttcgcgtttgaagatgtgcctagggcaatctccgcagcacaagaggaatagatcgtctggaaccattacaacttcatagctctgacaactctactgaaccactgattgtccaccatagattctcccttattctgacctactcattgccacgttgtaacctatataccctaggtgaatatatgctacatgaccgcattgtagcatgccaggatgttcgaaagctgagaaagcacttgtatcatctcttgtaattgcctgaaacaagtgtaattgccatctctggctcgttgtcgcatgcaatttcctttcccctcttgcatcctgtgggccttgtatcatctcctgtaattgcctgaaacaagtgtaagtgccatctctggttcgttgttgaatgtaatttctttctcttgcatcctgtagtttgcggcgctgcaacgcaacaacggcatggtgatgaaatggaatggtacaatgggtttgttgttttca

SEQ ID NO: 54288 - DNA, 1951 bp, Zea Mays
aacgttctaatcattcgttcgctcgtccacatccatcgcccccctccctctcgctcctttccccccgccttcccctcccggatccccttgggcagccggatccggcgaggcagaaggcgcggctcccacagatccgaggcgcctccgctggggactcgtccggtttcggtgggctcgaccttacaggcggggggcgtaattctgacaggacgacggagccgggtggtgcatgagcgctgagaggccccgccgccgctctgcgtaggagcacggtgcgccgccgtgaggcgccatgatcgagcagttcgttaatttcgtcatccggccgccccggtcagaatataatccagatcagtatctatgggagaaagagtttatccttgctggacgtaaatacaaacgactagacttggagcttacaaatgcaagaggctatatcttaaaatgcagccactatgttcctgcttttatcccagagaatactgccctcccatgtgtggtctattgccatggaaataggtctatccggcggggattatgtcagtttgggttggcatgagaaagaagacctcaaatgtgcggtgtcatgtcttcgggacaataaacaagtttccactataggcctttgggggcgatcaatgggtgccgttacatgcctactctatggagcagaggacccttctattggtggcatgatattggatagtgccttcactaacctgtatgacttgatgatggaacttgttgacgtttacaaaattcgagttcctaaattcacgggggataaaaatataattaaatttgatggtgatcataattctccaagacctcaatcatattatgattcagtttctatattcttctacaaatctttgcatcctcctctgctgcctgcagcacgatcaaagcttcatatgggagcatttaaagttggtaacataaccaatgagaatttcttctttgaaatcatcaatggtctacggccagcaaacactgcaggttgcagttcatcaaccgatgcacctaacatcccacatgatggcacatctgtaattgaattgttgtctgatagcatgaaccaactgtccattaagaatgagaatcacttgctgcaggactttcttttagatgaaaaccacagcctgccagagattgatagtgatagtgttggatcacgattgcaggataaaagaagtaggcgcaatgaggagtcattttcattcacaagctctaacagagaaagttggggcagatgttcatctttaggagcagccagtgatgaatcattctcaggcgataataatgataagcagaatttgacagtcaaggctttggctacgcctgtaagacaaaaccagaggcaaagccagaggaaaccgattgagaaagctaagcagaagaagattcaagccctatggaagaagattaagcgcgaaaaggtggagatgggggacagcctatcttcgcgtttgaagatgtgcctagggcaatctccgcagcacaagaggaatagatcgtctggaaccattacaacttcatagctctgacaactctactgaaccactgattgtccaccatagattctcccttattctgacctactcattgccacgttgtaacctatataccctaggtgaatatatgctacatgaccgcattgtagcatgccaggatgttcgaaagctgagaaagcacttgtatcatctcttgtaattgcctgaaacaagtgtaattgccatctctggctcgttgtcgcatgcaatttcctttcccctcttgcatcctgtgggccttgtatcatctcctgtaattgcctgaaacaagtgtaagtgccatctctggttcgttgttgaatgtaatttctttctcttgcatcctgtagtttgcggcgctgcaacgcaacaacggcatggtgatgaaatggaatggtacaatgggtttgttgttttca

SEQ ID NO: 54289 - DNA, 2125 bp, Zea Mays
aacgttctaatcattcgttcgctcgtccacatccatcgcccccctccctctcgctcctttccccccgccttcccctcccggatccccttgggcagccggatccggcgaggcagaaggcgcggctcccacagatccgaggcgcctccgctggggactcgtccggtttcggtgggctcgaccttacaggcggggggcgtaattctgacaggacgacggagccgggtggtgcatgagcgctgagaggccccgccgccgctctgcgtaggagcacggtgcgccgccgtgaggcgccatgatcgagcagttcgttaatttcgtcatccggccgccccggtcagaatataatccagatcagtatctatgggagaaagagtttatccttgctggacgtaaatacaaacgactagacttggagcttacaaatgcaagaggctatatcttaaaatgcagccactatgttcctgcttttatcccagagaatactgccctcccatgtgtggtctattgccatggaaataggtctatccggcggggattatgtcagtttgggttggcatgagaaagaagacctcaaatgtgcggtgtcatgtcttcgggacaataaacaagtttccactataggcctttgggggcgatcaatgggtgccgttacatgcctactctatggagcagaggacccttctattggtggcatgatattggatagtgccttcactaacctgtatgacttgatgatggaacttgttgacgtttacaaaattcgagttcctaaattcacggttaagatggctgtacagtacatgcggcgaatcattcagaaaagagctaagtttgacataatggatctaaatgttttaaggttggctcccaagatgtttatccctgtactatttggacatggtctgaatgatatgtttattcagcctcaccattgtgatcgtattcaccaggcatatgggggggataaaaatataattaaatttgatggtgatcataattctccaagacctcaatcatattatgattcagtttctatattcttctacaaatctttgcatcctcctctgctgcctgcagcacgatcaaagcttcatatgggagcatttaaagttggtaacataaccaatgagaatttcttctttgaaatcatcaatggtctacggccagcaaacactgcaggttgcagttcatcaaccgatgcacctaacatcccacatgatggcacatctgtaattgaattgttgtctgatagcatgaaccaactgtccattaagaatgagaatcacttggactttcttttagatgaaaaccacagcctgccagagattgatagtgatagtgttggatcacgattgcaggataaaagaagtaggcgcaatgaggagtcattttcattcacaagctctaacagagaaagttggggcagatgttcatctttaggagcagccagtgatgaatcattctcaggcgataataatgataagcagaatttgacagtcaaggctttggctacgcctgtaagacaaaaccagaggcaaagccagaggaaaccgattgagaaagctaagcagaagaagattcaagccctatggaagaagattaagcgcgaaaaggtggagatgggggacagcctatcttcgcgtttgaagatgtgcctagggcaatctccgcagcacaagaggaatagatcgtctggaaccattacaacttcatagctctgacaactctactgaaccactgattgtccaccatagattctcccttattctgacctactcattgccacgttgtaacctatataccctaggtgaatatatgctacatgaccgcattgtagcatgccaggatgttcgaaagctgagaaagcacttgtatcatctcttgtaattgcctgaaacaagtgtaattgccatctctggctcgttgtcgcatgcaatttcctttcccctcttgcatcctgtgggccttgtatcatctcctgtaattgcctgaaacaagtgtaagtgccatctctggttcgttgttgaatgtaatttctttctcttgcatcctgtagtttgcggcgctgcaacgcaacaacggcatggtgatgaaatggaatggtacaatgggtttgttgttttca

SEQ ID NO: 54290 - DNA, 2211 bp, Zea Mays
aacgttctaatcattcgttcgctcgtccacatccatcgcccccctccctctcgctcctttccccccgccttcccctcccggatccccttgggcagccggatccggcgaggcagaaggcgcggctcccacagatccgaggcgcctccgctggggactcgtccggtttcggtgggctcgaccttacaggcggggggcgtaattctgacaggacgacggagccgggtggtgcatgagcgctgagaggccccgccgccgctctgcgtaggagcacggtgcgccgccgtgaggcgccatgatcgagcagttcgttaatttcgtcatccggccgccccggtcagaatataatccagatcagtatctatgggagaaagagtttatccttgctggacgtaaatacaaacgactagacttggagcttacaaatgcaagaggctatatcttaaaatgcagccactatgttcctgcttttatcccagagaatactgccctcccatgtgtggtctattgccatggaaatagcggatgccgagcagatgcaaatgaagccgctgttatacttcttccttcaaatatcactgttttcacacttgacttttctgggtcaggtctatccggcggggattatgtcagtttgggttggcatgagaaagaagacctcaaatgtgcggtgtcatgtcttcgggacaataaacaagtttccactataggcctttgggggcgatcaatgggtgccgttacatgcctactctatggagcagaggacccttctattggtggcatgatattggatagtgccttcactaacctgtatgacttgatgatggaacttgttgacgtttacaaaattcgagttcctaaattcacggttaagatggctgtacagtacatgcggcgaatcattcagaaaagagctaagtttgacataatggatctaaatgttttaaggttggctcccaagatgtttatccctgtactatttggacatggtctgaatgatatgtttattcagcctcaccattgtgatcgtattcaccaggcatatgggggggataaaaatataattaaatttgatggtgatcataattctccaagacctcaatcatattatgattcagtttctatattcttctacaaatctttgcatcctcctctgctgcctgcagcacgatcaaagcttcatatgggagcatttaaagttggtaacataaccaatgagaatttcttctttgaaatcatcaatggtctacggccagcaaacactgcaggttgcagttcatcaaccgatgcacctaacatcccacatgatggcacatctgtaattgaattgttgtctgatagcatgaaccaactgtccattaagaatgagaatcacttggactttcttttagatgaaaaccacagcctgccagagattgatagtgatagtgttggatcacgattgcaggataaaagaagtaggcgcaatgaggagtcattttcattcacaagctctaacagagaaagttggggcagatgttcatctttaggagcagccagtgatgaatcattctcaggcgataataatgataagcagaatttgacagtcaaggctttggctacgcctgtaagacaaaaccagaggcaaagccagaggaaaccgattgagaaagctaagcagaagaagattcaagccctatggaagaagattaagcgcgaaaaggtggagatgggggacagcctatcttcgcgtttgaagatgtgcctagggcaatctccgcagcacaagaggaatagatcgtctggaaccattacaacttcatagctctgacaactctactgaaccactgattgtccaccatagattctcccttattctgacctactcattgccacgttgtaacctatataccctaggtgaatatatgctacatgaccgcattgtagcatgccaggatgttcgaaagctgagaaagcacttgtatcatctcttgtaattgcctgaaacaagtgtaattgccatctctggctcgttgtcgcatgcaatttcctttcccctcttgcatcctgtgggccttgtatcatctcctgtaattgcctgaaacaagtgtaagtgccatctctggttcgttgttgaatgtaatttctttctcttgcatcctgtagtttgcggcgctgcaacgcaacaacggcatggtgatgaaatggaatggtacaatgggtttgttgttttca

SEQ ID NO: 54291 - DNA, 888 bp, Zea Mays
attgggagtggttggtcaaagagcatttttgcagtaaggaattcattgcaaagagcaagagaaattctagaaaccgatccaatttgacaatccttcatcacagtggcagcaaaccattcaggaaagtgatttatgacaatgtaaggatttgttaaccaatctgaacaacctaattagtttttcatactacttatcgattatgattacattatgttgtactagggcggcaaggataataatccactagctttggatgccttattttttatgactcacacaaagggtgacaattttattgattctgagtcctccagcaagcatgtaagcttatacaataatatgtgtttttgctatttgctattgtatcataatgaaagctgctaagttaagtgtttattgaattctaggcacaaattcaggaacaaatgttatcggatccttctctttccaatgcacaacttatggacaagtgcttcccttcaaaacggtaggaccatatcattggatatgatggtggagtgaaagcaagacatcttcgaagtccatctgttagtaagtctagaagctgaaacagtcggaggatgagaaacgagcaatgcttgaggagaacagagagctttgagaagaaaatcgggctacaaacagccgtgtaagccaaatggaaaaggagtgggcagagttgaagaaacaaataagtagtaattagcatagaaatcttgatttgagtagagtttgagtgatatgaatacttacaacttttataccattggataaatacgtgatactggatttattatatgtaataatcagattaccaccgacatatatacaagctacaaatggttcattggtgcatctcaatgtgaaattgaatggtcattgttgttt

SEQ ID NO: 54292 - DNA, 1397 bp, Zea Mays
agatatcgtatagagattcgtgatagaaatcgctgcacacaaaatagtggggtggctgttttttagaagagaatacaactgatgacaatgctgaatattatggtgtattaatagagataattgagcttcaatttcttggtggaagacgtgtgccattatttcattgcaagtgggttgacatattcaataaaaagagaggaataaagaaggatacatatggacttgttagtgtcaattttaagtgcctccttcgaatagatgagtcgtttgtatcagctagccaagcttctcaagtcttttttgttaaagacaatatgatcaaaggatgacacttggttgtcaaaatgcagccacgtgacacatatgatgtagccgacgtttcagatgatgaagacgttgaagatgaggatgccaatgcagaggaagacacatgatgaatgtccttcaaccacatccttgagtggaaataggaaatattgttatgaattttgtttccatatcttaggatatgaaatctgtgaccattgcatcaatatttgttttttatattgacagcttatgtatgaactagtttttatagccatttttttattgtctccttgaggtgcagccacgtgcctccttataatgcagcttatgtatgaccattgcatcaatatttttgtatcaaccacatccttgcatcaatagttgtttttatatttctatcttgccattaatctgttttcttgcttctattcatagcttaccattgttcttgttttcctatactgaactagtttatagttttgttgctttctataaaaattagggcaacatccttttaatttaattttttgtgcatttgttatctatgtaggctatagcaatgcaaagcaagtatggaaatgtgagatcccctccaaggtcacacttcatcagcccaggattgcttcgtcaacaacatgcgaaaaggtcctatccaaaccccaatataggcataggaacaaacaatgagagttcgtctagaaagcgagctatgaaagctatgggcaatgttaaccaaccaaaagtagaatatgataatttagaagatgaatgtgtgaatcttgaaagcaaaaaatggggactgaagattaatatatagggtcactggcgagcctatgtatgattcagatgatgaaagtgaacatgattctgaatatgaaaatgagtactctgaaaatgagtactctgaagatgaaaacatagtgaataacatgacagcaagggagaagaacttatatttccaaaaaaaagattcctgaataaggagagacatccaaagaagtcaaaatccatgaaccaggatgctccaacaagcagaagggattattttgaagataggagggactgtgccagagcatctaatgctgaag

SEQ ID NO: 54293 - DNA, 1125 bp, Zea Mays
acttatcttccttatcctatctccatcgccccatttcctatcctcccagccgatcccctctccctcacggcgccctctcccatggccgtcggccctccccgccatggacgccgctcttccttcctatagtacatcagcgacctcgtctccctcccttcccgtggactcctgctgcaggagctgttcctctactgcgctcgcctaagatggccggactcgcccatgatggctttcccctgtcgatgctgttctctagccgccatggcagtgcctccctgtatcagtccggtgaccgggccctccccttcccacgtcatgctggtgccatgtcttctccctcaccggccaacctcgccagccaccaggaaggtgtctccctctcggcagctcccatggccaccatcagccctagctgtgcttgccctggttccagcagctcgacgccagcccctctcaatcttccatcgctgccgctcagcttgtcccagatatattgatgttgacaattggaaatccatgtagcaaataaatgattttggaactgggggcaggtcagagtctagagcatgctcattccacacattggaggtggattttcctcaattggagatattgacaaattggaaaaaaatgtgacttgacctgtgctgcaacaaccttaaactaggaggggcttctaattcttcatctctaccaacagtcctctcctgttactttttaaaccaataactttttcaagtttgtgcagatgcacacatccttgagccaaaatagaaaaaaatcatagaagagttctttggctgtcacgtgattcaagagtattaatgatatacaaaagtttgctttatggcaagtcaggtaaccacaaattttgggcaatgatagggatgtgcagtggtggtctcttaaaagaattttgtgttccagcgtagctatttccactgcaaactatcaaatcattacaaactagtgagttggcactgctgctgcctgcgtccgtccatcaaataatgtgcatgaactggaacaagcaacttgtgcacgaaagagcattacttgaacaagcagcttgtgcatgaatgagtaatactgtagatgattggtcatattataaagaaagtacat

SEQ ID NO: 54294 - DNA, 461 bp, Zea Mays
cctactgagaggattttttgtagcgtggcgcgcgcctccctccacgccggtcggcccatccccaagaacatgttgagcgcacctggtggaagcacggggagccggagagcgcgggcccgtcgaagagacccgcgtcggcgacggtggcgaggtcgagcgcgaagtccccgatggccaccggggggagcggagcctgcggtggcgacccccgccggcggaagaccccgaagggcaggttctggatagggaagtgcgagcccgctgccacctccacgaacgaccgcagcaactgctggcccggctctgccattgctccccctcctcctccgctctctcgtggagtcgtggtcgtggcggatggtgtttggtttgttggtgtctcgatcatcttggcatactcctgcccacagccacccaggctcccagccacaggccacgacaacccgccgtgaaaactgaag

SEQ ID NO: 54295 - DNA, 845 bp, Zea Mays
ctgtagatcttctcgggcatgtctatgaggccggtttgttgcaacagtcaccgccatgcgcgcttggctccagctggtcgcctcaccaacccataaaaagaggctcgcctcacgtgctaaccctgatccccaccggagttcttgcgtcacccgattcgggccgcgctcggcaccatccctaacgatgggctccaccgccgtaagccttgagtatagccgcaccattgcttcgagcactgcgatgagatcacgagaatttgaagaccaacttggtacctgaaatctcaagtctaaggcaagttgtgcctttgatcactcttctttaactaataatgtttctgttaatcacggtgacatgctcaggttcatttgatgggacctgttgggggcattcctcttccgaaggtcctcaaaaaatgtgactagccatatgttttcagtataattatgaatagttataggaagcttcggctttggaatggagaacttctctcatgacagaacgaatggaaataaagggtgggcgacgaagctagaatccaaaagactttagctggacatgttgacgaagctcaagtatgataacgactgaagaaggataaagaccatacagtcataataattcttgttaaaatcatagatagttaccaaggacataaatgtacttttatctgggctgtgtcccgtgcctataaatagatgaacaataacaccgtactgttcacgctggattgtaatcactctcacgccatcctcattctctcaccttttggcaaaccgaaggtaccaatgtaatatgaatattattgatgtttacgaaatataagaataaatgaatcattgat

SEQ ID NO: 54296 - DNA, 3709 bp, Zea Mays
cgagcgcgcactcaagaacccaaaatcaaaccaaactcgtgcgggatttcaaaaggcatctgacaaaaacccgtcgcgttcccatccaaattcacgccgaatccccacgaaatttattattatatataacaaatgtaaacaaagaaagaaagaaacaaacaaaccgccgcacgcgctagggcgaggcgacctcgccgtctccaccccgccaccgcctgcttcacgccgcgctccctgctccgcgtcgcctttattatagtctgatgccactacgcccgccaaggcacctgccaatccctcctctttcaactcaaaatccccacaccccgggcaggcgccccgccgcgggaacagggagactactacagcaggcggggtccgggggccgagagcttctcgccgcggccgcagtcgtccgggaccgaggtggggcgccctcctgcgccggctcgtgtgcttccgccgcctcgtccacaggcttctggttcaattgaatgatcacagccacaggcatggagcggaatggcgagagccacctcaaggacccgcttctgccgacgacatctggcgcctctcctgctggggcgtctccaaggaaggagaggaagacgaggaaggtcctgttcagtgtccggggcatctcctgcgcttcttgtgccgtgtcgattgagaccgttgtggccggcttgaacggggtggagagcatccaggtctcctcacttcagggccaggccgtggttcagtacaggccagaggaaactgatgcaagaaccataaaagaagctattgaggacctcaactttgaggttgatgaacttcaagaacaagaaattgctgtgtgcagactacgcataaaaggaatggcttgtacaagctgttctgaatctgttgaacgggcgcttcaaatggtacctggagttaagaaagctgcagtgggtcttgctctagaggaagccaaggtccattacgatccaaatgtcactagtcgtgatcgcataattgaagctgttgaagatgctggatttggtgccgatctcattagttctggggatgatgtgaacaaagtgcatctaaagcttgagggtgtgaattctccagaagacaccatactcatccagtctgtactggaagctgtggaaggggtgaacaatgttgaatgggacacagttgagcagacaatagaagttgcatatgatcctgatttcactggtccaagattacttattcagtgcattcaggacactgcacagccccctaaatgctttaatgttaccttgcactcaccaccaaagcaaagagaagcagagcgcaatcatgaaattaggaattacaggaaccaatttctttggagctgcctgttttcggttcctgtattcctgttctccatggttcttcctatgctttctccttttggggattggttggagtacagaatctgcaacaacatgacaataggcatgctactacggtggttgctgtgttccccagttcagtttattgttggttggagattttatgttggagcctatcatgcactcaaacgaggatactcaaacatggatgtgctggttgctttgggaacaaatgctgcttacttctattctgtgtatattgttctgaaagcacttacatcagactcatttgaaggccaggacttctttgaaactagcgctatgttgatatcttttatattgctgggaaaatatctcgagatagtggcaaagggaaagacatcagatgcgttgtcgaaattgacagagcttgcaccagaaacagcgtgccttcttactttggacaaggacggaaatgccatttcagaaacagagatcagcactcaattacttcagagaaatgatgtcatcaagattgtgcctggcaccaaagttcctgttgacggcgttgtcataaaaggtcaaagccatgtcaatgaaagtatgataactggggaagcaaggcctattgcaaagaaaccaggcgacagggttattgggggtactgtaaatgataacggttgcataattgttaaggcgactcatgttgggtcagaaacagctttgtcgcaaatagtccagttggttgaagctgctcaacttgcaagagctccagtgcagaagttagcagacaagatttcacgtttttttgttccaactgtggtggtggctgcatttcttacatggcttggctggttcatacctgggcaacttcacctctacccccagcaatggatcccaaaggccatggatagttttgagcttgctttgcagtttggaatttctgtcctagttgtcgcatgcccatgtgctttgggacttgctacaccaactgctgttatggttgcaactggtaaaggtgcttctcaaggtgttctcattaagggtggaaatgcacttgagaaagctcataagattaaggctatcatatttgataaaactggaacgctgacagttggtaaaccttctgtcgttcaaacaaaggtcttctcaaagataccacttctagaactctgtgatctggctgctggtgctgaggcaaacagcgagcatcctctatcaaaagctatcgttgagcacacaaagaagctcaaggaacaatatggatctcacagtgatcacatgatggaatctagggactttgaggtgcatccaggagcaggtgtcagtgcccatatcgaaggcaggctggttttggttggaaacaaaaggctgatgcaggaatttgaagttccgttgagtcctgaggtggaggcgtacatgtccgaaacagaagagcttgctaggacctgcgtacttgttgctatcgataagatcatctgtggggccctcgctgtttcggatcctctgaagcctaaggcaggccaagtcatttcttaccttaagtcaatgggcatctccagtatcatggtgaccggtgataattgggctaccgcaaaatcaattgcaaaggaagttgggatcagccaggtgtttgccgagatcgacccagtgggaaaagctgaaaagatcaaagacttgcagatgcaagggttgacggtggcaatggttggcgatggggtaaacgactccccagcattggcggcggcagacgtgggcatggcgatcggtgctggcacagacgtggccatcgaggctgctgacatcgttctaatgaagagcaaccttgaggacgtcatcaccgccattgatctctcgcgcaagaccctctccaggatccggctgaactacgtgtgggccctgggctacaacgtcctgggcatgccgatcgccgccggcgtcctgttccctttcacgggcatccggctgcccccttggctcgccggggcatgcatggctgcctcgtcggtgagcgtcgtctgctcctccctgctcctccagctctacaagaaaccgctgcacgttgaagacgcgcccaggcccagggaggactcagatttggtgtgactgcgagtgaggactgatccctcgatctcgatgtgtactaacgagagcttgctggcgtcactgatgcttaacgagccaacacctgatcgatccgtgtacagcaagcaacacgttttggaacagttcgccaattgattgtgcaataattcaagacaaggtttataactttatatgatactagtacaatgacagcacataatcatagattttttttcggaaattacaagaaaacatttgctcttttgccataacatacaatcgagatagaaatg

SEQ ID NO: 54297 - DNA, 289 bp, Zea Mays
caagcaccgtgagagagagggaaatcaacgtccaccatcgacgaccttgcgcgtgcaccggtgacgagccacaatagtgagctaggggtcttcgtcggtgagcgccgcgcgcgaagaaggtcttcctaggcgaaaacggtggtcgaagtgctgggaaatgctcgccggagccaatccctcgaggcggaaccgtgctgcgatgccaacatggctcgccgtcaactctaccgacgacgaacaagtgaccgaggaccctggtactcagcaggtggaaaactccgagcaggag

SEQ ID NO: 54298 - DNA, 1635 bp, Zea Mays
tgattcagtaaatcatgtggcatctattctagtttttttggcctatgctggcactgttgaactgtagtgaatcagtgcttactactttgatctcacttgatgaaactaaacattaaagtctgttaaaaatctgctttggaaaggtctggagcaactcttatttgctggaaattctttggctccttatttaaggtgtattcacaaacagatcttgggagttgagaagactgcttcacaacaagaaataaagaaggcatatcacaaattggctctgcgcctccatccagataagaatcctggggatgaggaagccaaagagaagtttcagcagctgcagaaggttatatccattcttggagatgcagagaaaagagctttatatgatgagactggcattactgatgatgatgcactggtgggagaagctgcaaatgatcttcaggagtacttcagaacaatgtacaagaaggtcactgaggctgacattgaagaatttgaagctaaatacagagggtcagattctgagaaaacggacttgaaggaactctacacaaaatataagggcaacatgaacaggcttttctgcacaatgatttgctcagaaccaaagcttgattcccaccgcttcaaggatataatcgatggggcgattgctgaaggtgagctgaagtcaactaaggcgtatgagaaatggtctaaaaagatttcggagatggagccaccaacaaatccattagagaggagagcgaagagtaggaagaaaagtgaggagaacgatctgatcctggccatctcacagcgcagggctgagcggaaaaaccagttcaactccatcctctcgaacatcatgtccaagtgtgattccaaggcaagcagttctgagcccacagaagaggagtttgagctggcgcgacagaggctggagagcaaaatggccaagaggcgcaaatgatgcctgctgccagccttctttccctatgcgtctatgccgaacatcgtcttaagctttgggtgtgatctgattttaccagcacgcaagtgatggttgtgagagctagcttgagcgtgtcaggatctgtatcatatctcgtgtcctctgggacagtaggtcgtgtggttatcgccttgccgagagggaagctttctctgaacttcaataccatggatacgtgggtaatggctatgcagttgtagtttagtgtgtgtgtggttatatatataatgtaatcgtgccagcagctatccgattatgttctttgaagaaagctgtagtgccctccaggcctcgaggatgcaagtgttgaagggcggacaacaggcgggctgtggcttataatccagtcctcacgaggtgtaattgccattaatgtcgaggtttacaacagcatcaagtcctgcaagtaccgatgcaaataccatcaccatgtttatcatttacaagtgtaagagctttccatttgaataacgctctagagtcagagactcgccgctgttggctttttgactagagcaaaaacggtgctcaaggcaatggccatcgttgctgctgaaatcgcagaaagtgaagctggcatatgattagagatgtcaatgggaaattttccaccctttatagtatcctatcatgtttgatct

SEQ ID NO: 54299 - DNA, 1454 bp, Zea Mays
cctttttttgcttgtccggttagatagatcttgggagttgagaagactgcttcacaacaagaaataaagaaggcatatcacaaattggctctgcgcctccatccagataagaatcctggggatgaggaagccaaagagaagtttcagcagctgcagaaggttatatccattcttggagatgcagagaaaagagctttatatgatgagactggcattactgatgatgatgcactggtgggagaagctgcaaatgatcttcaggagtacttcagaacaatgtacaagaaggtcactgaggctgacattgaagaatttgaagctaaatacagagggtcagattctgagaaaacggacttgaaggaactctacacaaaatataagggcaacatgaacaggcttttctgcacaatgatttgctcagaaccaaagcttgattcccaccgcttcaaggatataatcgatggggcgattgctgaaggtgagctgaagtcaactaaggcgtatgagaaatggtctaaaaagatttcggagatggagccaccaacaaatccattagagaggagagcgaagagtaggaagaaaagtgaggagaacgatctgatcctggccatctcacagcgcagggctgagcggaaaaaccagttcaactccatcctctcgaacatcatgtccaagtgtgattccaaggcaagcagttctgagcccacagaagaggagtttgagctggcgcgacagaggctggagagcaaaatggccaagaggcgcaaatgatgcctgctgccagccttctttccctatgcgtctatgccgaacatcgtcttaagctttgggtgtgatctgattttaccagcacgcaagtgatggttgtgagagctagcttgagcgtgtcaggatctgtatcatatctcgtgtcctctgggacagtaggtcgtgtggttatcgccttgccgagagggaagctttctctgaacttcaataccatggatacgtgggtaatggctatgcagttgtagtttagtgtgtgtgtggttatatatataatgtaatcgtgccagcagctatccgattatgttctttgaagaaagctgtagtgccctccaggcctcgaggatgcaagtgttgaagggcggacaacaggcgggctgtggcttataatccagtcctcacgaggtgtaattgccattaatgtcgaggtttacaacagcatcaagtcctgcaagtaccgatgcaaataccatcaccatgtttatcatttacaagtgtaagagctttccatttgaataacgctctagagtcagagactcgccgctgttggctttttgactagagcaaaaacggtgctcaaggcaatggccatcgttgctgctgaaatcgcagaaagtgaagctggcatatgattagagatgtcaatgggaaattttccaccctttatagtatcctatcatgtttgatct

SEQ ID NO: 54300 - DNA, 582 bp, Zea Mays
cttccctctcagctcccttgctgtggatttttcccagcgcgcttctctgttggccatcactgctccctgatgcccggactcgccggtcaccggtctttagctcccacgcgcgtcgctggctcactgccgtgcgctcgccccgctcggatttcgccaaccgtcattctctaacccgtgtgccggtcagcatcgtggaattttggtttgatcggctcgttattgaccttgccggtgtcgtcgaaccccttcctcagtcgcgtcgggtctccctgcctgttgtcgtcattccgcgcgttatcaagaaatctcaagagtcggatgaagacggagccagcagcgtggtgttcaccaagtgcacgacaaaaagctcgaacgtcctgcgcgactcaagttcgattcgtcaaaattattcagtcgaagaaaagatcttcagcaattgattaccgaagaaaagaaggcccctggatgacgtcaaccggaaaccgtcatcgtacttctgactattgcgtcgaagtagtcagggtacgtgaattaaccacgtgatgcgagaaccagaactgagtagaccacaagatggtgctg

SEQ ID NO: 54301 - DNA, 1202 bp, Zea Mays
gacaggttccacacgagaaacaatggctgagacaagtggattaaattcttcatctgatctcgtggagtacatgctgcgatggtgggatccctgcatcctactccagttgccacactgccatttctcgctccacactctgctgtggtacctttctgtgaaggggtctacaaatacgccacagcttgggacgctttgagaaaagatgctgcagtattaactcaagatgtaacacttttggcagaagatgctgcacagaaaagcgggatcaccatcgaacaagtcagggataggttacggtcagtgttgtctttgactgatgtcactcgatttccagtcccaaagaacccacaggcggtcatctttgttggtgcaacggacgatggttatattcccagacattcagtgatggagctccagaaggcatggccaggctcagaggtccggtgggtaacaggtggccatgtctcctctttcttcctccacaacgatgcattccgcaaggccatcgtcgacgcccttgatagattgtaacaccagaaggtgagagagaggccatccttgtgatggcactttatgttgtgtgacatttctgaacttggggttgcggcatgagctgaaccctctgtaactgccaacctaactgctcttagtgacgctgagattggaggtagggtggctgtacatgacaattgtagaatgtagcaccccattatttggcaattgttctgcaaaatatttgtttgtcaccatgtatcaatttgaatgctacatcttctgattgtctgacatgcatgtcaatcagctaggcaatttggcagtttcagttattattccttcctagtactattttatattcatattgatactgctggatcagccactatttagtttatatactccacagttacatgggtcatcagaattcctgatcagtgatcacctctatctgtatctttgaaactatctctactttgtaacgtctatagtaaaccgtctctactttggtagggcggtgtctggctgggcctggccgcctgggtgctcgccgctcgctcatgtccttgccgggtgtgccagagttcgctgagcgcgcggaggcggtgggagtagtcggcgatggcgaggaagcaccgcgctgactgccgcgccgtcaggatctgcggcagccggtgcagcgtctgcagcctaagcgcgtccgcctg

SEQ ID NO: 54302 - DNA, 285 bp, Zea Mays
atgaattcaagtctccacacttttgtggccaccaaatttgaattccattctatgttttcctgtacaacaaataggagaaaactagacatagcaaaaagctccaagcagcacgtggatggtctcgaagctgcccttgtgcttctccctgttcttgatcactcctacacgcccggtgttcctcccgccggtcaccatgaccacattgccgacgtcaaacttgatgaagtccatgatcttgttggtctccagatcgatcttgatggtgccatttctgcaaacttttag

SEQ ID NO: 54303 - DNA, 1205 bp, Zea Mays
gaaatttggatcattccaaacgagactgtgaactctcccagctcaagcccacctccctgctcaagcccagccgtccactgcctggctccctcgtccgaagatcgatggagtgcgtggtgcagggaatcatcgagaaccagcatgtcgatgctcttgaggttctactccagggactctctggtgtcccgaaagagcgttttagggtgcatgagctctgccttaaaagtgggcccaatctaggtgttgtcccatcggaggttcgtttgttgtgtgacttagctcagcccacaccatcctggtaaccgagacaagctgctgaaagtctaccttttgttatgtttatcattaattgtgacaagattgtaggaccataagacatgttggtggtgccatgagaggtgctggtgcggagcaaatctcagttctggttcgtacagttgtggagagcaaagctagcaagaacgtcttgcactacttctacaccctagggtacaagctagaccatgaactcttgaagagcggttttgcatttcgtttccaccgaggtgcccaaatcactgtcactgttacatctgctaacaagatgtcaaggctccatgcaaccgatgaagctacgccagtcactcctgccatacagctagtggaaatcacagctcctgctgctgctgataattacaatgatgttgtttcagctgtcactgcgttctgtgaatatcttgccccgctgctgcatctgtcaaaaccaggacactcgacaggaatcgttccaacagcagccgctgctgctgcctcactcatgtcaagtggcggtggcaaaaccttgtaatgctgctaggacagccaaagtccgttcttgctgctaggacagccaaagtccgttctttgagatgagtgggcgtggctaatgaggtggccttcttcgtgccgagcatttgagcagtcagttttgcctgctagtgttgtccatgtctgacacatcgttgtgccaaccttgctcttggtttgactggttgcatgattgctgatgggtaatgccctgccttgtagttgcagggtgtaacaatctagtattaccaatattaaaatttctcaaaaatccaaaccataatttcttttctcaaaaagaagtttatctcatgtgtatatatttttcaactaggtgagtgcccgtgcgttgcgacggaagtaaaaaaattgtatgaaat

SEQ ID NO: 54304 - DNA, 1208 bp, Zea Mays
gaaatttggatcattccaaacgagactgtgaactctcccagctcaagcccacctccctgctcaagcccagccgtccactgcctggctccctcgtccgtagaagatcgatggagtgcgtggtgcagggaatcatcgagaaccagcatgtcgatgctcttgaggttctactccagggactctctggtgtcccgaaagagcgttttagggtgcatgagctctgccttaaaagtgggcccaatctaggtgttgtcccatcggaggttcgtttgttgtgtgacttagctcagcccacaccatcctggtaaccgagacaagctgctgaaagtctaccttttgttatgtttatcattaattgtgacaagattgtaggaccataagacatgttggtggtgccatgagaggtgctggtgcggagcaaatctcagttctggttcgtacagttgtggagagcaaagctagcaagaacgtcttgcactacttctacaccctagggtacaagctagaccatgaactcttgaagagcggttttgcatttcgtttccaccgaggtgcccaaatcactgtcactgttacatctgctaacaagatgtcaaggctccatgcaaccgatgaagctacgccagtcactcctgccatacagctagtggaaatcacagctcctgctgctgctgataattacaatgatgttgtttcagctgtcactgcgttctgtgaatatcttgccccgctgctgcatctgtcaaaaccaggacactcgacaggaatcgttccaacagcagccgctgctgctgcctcactcatgtcaagtggcggtggcaaaaccttgtaatgctgctaggacagccaaagtccgttcttgctgctaggacagccaaagtccgttctttgagatgagtgggcgtggctaatgaggtggccttcttcgtgccgagcatttgagcagtcagttttgcctgctagtgttgtccatgtctgacacatcgttgtgccaaccttgctcttggtttgactggttgcatgattgctgatgggtaatgccctgccttgtagttgcagggtgtaacaatctagtattaccaatattaaaatttctcaaaaatccaaaccataatttcttttctcaaaaagaagtttatctcatgtgtatatatttttcaactaggtgagtgcccgtgcgttgcgacggaagtaaaaaaattgtatgaaat

SEQ ID NO: 54305 - DNA, 657 bp, Zea Mays
ggagcagcccacaggccacaacgattctcgtcggtcgtttctgtgccctatccgtcgtcggctatcgcaacagcagcgcctcttccctgtcgccctgactcctccctagcagcagaaaaccggcggcaagtcttcggtggcggcgaggccaaggctttgcctgagagaatgcaagacccaagggatgatgatttcttggcgccaaagttgcataagaagaaggttgtctaccggccgcagccatcaggccatctgaagggtgaacctgaactgttgcggagagagtttccgcaatcatcaggcatggtccaaaagccacccaaaagaagcttgaagggtgagcctcgcacgcccccttccgacagggggaccccggattccctgccggaatctggtcctaccgacgaataccgtgcgttaaggaggaagtacctgatgctggaggaagagaactttgcactggacaaagaactgagcatggaagatgaagaaatgaaggccctagaggatgaaaagcttgcactgcttgatcagcttgttgtcttggaaggccttgtcgagccatcccagttgcagtctcaacctaggccgtaagggttgacaacttcttagtccgtttgtgtaaagtaagaagaatttagttgcgaaggtagttct

SEQ ID NO: 54306 - DNA, 900 bp, Zea Mays
cacccctctaaatttttgagccgccactctcttcctccttctccctcgcgcaggtctgctccagccgactccctgtcttcttcccgacagcggccagcagggagctcggccagcagccatggcgtcctcccctacttccccatggaagtcggctccatctccatgctccctccctagccgagcacctccagcagctatggttgagcttcttttcccccctgatgttcctttgcgcgcacgagctccctgggccgacctcgacgagctccatgtccatgggcgacgcagcagctccatttcctccatggccatggcgcccccctgctcttccctgccagcggccaggaaacgcccaggaccagcaccctactctgcccagcgcccccttctgcacggcgttcggcagcagggagttttttttcttccctgcgcgtaggagctcattgggagcacgccgacgcccctgctcgccccctccatccttttcccttagtgcggcagcgaggagcccctgctcggtcaggtgccatggcgtccaacttttctgcgcagcagtgccggttcaaaaaaaatagcagcctcggatcccctccgcaccgcgtgcttcgctcgatctgcgcagtcccgacccacgccgtcacgttggtgtttgagacagccccgtgccgcgtcgtcgatctacgcagcgcttgcgagccatcggaaaaaatctttgcatctcgcgtgatgcatgattcggtgaagcacctaaaccatggacgcatgcgcgactcgaatccatgatgccaggttgatggatttataatttactattgatgtgattcggttgatggcatgcatatagatatggtgtatattggtgttgaatatgtgtgactatgatagttcatttacgtgtcg

SEQ ID NO: 54307 - DNA, 916 bp, Zea Mays
cacccctctaaatttttgagccgccactctcttcctccttctccctcgcgcaggtctgctccagccgactccctgtcttcttcccgacagcggccagcagggagctcggccagcagccatggcgtcctcccctacttccccatggaagtcggctccatctccatgctccctccctagccgagcacctccagcagctatggttgagcttcttttcccccctgatgttcctttgcgcgcacgagctccctgggccgacctcgacgagctccatgtccatgggcgacgcagcagctccatttcctccatggccatggcgcccccctgctcttccctgccagcggccaggaaacgcccaggaccagcaccctactctgcccagcgcccccttctgcacggcgttcggcagcagggagttttttttcttccctgcgcgtaggagctcattgggagcacgccgacgcccctgctcgccccctccatccttttcccttagtgcggcagcgaggagcccctgctcggtcaggtgccatggcgtccaacttttctgcgcagcagtgccggttcaaaaaaaatagcagcctcggatcccctccgcaccgcgtgcttcgctcgatctgcgcagtcccgacccacgccgtcacgttggtgtttgagacagccccgtgccgcgtcgtcgatctacgcagcgcttgcgagccatcggaaaaaatctttgctagatgttgtcgcagcatctcgcgtgatgcatgattcggtgaagcacctaaaccatggacgcatgcgcgactcgaatccatgatgccaggttgatggatttataatttactattgatgtgattcggttgatggcatgcatatagatatggtgtatattggtgttgaatatgtgtgactatgatagttcatttacgtgtcg

SEQ ID NO: 54308 - DNA, 1254 bp, Zea Mays
ctcatttctggtcctcatcttgtggtcgactcatttctggtcctccgcatcacgtgattaattatcgtacctaaatgatttgcataatgcacatgaatgcacataaacaggaatatcataaacgtaaataatgctacacgacagcgaattaaacacctagcagcgagacgttgtacaagttcgtacggaaatactagttatcgatatacgactacgcgtaataattacgcttctctagattaactgaatctaacgcaaacatcacgaaacagcaaaccaaacacactaagtgcaacactcacgttcctgctttctaatcggatctaattccgaaattaatcaagaataaattatttaacccacactatcattcttagtaaaatatattttagaagtctaataaaacctagactcactattattaaatgtcaacgacttatcgatgtcgtttgcttcctaaatattttgtgtaacaacaattatctatttatgacacttaaccaatcaacaaacgtagaacacgacagctactaaagcaagtctttagtgcatccataaccttggcacaaataattctagtcgaataagtcgactagatgatagaaacactagacctatgtagtcatggttaacttacgtatccacttagacacttctcacatgatccacatcttaaccctagattttatgtgtgacgactacttcatactctagaacataatcacctcaataaatgaactgaggtaattcaatagacacattacgcaatagtcatttcatcagatgagtatgcatacttaatgtttctgcgtaccacgtaacattacatgagataaggcgtctttataaacacctaatatacaattcgcatcatggacttaacttaatcactcaaagtgtctaatcgagaattttaagcacattgcaaacattgaatgcattctagctaaactagtcctacgtatccaccatctatgctactaatcaggatagcaaaagagctcatcccacaaaatcaggctgtggaaatgacgacgactctgattcaatttgtacgtggagtacctgatgtgcaatgtgctgaaaccctttttttatcacaaacatcctaggtgcctcaccttcacaacatcagacacatacgcatagatcatcagtacatatcgcatcaggtgtggaaacgagcatagaaatggaggggactgaacctgttgtaggaatggcagagggagacatcggcgaggagcgatagat

SEQ ID NO: 54309 - DNA, 1927 bp, Zea Mays
gtcaatttatcctcattatattatcatggaaaaatataaaacaatattgaattacaaatgtacctttggtttgacagaagataaaagtacaagcgtgacacacgagcaagtacaagtcagcgtgaacagtacggtggtactgttcatctatttataagcacaggacgcagcctgtgagaaattacagtcatgccctttacatttactattgacttatagaaaaacctatgaggactagatatccttttcccctttaagtcggttcctttttctgcgattgagccgaagctcccttgcgcgtagcttcggagcaacgacaaccttcgtcacgatcatgctcttctcatcgtgtatgcttttaacctgagtccgaaggtacctgtccataaaccatgcttggaagacattgttaaattatgtttttgaggaccttcagaggacgaaggcccccaacatcacaatccaccccgttagaagaccaacgtcctcgtcggtcaaccccaatccaggaacctcccctcttagccacgtctatgtctagtgtcgtcatatgccatgccatgtgaccactccgggctcacatgcaccatgcgccatatacccgaaccccctagcccacacacacccgtgaaacctcgagggtcggctctgataccacttgtaacaccccgtccaatccctggaccgacgatacttactcctcgtagctctctaggatcatatatcatccccacagaccaacacgagtcttttgtgcgcactttgtcctcactcatgcgcacccgagaaaacttcccagtcggtcactcatcccaaattgctccaagccaagcacgcttaacttggaagttcttttgagataggcttccgaaaaagaagatgcatcttattggtatggatactgcattgagtaagaagtggaatgaggtgacagtcaaaagatattgattgaaataatgtttgacaccatgtatgaatagctaggtattcatctagtctaaaggattacactaaaacttgaaaagttaaaacttgtttttagactcagctagtgcttttggcaaaccaaacccctcagccaaacagctgcatggtctagaggtagaggagtagactcctcacaccgggtaagtctagctgagtattagtatactcacccttgcttgtggcacaattttacaggtactctgaaggatatggttgctggagtgacttggttgtccaccttgccaccgggttggacagttgagtgggaccctacctcagcgggagaggagcatgaggagtgatatgccaggcttccccatcctccctttctttactgttagttaatttccgctgcatcgagaaaaatggttactacttttgcaaaactccgatgatgatgtaataacattaagtacttctttaatttatgattttatgctttattgtattttctttgtgcctcatcttcgagtgagtatgtggtacttgatcctgttagtggctttatcggactagatccgaggaactaacggtttattccgatttaagtgcggccttgcctctaaggcgggacttgggcacttaagttggaataattcggacgtttccgccacaacagccggcatcaggtacacttgctattcacattacagaaatttttcttgttgattcttatattaattcttgggtatttgataccggatctacggcagaacctcccaagttattgggcccacatgcacctgtcattgtctcaaagacctcagacggctatgcatgtgcaccaaataacttaacaggatccgtccgagtgtcccaaggaccccggataaaccactcacaaccaggaccgcaagattaagtaaacacaaatcacatacaccaacattttgcagcggaaatcttattaccaaattttacaagttacatcaagtttaca

SEQ ID NO: 54310 - DNA, 1029 bp, Zea Mays
agaagagtggtggtggtctctgaaatctcaatctgcctcgctctccatctccatctatcgaccatccgaggtgcagggcagcagaaatggtgagcctgagggagatggctcggtccgatgcggagcgtgccccaccagcgtggctgcgtgcgctgctagagaccaggttcttcgatgcatgcccagagcaccaagccaacgacgccggccgcgctaacaggaaaagaaccagcggctgcaacttcctgtgcactcactgtgccgaccgggccctctgctctggctgcctcggcaaccatgaaggtcatggacttatccagatccggaggtcgtcaggcaacaacgttgtgaaggtcgatgatgttcagaatcggctgagcgtgtcactggtgcagacctacgtctacaacggagactatgctgtgttcctgaacaggcgacccatgtcgggtcacggaaagcatggcgcgtctcactgtgagcagtgcggaaggggactccaggatgaggactgccgcttctgctcactcgagtgcaaggctaaaggaatagaggaccgtcttgatttcagcgtgtcattcgctgtcgatccaaacaacttcagcagctctggagatgacactgaatcagacgacgatgaagactcatcctacccatccaagtttcaaaagctggaaactataccagcatcatctagcaagccagttgcctctggaggacagcactctataggtaaaaagcaatattgagatcaatgccaagatctacactatcttggcaaatggaggatcactaggtcgtcatcctacagtggtgatcctacagataatgcttgcaaacagtatccatggacaatgccattcgcatatgcatgaactaatctcgaaacttggaatgtttagacatggttcaaaacatggtttgtgggatgttttacttttaacttccttgagtttgatagtttgattgttcttgtgtcatacatccaattcgtgtcttgatattttgttgctaatctttctttggaat

SEQ ID NO: 54311 - DNA, 2135 bp, Zea Mays
aaactaaaccctatttctcaaaccctagattcggatccgccatcaacaggctccgccatcaacaggctcgaacgccctctcctcaaaccctaccagatcttgtcgttcggcgcctcaaaccccagattcggatccgccatcaccatagaggtgggggcagacggcatagcgctcatcaccatcgccaacctgcccgtggtggatgcgccatcgcctgaggcgagccgcggggaaatgagggatccttggaggcagagctggcgtcgcgtcgccggtggacgctggtgctggtgaacatggcgtcggtgctggaaaagatagacgagatgttgctgctcgccgtgtacaagaaggtgtgcacgtcgctgggcgcttctcgacggcgctgggctcccaaaccctttgtcgcgcgctcgttcaagccgcctactacctactcaaagcctacgcctccacgcgccatgatcgggcccgtgtcgtcgctgtcggagccttcacctgggccaccatcgccttcctcgtcgccatctccggcagcttcctctaggaaggccatctggtatttcgaaggaatctatgcgtactcccctcagataccaggtgttcgtttcccaggattaacccatcctggtatagtgggaactgcaccgtcagccaaacttcttaatgtatggaatgagagggagaaaagattggccgagacaagcccacagacccttaaactgtttgaagtgctacaccagaggccccttgccaatttaccgacccctgagaactgcttacttggaaagattcaggaggggactgctggatggcacaaagtggcgaatgaagcagccaagactattccgggaagggagaatggtggtaattgtgacataaaaaacctaagcagaggttccaaagtttatctgccagtatttgtcgaaggagcgaatcttagcaccggtgatatgcacttctctcagggcgatggtgaagtttcgttttgtggagcaattgaaatgagtggattccttgagctcaagagaatcaggaggatcagctcctcacgagaatcaggatctggagctaaagaagcaggagttggagctttgtcaaacgggcccttactcaccaactaaggctatccaagttttctataattgtccctgaccaaatatacttggatcaaattctagagggctccaaactggacaacttgctgaatttcagtttcagctaactgaaccaacttcagttaaagccaacctgacagtccactttgagtagctgttactccaacttttgtataggatcatgtccaccaccctttaagtaagttgttcaccaatatatggtctttgattcctctacaagcaccatagtctaaaaccttatagaacagccacaaatgagctccaaaacagccatcaacactgaattccagatccagctactattcagaatctgaaaattcagaaacacagcagcaccacttggaaccattctttttcctgggttccaaatgtttctagggaaagttgcttaataaagtttatactcctatagttcctctacaggttttacatagtgactcatagataaaccctcatagattccaaactacagaggtccaaagtttgcccaaattactgaaattcagactctgaatttcactaagtctgaaatccacactttcagacagctctactttaggccagcttttctctaggttccaagtagccttagggctaagtatcttaatcaaacttatactcctaatttagatctataattgtgttataatcatcataacctataaccctatggatagagcaatagagagctccaaagttacaccaaaacactgaaattcaggatttgcatttagactaagtctgaaatctgacagccctaaattggaccactttttcagccagttgcatatagtttttgggctggtacacttaataaggattgttctccaacagtcactttacaagtttgttatagtaactctttaccaaaagtccatagataaaaagttataagggtccaaaaacagctatatgaaactgttttcagcccaattcaaactgaacccaatctgaaattttgcaaattactccaaatttctccacacaacttggaat

SEQ ID NO: 54312 - DNA, 2374 bp, Zea Mays
gcttatctctctgctcgctcatctctctggtgtccatccccagcccaccgagctccctccatcttgctccccatggccgagcgccctcccgtcctccaactcgccagcgcttggcttcctgcttgccaagtccatctccctccctagcgctgtcccacctcctgctcctccacggcgctcagttccagctcgccggctgtgcaactcgcccatggcgcccatctctctggccgcgacctccctgctcctcctttccccagccgcggtcttccctgctctagcccagccgagctcgtccctgcgcgcgtgttctcctgcgtccagccgagcgcgcgaaacttctctgctcacggcactccctgtctgctcggccatggtgaaaccctccttaccatggatgccggagttcctctgctcgttctcatggccgccgtcgagcttccggcgcgcgcccatctcctctgctcccccgcgcgcgtcctgggactctccatcgcgccgatctgtgcccggccgtggccgtcgaactcgcccagctcggatttttgcttggtcgcccgccgtttaccagtaccgtggtctcgctcggacgcgtactgtcaagattgttcctgcacgcacgccctggtacccctgctcgctgttgggccgaccgtcagcagcttcccggcctccgtcgtgctcagcagcgagtaatttatgtcggagcagttactgagacgccctcctttgcgtcgtgctcgccagatcaagcctcgcgtcgtcgatttgcgcagttcatgttcggcaatcggtttagtctccgtcgaacttctatttaccgtgacgccgagctccttcaacactgccccactccgttgtcgttattccgtcgcctcacttcgatgtcagttccttcatgacatctcctacttgtgttcgcgccgacaaaaggatcctaagagaatgtggaaaaacaagccccaagttgatgcctcaaatactcgacgaaaagcctgaactataaattatcgtggttcttgcagagttcgcgtcgaatttaattttggatgagctgatttgctactactattattttgttttaatgaatagattgatagatatgtaggttgcgatgattttttttatttagtataggtacgcttagtaattatggctagctccgttgttgtgtccgtgtgctgttacgtgacaatataattgtttttagaataatgaagtagttgagtcagagattgaggtttaaattttagatgcataattatgcaaaatatagaggtagacatggatgcgatgtatgatctagttaatgacgagacagataagtttaatattttaatcagctagctagcaggaatttgcaatgtatttattcctattttaattatttgagggagtcaatattctatatcaataatattctatatcaataattagtataatcggtctatgtttatgatcggtaaatgttgtaatcaattaatgtgctatacaaatgaatatggaaaatagtttagaaaactagttaagttagttttaagtatgattatggtcgattgtggttagcatcgtcgacatgtatcttatatatcttaatttacaaaatggaaacatatgtctagtgtaatcgaattgatctgatgcttgtgattacttgcgttcaatggtgaattaatcacattgtataatgatcgtcaattggtaggtgatgtgaatggtgcctcgatgcatgttttgatataggacttgtgtttagtttattatcacttgatttttgaagtagatgcgatcacgctagaaaagtgtgataattgggcatagtcgtatatcagtaactagtgtttccgtataaaattctacaacgcctcgccgctaggtgtttaattcgctatcgcgtagcactatttaggtttgtgatattcctgtctatatgtgtcacacccggtttttagaaggcaaaccgaatgcgaaccatgtacgtgccaggatcagcaattcacgtacacagcagttacataacatggacatcatcacacagtgcttgttgggaccatgcttcgtcgccgaaggtcctgcagaaacaaacaccttcgacaaatctgtttagacgtgataccgaagctaccgctcatgaagcttcgatactataacgtatccaaagacgaaggattgaaccgacataaagatggaatgactttttagtcccataagggtctgagtcataattgtaatcttctgtaaggggcatgattataatttcttacaggctgcgtcctgtgcctataaatagatgaacaatactcctttactgttcacgcaatctggtaactgctaacgcatcactctggaattattgttttctgccaaggcgaag

SEQ ID NO: 54313 - DNA, 514 bp, Zea Mays
gtcgggtaagtcttgctgagtaattgcgtactcagggttttatcccttgttgtttttgtaggagaagttttattcccttatctttaggttagttacttcatatggagaacttgaagcttagaaggtttttatatatcttttatggaaaggcttcacccttccaattattgtgataagttatgcacttcgagtactatcaggacttgtaataaatacatctctttctaccatgtaaaacttgagttctggaatgtaaagtgtactttgtaaaagtcttccgctctatctccaatgtgtgtgtatcaaatgtgattactgtaatatacctgttatgtgggagatccttgggacgatgagttccagttggcgaactcgatagccttgttaagttatccggtacacgtgcacagccatctgaggccattaaggcaaggattggtgcatgtgggcctgataacttgggagggctgtcacagtaagcctcacttaggagcttcttcgccttttactttca

SEQ ID NO: 54314 - DNA, 542 bp, Zea Mays
agaacacctagaagaagtgatgtttgaagaaggagttcacttcagtgcctgttgatctagtggtggagtttcatctaactacttaccagagtagaataattttgggattttctcctgcaataaggcaagccccggtgcatttgccaccttccttgtgtttacaaaattttatcacttatatgctgcattaggtgataggagttgattgattaaacaattgatgcattgccatccttgaaagattgattaccataccttgtcacctgttttataaaagctagagatgcttagtcatgctgatagactaagaaaaatgtttttcatctatgactcatgtttttacaaaaagaaaatgggcttgggataatgaaggcatcaagacgttgataaattcattatccaggcatggcccctctgtcaggcgccaaaattttgaaatagtttaaaatgggaccagacgctgagcaggaaaggtcgcccgtctgtgtcgattaaggaccgtaccgattgttggcctgatgatctaggaccttttaactagc

SEQ ID NO: 54315 - DNA, 1969 bp, Zea Mays
atggcatctccaattgcaaatgcaacttctgagactggtgagtacgtgacccgtagaacgatccagaccaaaagccacagaagtcagctgatccaggatggaagtacggattttagccagatcttcaaatcaaagaaaaggtggaatgcaccctgtgtggtcaagttgttagtggagggataaaagaggttgaagcaacatttggcaggggcaaggctagcagtggattaaggagatgacaagttatttggaggcaaacaagaggaaagaccaatgtttctagataaagattaagtggtggaagtggcagcagcagatgaagagaatgatgcatctgttgcggtggagtctcaagcatccaaggtgcagcctaaagcccagttctggtatagcagccaaaagaaagacagtcaaccttgcaattcaaggcaagtagtaaagcacaaccaaggacaaacaagtatgtagttgagatgttgcggaaaacaccagaagaggtggtggataagagattttcagtctcttatcagcccacaatcatggctagtgcaaaaggtaaggaggacatgcagtgggctttgttcttttatgagtgcggtgtacctttcaatgctacagcagctcagcaatttcagattgcaattgaggccacatcacagtttggttcagggtataagcctccaacactttaccaactaggagagccattgcttcaaggggttgtaaagtcaacaaatacagtgagggaggaacatgagtgtgtatggaaacactatggctgcaaactcatgtctgatggatgatctgataggaggggacgccatctgattaacttattagtgaacattccggagggcacttactttttagaatccattgatacatcaagtgaagtacatgatgcatacatgcttgctgatttgctagagaaaaaagttaacgatattgggagagacaatgtggtacaagttgttactgataatggtgtcaattacaagactgcaggcaagcttctaatggagaggatttttatattatcttggagtccatgtgttacacattccttggatctaatgttgggggacataggaaacttgaaggaattcaagaaagcaattgcgcgtgcaaggcgtgtgacaactttcatagagtaatgggagaatccttgctaccatgagagagaaaattggtggggcagatcttgtgagacccgttgacactcgttttgctactttctcacattaaagagcttgtacaagtacaaggatgctttgaagtctttatttggaagtgctgtttggactgataacagattggcaaagactagtgcgggaatggatgtatataacattgtcttctccaatctccacacaattttggaattcagtagaagattgccttagagcttcaggatcactacttattgtacttagggtggtagatggatataagaggtccactaaggagcaaaaagagtttctcaaaagcatcatggctataattgaacgacattgggagaaacaaatggatcacccactgtatggggctgcaatgtatttgaacccaggaaagttgcatcctctcataagaaatgatgatgatgctactgttgggcagctaagaggttgctttcttgatgtgcttgcaaaaatggtagatgatgaagaaacaagagacaagatcaattctcaagcaatggattgagtatcttagaggtgcagctttttcaaataagatagccaaagataaccttcaaactataaccccatatgtgaacgcaattggagtagctttgtatttgtaagttactatgtgtgtctcctcaagtcctcatccacctacttggctacttttgtaaccaatatttcaggaattagtaactaggtgttttctgattttgtagatccatacaacaacgacaataaagcctttttgtcccaagcacgttggggtaggctagagatgaaac

SEQ ID NO: 54316 - DNA, 1778 bp, Zea Mays
agtttaaggaggtttctagaagcaacgggtttcataactgaccatgagagggcattggaagaactttttagtgaaaatgcagaaggatctcacaagtataatgcttgtctgaacacaatggctactcgtatatccacagtatttgcatcaatgagggaattccctcgtgtacactaccgtattgccaagacgattgatgcttctacaatgacaacactacgagacttagtccccacaaagcttgctgccagtgtatggaattgtcttgcgaaatataaaacgacaatacctgaatttcctcaaacagaaacttgtgagctacttatagtagaccgttcaatagatcagattgcaccaattattcatgaatggacttatgatgctatgtgtcatgatctgctttgtatggatggcaacaagtatgttcatgaggttccaactaaaaatgggtcggcaactgaaaaaaaggaggtcctgttggaggatcatgaccctgtctggcttgagcttaggcatgcacatatagcagatgcaagtgagaggctacatgataagatgaccaacttcatttcaaagaacaaagctgcacaattgcatcaagcacgaaccgatggagaattatcgacaagagatttacaaaaaatggttcaggctcttccacagtacagtgatcaaattgataagctttccctgcatgttgagattgcaggaaaactcaataacataataagggaacaatgtcttcgggatgttggacagctagagcaagatcttgtgtttggcgatgctggaaccaaagaactaatcaactttttgagaacacaattggttgtaagtcgtgaaaataaattacgcttgctgatgatttatgcagcacttaacccagagaagtttgaaagcgacaagggtgcaaaattaatgcagttggcaggattatctgctgatgacatgattgctgtaaataatatgcgttgcttatgtgggcctgataccaaaaagtcttcagtagggggttttacactgaaatttgatgttcacaagaagaaacacacaaatcgaaaagagcgaacaggggaagaatcaacatgggcactctctcgattttaccctattttggagcaattgattgaaaatcttagcaaaggtgagctgccaaaagatgaatataactgtatgaatgaccctagtcctactgttcatggactgccaaccagtagctctgcccgaacaagccccgctcactcaatgcgatccagacgaacaggtggcacatgggcaagacctcgtggctctgatgatggatattcaagtgattctgtgttgaagcatgcctccagtgacttcaggaaacttggtcagcgtatatttgtttttgtaataggcggtgctactcgatcagagttacgtgctgcacacaagctttcatccaagctgaagcgagacatcatccttggttcatctagccttgatgatcctccccagttcatcacaaaattaaagttgatgtcagtagaagaattgacacttgatgaccttcagctgtaaatggtgtccgcccacacggagtgtaaccttttattttctctgttctgtcagctcttatttgtgggggcctgtcatattcattcggtgaaatgcattcttaataccacttttactggtgaatgtaagaaaaaaactgttatgcaattaatcttttcatgcaattattgtgcaaccaaaataccagaagtcatgagaagttctcaaaattttattgatgaattttatttactcaa

SEQ ID NO: 54317 - DNA, 2455 bp, Zea Mays
aaaaaaaaaaaaacagcatcagggcggtagcgtaatttccctggccggttgcggccgacgacctcttcgagagaacgaacgattcttcctcccgtttgcttcccctgcccgcactctgcctcgtcaatctcgctccgcgtcccgcttccgctgttgctttcgtcgccatctcgctccggtccccgccgctgctccaagtgggagccaagtcatctctctggccgaagatccaggttgagtcggcgtcgccggcagaggcaagagactccggcgcgatgtcgttggactcggaggcttcctcgcagggtttattatttgaaatgctcagatcaactaggaagaattcgaaatcaacatggaaggttcttatcatggataagtttacagtcaagattatgtcatatgcatgtaagatggcagatattacagaagaaggtgtttcattggtcgaagatttatataaacggaggcaaccattgccttcactggatgccatatatttcatccaaccaactaaagagaacattgtcatgttcctatccgacatgtcaggaagaagccctttgtacaagaaggcatatgtgtttttcagttctcccgtacataaagaattagttgctcaaataaaaaaggattcaagtgtactacctcgtattgccgcacttagtgagatgaatttggagtactttgctattgattcccagggtttcataactgaccatgagagggcattggaagaactttttagtgaaaatgcagaaggatctcacaagtataatgcttgtctgaacacaatggctactcgtatatccacagtatttgcatcaatgagggaattccctcgtgtacactaccgtattgccaagacgattgatgcttctacaatgacaacactacgagacttagtccccacaaagcttgctgccagtgtatggaattgtcttgcgaaatataaaacgacaatacctgaatttcctcaaacagaaacttgtgagctacttatagtagaccgttcaatagatcagattgcaccaattattcatgaatggacttatgatgctatgtgtcatgatctgctttgtatggatggcaacaagtatgttcatgaggttccaactaaaaatgggtcggcaactgaaaaaaaggaggtcctgttggaggatcatgaccctgtctggcttgagcttaggcatgcacatatagcagatgcaagtgagaggctacatgataagatgaccaacttcatttcaaagaacaaagctgcacaattgcatcaagcacgaaccgatggagaattatcgacaagagatttacaaaaaatggttcaggctcttccacagtacagtgatcaaattgataagctttccctgcatgttgagattgcaggaaaactcaataacataataagggaacaatgtcttcgggatgttggacagctagagcaagatcttgtgtttggcgatgctggaaccaaagaactaatcaactttttgagaacacaattggttgtaagtcgtgaaaataaattacgcttgctgatgatttatgcagcacttaacccagagaagtttgaaagcgacaagggtgcaaaattaatgcagttggcaggattatctgctgatgacatgattgctgtaaataatatgcgttgcttatgtgggcctgataccaaaaagtcttcagtagggggttttacactgaaatttgatgttcacaagaagaaacacacaaatcgaaaagagcgaacaggggaagaatcaacatgggcactctctcgattttaccctattttggagcaattgattgaaaatcttagcaaaggtgagctgccaaaagatgaatataactgtatgaatgaccctagtcctactgttcatggactgccaaccagtagctctgcccgaacaagccccgctcactcaatgcgatccagacgaacaggtggcacatgggcaagacctcgtggctctgatgatggatattcaagtgattctgtgttgaagcatgcctccagtgacttcaggaaacttggtcagcgtatatttgtttttgtaataggcggtgctactcgatcagagttacgtgctgcacacaagctttcatccaagctgaagcgagacatcatccttggttcatctagccttgatgatcctccccagttcatcacaaaattaaagttgatgtcagtagaagaattgacacttgatgaccttcagctgtaaatggtgtccgcccacacggagtgtaaccttttattttctctgttctgtcagctcttatttgtgggggcctgtcatattcattcggtgaaatgcattcttaataccacttttactggtgaatgtaagaaaaaaactgttatgcaattaatcttttcatgcaattattgtgcaaccaaaataccagaagtcatgagaagttctcaaaattttattgatgaattttatttactcaa

SEQ ID NO: 54318 - DNA, 2409 bp, Zea Mays
aaaaaaaaaaaaacagcatcagggcggtagcgtaatttccctggccggttgcggccgacgacctcttcgagagaacgaacgattcttcctcccgtttgcttcccctgcccgcactctgcctcgtcaatctcgctccgcgtcccgcttccgctgttgctttcgtcgccatctcgctccggtccccgccgctgctccaagtgggagccaagtcatctctctggccgaagatccaggttgagtcggcgtcgccggcagaggcaagagactccggcgcgatgtcgttggactcggaggcttcctcgcagggtttattatttgaaatgctcagatcaactaggaagaattcgaaatcaacatggaaggttcttatcatggataagtttacagtcaagattatgtcatatgcatgtaagatggcagatattacagaagaaggtgtttcattggtcgaagatttatataaacggaggcaaccattgccttcactggatgccatatatttcatccaaccaactaaagagaacattgtcatgttcctatccgacatgtcaggaagaagccctttgtacaagaaggcatatgtgtttttcagttctcccgtacataaagaattagttgctcaaataaaaaaggattcaagtgtactacctcgtattgccgcacttagtgagatgaatttggagtactttgctattgattcccagggtttcataactgaccatgagagggcattggaagaactttttagtgaaaatgcagaaggatctcacaagtataatgcttgtctgaacacaatggctactcgtatatccacagtatttgcatcaatgagggaattccctcgtgtacactaccgtattgccaagacgattgatgcttctacaatgacaacactacgagacttagtccccacaaagcttgctgccagtgtatggaattgtcttgcgaaatataaaacgacaatacctgaatttcctcaaacagaaacttgtgagctacttatagtagaccgttcaatagatcagattgcaccaattattcatgaatggacttatgatgctatgtgtcatgatctgctttgtatggatggcaacaagtatgttcatgaggttccaactaaaaatgggtcggcaactgaaaaaaaggaggtcctgttggaggatcatgaccctgtctggcttgagcttaggcatgcacatatagcagatgcaagtgagaggctacatgataagatgaccaacttcatttcaaagaacaaagctgcacaattgcatcaagcacgaaccgatggagaattatcgacaagagatttacaaaaaatggttcaggctcttccacagtacagtgatcaaattgataagctttccctgcatgttgagattgcaggaaaactcaataacataataagggaacaatgtcttcgggatgttggacagctagagcaagatcttgtgtttggcgatgctggaaccaaagaactaatcaactttttgagaacacaattgcacttaacccagagaagtttgaaagcgacaagggtgcaaaattaatgcagttggcaggattatctgctgatgacatgattgctgtaaataatatgcgttgcttatgtgggcctgataccaaaaagtcttcagtagggggttttacactgaaatttgatgttcacaagaagaaacacacaaatcgaaaagagcgaacaggggaagaatcaacatgggcactctctcgattttaccctattttggagcaattgattgaaaatcttagcaaaggtgagctgccaaaagatgaatataactgtatgaatgaccctagtcctactgttcatggactgccaaccagtagctctgcccgaacaagccccgctcactcaatgcgatccagacgaacaggtggcacatgggcaagacctcgtggctctgatgatggatattcaagtgattctgtgttgaagcatgcctccagtgacttcaggaaacttggtcagcgtatatttgtttttgtaataggcggtgctactcgatcagagttacgtgctgcacacaagctttcatccaagctgaagcgagacatcatccttggttcatctagccttgatgatcctccccagttcatcacaaaattaaagttgatgtcagtagaagaattgacacttgatgaccttcagctgtaaatggtgtccgcccacacggagtgtaaccttttattttctctgttctgtcagctcttatttgtgggggcctgtcatattcattcggtgaaatgcattcttaataccacttttactggtgaatgtaagaaaaaaactgttatgcaattaatcttttcatgcaattattgtgcaaccaaaataccagaagtcatgagaagttctcaaaattttattgatgaattttatttactcaa

SEQ ID NO: 54319 - DNA, 2448 bp, Zea Mays
aaaaaaaaaaaaacagcatcagggcggtagcgtaatttccctggccggttgcggccgacgacctcttcgagagaacgaacgattcttcctcccgtttgcttcccctgcccgcactctgcctcgtcaatctcgctccgcgtcccgcttccgctgttgctttcgtcgccatctcgctccggtccccgccgctgctccaagtgggagccaagtcatctctctggccgaagatccaggttgagtcggcgtcgccggcagaggcaagagactccggcgcgatgtcgttggactcggaggcttcctcgcagggtggggactaccgtagcttccgccagatcacgcgagatcgtttattatttgaaatgctcagatcaactaggaagaattcgaaatcaacatggaaggttcttatcatggataagtttacagtcaagattatgtcatatgcatgtaagatggcagatattacagaagaaggtgtttcattggtcgaagatttatataaacggaggcaaccattgccttcactggatgccatatatttcatccaaccaactaaagagaacattgtcatgttcctatccgacatgtcaggaagaagccctttgtacaagaaggcatatgtgtttttcagttctcccgtacataaagaattagttgctcaaataaaaaaggattcaagtgtactacctcgtattgccgcacttagtgagatgaatttggagtactttgctattgattcccagggtttcataactgaccatgagagggcattggaagaactttttagtgaaaatgcagaaggatctcacaagtataatgcttgtctgaacacaatggctactcgtatatccacagtatttgcatcaatgagggaattccctcgtgtacactaccgtattgccaagacgattgatgcttctacaatgacaacactacgagacttagtccccacaaagcttgctgccagtgtatggaattgtcttgcgaaatataaaacgacaatacctgaatttcctcaaacagaaacttgtgagctacttatagtagaccgttcaatagatcagattgcaccaattattcatgaatggacttatgatgctatgtgtcatgatctgctttgtatggatggcaacaagtatgttcatgaggttccaactaaaaatgggtcggcaactgaaaaaaaggaggtcctgttggaggatcatgaccctgtctggcttgagcttaggcatgcacatatagcagatgcaagtgagaggctacatgataagatgaccaacttcatttcaaagaacaaagctgcacaattgcatcaagcacgaaccgatggagaattatcgacaagagatttacaaaaaatggttcaggctcttccacagtacagtgatcaaattgataagctttccctgcatgttgagattgcaggaaaactcaataacataataagggaacaatgtcttcgggatgttggacagctagagcaagatcttgtgtttggcgatgctggaaccaaagaactaatcaactttttgagaacacaattgcacttaacccagagaagtttgaaagcgacaagggtgcaaaattaatgcagttggcaggattatctgctgatgacatgattgctgtaaataatatgcgttgcttatgtgggcctgataccaaaaagtcttcagtagggggttttacactgaaatttgatgttcacaagaagaaacacacaaatcgaaaagagcgaacaggggaagaatcaacatgggcactctctcgattttaccctattttggagcaattgattgaaaatcttagcaaaggtgagctgccaaaagatgaatataactgtatgaatgaccctagtcctactgttcatggactgccaaccagtagctctgcccgaacaagccccgctcactcaatgcgatccagacgaacaggtggcacatgggcaagacctcgtggctctgatgatggatattcaagtgattctgtgttgaagcatgcctccagtgacttcaggaaacttggtcagcgtatatttgtttttgtaataggcggtgctactcgatcagagttacgtgctgcacacaagctttcatccaagctgaagcgagacatcatccttggttcatctagccttgatgatcctccccagttcatcacaaaattaaagttgatgtcagtagaagaattgacacttgatgaccttcagctgtaaatggtgtccgcccacacggagtgtaaccttttattttctctgttctgtcagctcttatttgtgggggcctgtcatattcattcggtgaaatgcattcttaataccacttttactggtgaatgtaagaaaaaaactgttatgcaattaatcttttcatgcaattattgtgcaaccaaaataccagaagtcatgagaagttctcaaaattttattgatgaattttatttactcaa

SEQ ID NO: 54320 - DNA, 2487 bp, Zea Mays
aaaaaaaaaaaaacagcatcagggcggtagcgtaatttccctggccggttgcggccgacgacctcttcgagagaacgaacgattcttcctcccgtttgcttcccctgcccgcactctgcctcgtcaatctcgctccgcgtcccgcttccgctgttgctttcgtcgccatctcgctccggtccccgccgctgctccaagtgggagccaagtcatctctctggccgaagatccaggttgagtcggcgtcgccggcagaggcaagagactccggcgcgatgtcgttggactcggaggcttcctcgcagggtggggactaccgtagcttccgccagatcacgcgagatcgtttattatttgaaatgctcagatcaactaggaagaattcgaaatcaacatggaaggttcttatcatggataagtttacagtcaagattatgtcatatgcatgtaagatggcagatattacagaagaaggtgtttcattggtcgaagatttatataaacggaggcaaccattgccttcactggatgccatatatttcatccaaccaactaaagagaacattgtcatgttcctatccgacatgtcaggaagaagccctttgtacaagaaggcatatgtgtttttcagttctcccgtacataaagaattagttgctcaaataaaaaaggattcaagtgtactacctcgtattgccgcacttagtgagatgaatttggagtactttgctattgattcccagggtttcataactgaccatgagagggcattggaagaactttttagtgaaaatgcagaaggatctcacaagtataatgcttgtctgaacacaatggctactcgtatatccacagtatttgcatcaatgagggaattccctcgtgtacactaccgtattgccaagacgattgatgcttctacaatgacaacactacgagacttagtccccacaaagcttgctgccagtgtatggaattgtcttgcgaaatataaaacgacaatacctgaatttcctcaaacagaaacttgtgagctacttatagtagaccgttcaatagatcagattgcaccaattattcatgaatggacttatgatgctatgtgtcatgatctgctttgtatggatggcaacaagtatgttcatgaggttccaactaaaaatgggtcggcaactgaaaaaaaggaggtcctgttggaggatcatgaccctgtctggcttgagcttaggcatgcacatatagcagatgcaagtgagaggctacatgataagatgaccaacttcatttcaaagaacaaagctgcacaattgcatcaagcacgaaccgatggagaattatcgacaagagatttacaaaaaatggttcaggctcttccacagtacagtgatcaaattgataagctttccctgcatgttgagattgcaggaaaactcaataacataataagggaacaatgtcttcgggatgttggacagctagagcaagatcttgtgtttggcgatgctggaaccaaagaactaatcaactttttgagaacacaattggttgtaagtcgtgaaaataaattacgcttgctgatgatttatgcagcacttaacccagagaagtttgaaagcgacaagggtgcaaaattaatgcaggattatctgctgatgacatgattgctgtaaataatatgcgttgcttatgtgggcctgataccaaaaagtcttcagtagggggttttacactgaaatttgatgttcacaagaagaaacacacaaatcgaaaagagcgaacaggggaagaatcaacatgggcactctctcgattttaccctattttggagcaattgattgaaaatcttagcaaaggtgagctgccaaaagatgaatataactgtatgaatgaccctagtcctactgttcatggactgccaaccagtagctctgcccgaacaagccccgctcactcaatgcgatccagacgaacaggtggcacatgggcaagacctcgtggctctgatgatggatattcaagtgattctgtgttgaagcatgcctccagtgacttcaggaaacttggtcagcgtatatttgtttttgtaataggcggtgctactcgatcagagttacgtgctgcacacaagctttcatccaagctgaagcgagacatcatccttggttcatctagccttgatgatcctccccagttcatcacaaaattaaagttgatgtcagtagaagaattgacacttgatgaccttcagctgtaaatggtgtccgcccacacggagtgtaaccttttattttctctgttctgtcagctcttatttgtgggggcctgtcatattcattcggtgaaatgcattcttaataccacttttactggtgaatgtaagaaaaaaactgttatgcaattaatcttttcatgcaattattgtgcaaccaaaataccagaagtcatgagaagttctcaaaattttattgatgaattttatttactcaa

SEQ ID NO: 54321 - DNA, 747 bp, Zea Mays
gacaattgaaagaaaaaagaaatagtttaaggaggtttctagaagcaacgggtttcataactgaccatgagagggcattggaagaactttttagtgaaaatgcagaaggatctcacaagtataatgcttgtctgaacacaatggctactcgtatatccacagtatttgcatcaatgagggaattccctcgtgtacactaccgtattgccaagacgattgatgcttctacaatgacaacactacgagacttagtccccacaaagcttgctgccagtgtatggaattgtcttgcgaaatataaaacgacaatacctgaatttcctcaaacagaaacttgtgagctacttatagtagaccgttcaatagatcagattgcaccaattattcatgaatggacttatgatgctatgtgtcatgatctgctttgtatggatggcaacaagtatgttcatgaggttccaactaaaaatgggtcggcaactgaaaaaaaggaggtcctgttggaggatcatgaccctgtctggcttgagcttaggcatgcacatatagcagatgcaagtgagaggctacatgataagatgaccaacttcatttcaaagaacaaagctgcacaattgcatcaagcacgaaccgatggagaattatcgacaagagatttacaaaaaatggttcaggctcttccacagtacagtgatcaaattgataagctttccctgcatgttgaggacctgctcgcctgggatccgc

SEQ ID NO: 54322 - DNA, 549 bp, Zea Mays
atgcggttcgctcaccttcctggacgcgcgcgacggcgtcccagaagaagccgaacgccgatacgtcatgcttgccccccgcggacgcctttctcgtactgcggcggcggcacctgcaccggcggcagcgcgacattcacagaagcaggcggcgggggcggggtgaacaccaccgcaggcgccacggcccggctctcgtggttccgcggagagggagaaagggagggcgacggggctgccctctgcgggatgggtgtggagatatccgagcgcggggactcgagcggcggcgtgcgcccagcgccccggggcgtgctagcgggggatggcggcgtgatgaagatggtgaggttcccggcccgcccaatcatgggcagtggcagcggcggtggtggcggtggcgaggacgaggaccccatcgcggcggctggtaccgtctgcgggagcgcggcgtttagttgcctagggaggagagcgaaatgggcagggcagggggggcgctcgtgggaaatgccccagacgccattgcaattccatacaaggcagtag

SEQ ID NO: 54323 - DNA, 219 bp, Zea Mays
ctcatactccctcccattctaaattataaaacgttttgtcttttgtagataatatttgctatgcacttaaatatacactgtatctagatacatagtaaaaacagtatatctagaaaagacaaaatgtcttataatttagcatgaagagagtacaaagttgcttactttttttagagtttctgcactttagtagtaggctccttgggcataccacctttt

SEQ ID NO: 54324 - DNA, 661 bp, Zea Mays
atgcggctcgccgtcaccgtgctcgtagggctcgcgcgcgtcccggaggttgcggccgacgagggggtcgtttccaccgtgcccctagtcaccgaggttgtcgccaaatcccgcatcgtgtgctgcaggactgatccagcaatcactgaagaatgctttgaacttctgtcacttattgcaatagcatctgaagatggggcatatgagttttgtgagcctggtgtaatagacatgatcttccttcaaatcttaatcttaacagatggacatattgctaagaatctgccacattatgtttgcttgagtttgcaatatttccttgcatatcgaagatttctagagatagatactctccattcttctcggcaactctacttatgtgagaaaatatctcttactggtgagatgtactttgccatcacccttgataggaaaactactgtacacgaaaggagtcccttcacttcaatgaaccatggggtcatgagcttaaaccatgtgtcctgctgactgagtatgtgacaaagttctattacatctggtctaaggttatcttccccataatgctcggcactgctggatgcacttgatcattgcatttctgatcctttagtagtcaacactcttctcaaaagctttcgtgttattctacaactcgcga

SEQ ID NO: 54325 - DNA, 444 bp, Zea Mays
atgcggctcgccgtcaccgtgctcgtagggctcgcgcgcgtcccggaggttgcggccgacgagggggtcgtttccaccgtgcccctagtcaccgaggttgtcgccaaatcccgcatcgtgtgctgcaggactgatccagcaatcactgaagaatgctttgaacttctgtcacttattgcaatagcatctgaagatggggcatatgagttttgtgagcctggtgtaatagacatgatcttccttcaaatcttaatcttaacagatggacatattgctaagaatctgccacattatgtttgcttgagtttgcaatatttccttgcatatcgaagatttctagagatagatactctccattcttctcggcaactctacttatgtgagaaaatatctcttactggtgagatgtactttgccatcacccttgataggaaaactactgat

SEQ ID NO: 54326 - DNA, 489 bp, Zea Mays
aggaatcatatcttagcgcaacaaacgctcgagctcaacgtcctcccaggaatccgcgcgggcatcggttgaggaccccatccccacgcctcgggatcgttcctcgcccatatatacccaagcgagacccccctgaagccatagcccaagccatcgtcgccccaccaccgtcgcggaggagaaacgaatttcgccgccgcggtcaaatcccaagtacgccgcatccaatccttcgaagggtggtcggggacatccgttgcatctccttggatgctcccatggctgcgtcggggggaaatcgactgttggggcgcccccgattgctcgtcgtcgttcaaatccggccactagccgccattcaccgcgtggcaccctctctccatctcctcctccggttttctgcaagggatggttgatggtttaacttagccctccaccctgccatcaggttggacggttgagtggaaggatgctacctctacaggagtg

SEQ ID NO: 54327 - DNA, 1037 bp, Zea Mays
cccgagcccacgtcgacggcgtgggcctttcctacggcggcgccatcaccaggcccccacaacccacgacccggcacccagaactcccaaacgaaagatgctacatggagcaaagacaaaggcgagattggaggaaaggttctcaccgtgaactgtgcgcgtagaagctcgtccatggccataggcagttctgcggcggtggaattgctctgtcgggcaattgctccagcccagagagctcccgcacccatccactctctcgaacaagatccaggccctccggcgatcacacgaaagccagcaaacagctggagtcgtagcccttggatgcgcgtgccgacttatatgcagtcgaggtgagagttggttacgccagctgggcacctccgcgccacacgcgggacgttcgctgcgtccgtgaagacggggagggaattcaccgccaggacgccaggtacgccgccgggcaccggccccctcctccctccctcctccctcttccctcttccctctgcagtctgcacaaacacgacgcgacgcagagagctcgctagctcggccccctcctggcctcctcacagagccgccagcctccgagcagagcgcacaaacccaaggcagcgccggccccctcctccctcttgcgcaagccccactgcgctgctctgctctctgcgcaagccccactacactgctctgcacaagccgccagtgcaagccgccgcccgccagtgcccagtgcaggcacacctaggtgatctaagttattaatccttgtcatagcatgtctatttttttaatcaaagcttcctttctactgggttggtttatttactttaaaagtagttatgaattgttttttcaagacgtgttaggaaataggcaaggaatcttcgctattcagctggttatcatctatgatcctctaaactcgatatttctttctcatgtgcttatactctatacctctttagaaaatttgcgtggtgatttatttctttttaatattgcttgtatgtttatttcatggttgttta

SEQ ID NO: 54328 - DNA, 414 bp, Zea Mays
ctttgtctcagcacacctgttgattgcgttcgcacccgggtccctaaaacccaggtgtgacatgataagaccctgaagctgttctaatggaatgcagcgtcagatcccatagacctttggattaaggtttgaataagcacaagaagggagaaatatcccttttatcccctaattgcatggaaaacagggccaatcacttggtaacggtgccaaagaatctccgaagcccttggttgtaggttttattttgatgaagtaaagatgaaggtatgtgaaacctttgtttttgactaggtaaaacatatatcttatttttactagcatgtgtgctgaaatcgagggctaaaagggcttcttcattgtattaaaatgttttaacctttggtttatggccaagaatataacaattttatc

SEQ ID NO: 54329 - DNA, 1787 bp, Zea Mays
ccttaactcgaaagctcacagctcaggcgtcgtccctgcttctcagacagaggatgagaaccttgtccgcgtgatgacacagccggcatacgtactgtggatggcatgattagcgccatcagtggcatcatggaggacgtcgtcaggatcgggagcttcgacttggacgccgtcagcggcgcgtacccgacgacgctgcccagcccgaggatggtcgccgcaggacgagagctccagctcatccactcgccacgccagccgtcgtcggggttcagggagagcctcaacccgatctacaccgaccacgacaccacgacgacgaccacgacgacggcaaccacggattcgtcaccgttggccgccgcggcaaaccacgctgcgacggcggcagcggcagcggcacgggccgacggcggcggcagctcggtgcccgcgcgtcgccacactgccagcgccgccgggaacgggcgctgggaggccatccgcgtggccgagccaccgctcagcctgggccacttccgcctcctcaggcgccttggctacggcgacatcggcagcgtctacctcgtcgagctccgcggcggccgcggcgcgctcttcgccatgaaggtcatggacaagggctctctggccgggcggaacaagctgccccgcgcgcacacggagcgggagatcctgggcctgctcgaccaccccttcctgcccacgctctactcccacttcgagaccgacaagttctgctgcttgctcatggagtactgctgcggcggcaacctccacgcgctccgccagaagcagcccaacaagcgattcaccgaggacgcagccaggttctacgcctctgaagtcctgcttgcgctggagtacctgcacatgctgggcgtggtgtaccgggacctcaagcccgagaacgtgctcgtcagggaggaaggccacatcatgctctccgacttcgacctctccctgcgctgctccgtcagcccggcgcttgtccgctccccgtccggccgggtcagcggaggcggcggcctcgcccacggctgcatgctcccgcgcatcctccaggtgaagaagaagaagaagggagacaaggctaataaggccaataagctggacaacgagacggtgactagcaagaagccgtcgtcgctggagttcacagccgagccgacaagcgcgcggtccatgtcgttcgtgggcacgcacgagtacctggcgccggagatcatccgcggcgagggccacggcagcgccgtcgactggtggacttttggtatcttcctctacgagctcctgcacggcgccacgccgttcaagggctccgggaaccgcgccacgctcttcaacgtcgtcgcgcagccgctcaggttccccgacgcgccggtggtcagcgccgccgcaagggaccttgtccggggactgctggcaaaagagccgcacaaccggctcgcgtcccggcgcggcgccgcggaggtgaagcagcacccctttttcgaaggcgtcaactgggcgctcgtcaggagcgcccagccgccctacatccccgacgccgccgttgatcactgttcccacttcgcctgcgacggagcggcgcaaggtgccacgcccaagagctccgcacggaaaaccggctcgcgtcgcactgattcctcgcatgtcgatattgagtatttttaggatcataggatgtgatcacacgttttaatttgagatctccatttgtatcttatccttggatgtcctcctggatcatgatgtgtttgtttccttggtgaagtatatatata

SEQ ID NO: 54330 - DNA, 1708 bp, Zea Mays
ccctgctccagctcccacgcaccttgcgatcttctctgctccttctcgaagttcgcctagccggagcttcctcccagctcagattttcctgccgcgcctgctccctgatgcacgcacctccttcctcctcctctgtcgcgcctgctgcttgctcctctgctgcgcgcccgccgaggtccttctcatggcgctctgctccagctcccgcgcccggcctcagcccggtcgagctccctggtgccgcgtccctcagctcgccttcctgcagctcgtcgtcgggccgccctttcctctgctcagacctcgccatggagcttcctcgtcagcgcgcccatctctctctctcacagttccctggtgcttgcccctctttcccatctcctgctcctccatggcgctaagctccaccagtcgctggttcgaaacgccgtcaccgaccaccatcttccatggcgcccagctcggactgcccctgctccttgttcctccaactcgttcctgaccggactccctgcatcgcgcgctcctcctccctatccctagctcgctcgccctgatgctgagctcggctcccctgctgaccgcgcgccgctccctgttgttctggttgccgtgcgcgcgaaactgctctggtcggctgtttctgtaccccgcgcccagatcgacatgacctcatgctcgtcctgctccagatccgtagctagtcactctctgtgctcgaccttgccttgttgccgaaccccaacgccgtcgatcttcagctccgtgccttgtccctggttgcgcgcgcgtgcttcactgtttggttgtcgtcgcgcaagctcctctgttgggcttgccagccgtcgttgtcctatcctcgccagtccgcatccatggtcgtgttcatcgagttcaccaatgctctgtctgattcaactgtcgtcgctgctgcgtgcctcgctgcttgctcgacgggtgtcatctgatgtaccccagcactcgtgcttgcccctgactcgcgttagcgctcgcgcgcctgctcgttgtcactgtggcgcactcgctcttcgtccatcgggcttcgcgcgtgctcgcgtttaccgtcgagctgttgaacccatcctcccttgctcgtgacttcgtcgtcgccagagccctcacaggattcgtgtcctcgccagctcgctccacactcgatctcgtcgtcgttccgtgcgtcatcaagaaatcccaagaatcgggtgaagacgaagctagcagcgtgattgtcgggggccttcgtctttcgaaggtcctcaaaaacatgatttaacaatgttttccaagtgtgacatatgaacaggtacctttggactcgggttaaaaccatacgcgatgtgaaaagcatgattgagacgaaggctgatgttgctccgaagctacacgtaagggagcttcggctaactggcggaaaaaggaaccgacctaaaggggaaaaggctatttagctctcattggttcatccataagtcaatagtaaatataaagggcatgaatgtaaatttacacaggctgcgccctgtgcctataaatagatgaacaatatccccgtactgttcacgctgactgttactcgctcgtgcatcatacttgtactttcaccttctgtcaagccgaaggtataaatgtaattcaatattgtttctgtatatttatgataatgtagtaaatatatattgataatgtc

SEQ ID NO: 54331 - DNA, 2307 bp, Zea Mays
aattaatatgttacaagataagcacagtggtttgttagtctcttaatttgctaaagcagatagctaaaacattgaattttgagtcagctgctggcactaaggatgggtgggtaataaattcataccggtactatgatagctccaacactttgaaatgaactatgcaacattttcagtgcttttatttccacacattcagctgtaagtaattctttgttgaatgtcattgttattgatgtttgaaaaatgaatatcaggctttggatcaatttagaaagcacccgcatggattgcctgatttttcttttaaggccctgtttgaaacctttaatagttagctgctaaaattagctatagaggttccaaacacacccaactaatacaccaactaattattatctacctcacagccaaccattagttcattagctggctcaatccagctaacaatttgttagctggataactattagctctaggagttccaaacagggcctaagatgtggaatagagaaaaaatggtagaacctcattataaaaggaaacaagatatttgacttgtcccagggaagggagtagcaatttaaagaaagctatactaggttacaaccaagggaaaacattcccagcaacattgttattaaaacgtcgcttaaacgacgtttaagcgtcgtttaagcgagaaaacgttattaggagctggaacgtccgaacgttttagaaaactggcgtagaacgtccgttttggatgtttaaacgtcgtttaagcgtcctaaacacgttttaggacgttttacgcgttctggggacgttttacccatctgtgggcctttcctgggcctttagggtttaggtccagccagcgcgtacccgtggaggcttcctctccagcgcggagcactccttagtcggctgccctcctctcctccgccgccacagcagtcagcagacatcagcagaccgccggccgaccgccccacagaaaaaaggagggcaaagaatgttcctgaatgagctcagagaccaaagaggcacacaatgcaagaggtcacgaggttgagcaccattgtaggaaggccaactatcagacattttcagtttctggtacaaggaagtttggttggatcatgtttggtttgattttttggtgagagagttcgtaccttgttgtagtaatactattaatgtagagttgtagacattgaccatccagtggcattgtgtgatatcaagtcattcggtactctgatggtttcagtagatacaggtttaattaatgttcactatctttactgtgctagttcatatcaacgttaaagaacatgactctgcaatggaactggttatccgctttaatatgaaaattggaaggtgcatttacccttctgtcaaaattaaccccaaaaaaatcatgaccttggtatgttgcttgacgtgtagaatactcgccagatggtaatcaacccaagcagatattgcaagtgattatacatcaaaaatggttgggcataacataattcacataatgcagatcaaaacttgctcatggctcagaacttgtaaggcatttgacataggtagtgttaatcagtggtagacaaatagcacaataaatcatataattttaaggaatattaatttgggacaatcagaaatatgccactcaaattttcaaaattagatagctagttcattcggatgccatgggtagtatccaaatgaactagctatctaagtttgcaaaatttgagtggcatatttgaagaaacccctataaatttagttaaatgaaaaggcatctggtttagctgtatcactagctcacggctgagaaatgagcagtgtgtgcactaccaaaagcgaaagggcctctagcgtaatggttaaaacttccgactaacacccctgggttcgatccccctcggggcgaatttgtggcttggttaaaaaaaatcccctcgctatgtcctaccgctcctgggttacgtctgcgcgccacccttcggctgggccgttgcagagtgggcagtgatggcccgctagtgatgaggggcagggttcggggattttctcgacggggaccatatttcggtctcttcttaatagaataccgggagggtggtctttccctccccggtcgagtgtgtactgtcaaatccctgaaacaaactggttcagtgtatgccactagacacagaactatctgatgagctagaacaaacacagcaacaattaaatgggtttttataactgtggaggagtagggtaggaaacataacaaaagatatatgcacgaatgtgagggag

SEQ ID NO: 54332 - DNA, 1310 bp, Zea Mays
ggggaatgggcactgagatggtcaattcccttcctcatgtgaaggctgctgatttcgacgtagctgctgcccagcagggaatcgtctatattgatgaagttgataaaataacaaagaaggctgaaagcatcaatcttagcagagatgtttcaggtgaaggtgtgcaacaagcattgttgaaaatgcttgaaggaacgataggttgttagtgttcctgagaaaggggccagaaggcacccaaggggtgacaatatccagattgataccaaaaacattctcttcatctgcggtggtgcttttgtggacttggagaaaactatttctgaaaggagacatgattcttcaattggtttccgagcgcaggttcgttcaaatatgcgatctggtggtgtcataaatgctgagattacatcatcgctactgaaatcagttgaaagtggcgatctcattgcgtatggactaatcccagagtttgttggtagatttccaattcttgttggtctatcctccctcagcgaagatcagcttgttgaggttctcacagagccaaagaatgcccttggcaggcagtataccaagttgttcgaaatgaatgacgtcaaattgcattttacggaggaggctttacggcttattgccaaaagagcaatatcgaagaatactggggctcgtggtttaaggtccatattagaaagtatattgacagaagctatgtatgagattccagagacacgaactggaaaagataaaatagatgctgtggttgttgacgaggagtctgttggatctgtaaatcagcatggaattggagctaagattctttgcggagaaaaagctttggatgtctatctggccaatcacaacaataaagaatcaacgggccaactccaggagagaccaaacggggaatcagagatcgatacggaagccccctctagagtggccagcatgtagaggttcctggcaacaataattatgtatataaataacttattgtctgccttgtaactgtaaccaattcaaatgtaaagtcgggccatataaattcatcatgtgaccggcgctgggttgtaatttgtcatgttgaatttcgggggactgaagcttgatcttgcagtatttacataaggaaagtaaagaggatcgctttgcgtctttgggcaaatcagggaaccatccaactctgatttccgtttcatctttcacgcgatggataggtatgctagtagccagatcttttttttgaagcctgcaatgttgttccgtatggtttcgtttcaggtttttttttctgacctgcgtattttttc

SEQ ID NO: 54333 - DNA, 1360 bp, Zea Mays
cacagtgtctgtgattgcgaagccaaactcgtgctgttatgcactagccctgccggggaatgggcactgagatggtcaattcccttcctcatgtgaaggctgctgatttcgacgtagctgctgcccagcagggaatcgtctatattgatgaagttgataaaataacaaagaaggctgaaagcatcaatcttagcagagatgtttcaggtgaaggtgtgcaacaagcattgttgaaaatgcttgaaggaacggttgttagtgttcctgagaaaggggccagaaggcacccaaggggtgacaatatccagattgataccaaaaacattctcttcatctgcggtggtgcttttgtggacttggagaaaactatttctgaaaggagacatgattcttcaattggtttccgagcgcaggttcgttcaaatatgcgatctggtggtgtcataaatgctgagattacatcatcgctactgaaatcagttgaaagtggcgatctcattgcgtatggactaatcccagagtttgttggtagatttccaattcttgttggtctatcctccctcagcgaagatcagcttgttgaggttctcacagagccaaagaatgcccttggcaggcagtataccaagttgttcgaaatgaatgacgtcaaattgcattttacggaggaggctttacggcttattgccaaaagagcaatatcgaagaatactggggctcgtggtttaaggtccatattagaaagtatattgacagaagctatgtatgagattccagagacacgaactggaaaagataaaatagatgctgtggttgttgacgaggagtctgttggatctgtaaatcagcatggaattggagctaagattctttgcggagaaaaagctttggatgtctatctggccaatcacaacaataaagaatcaacgggccaactccaggagagaccaaacggggaatcagagatcgatacggaagccccctctagagtggccagcatgtagaggttcctggcaacaataattatgtatataaataacttattgtctgccttgtaactgtaaccaattcaaatgtaaagtcgggccatataaattcatcatgtgaccggcgctgggttgtaatttgtcatgttgaatttcgggggactgaagcttgatcttgcagtatttacataaggaaagtaaagaggatcgctttgcgtctttgggcaaatcagggaaccatccaactctgatttccgtttcatctttcacgcgatggataggtatgctagtagccagatcttttttttgaagcctgcaatgttgttccgtatggtttcgtttcaggtttttttttctgacctgcgtattttttc

SEQ ID NO: 54334 - DNA, 1578 bp, Zea Mays
caagtaccaaaatttcaaaactggaggtggtgttctcaagggaaaaaatagtaaaagcacttattttaggttgcacagtgtctgtgattgcgaagccaaactcgtgctgttatgcactagccctgccggggaatgggcactgagatggtcaattcccttcctcatgtgaagccactgccgctcagccatcctccagtgttgtttatcctgtcatgaacatgggatgggacatggcatatgaagtatgtgaagatcgtaaaagataatataaagcataaactttggatttgtctccaagccaggcagagtgaagctgctgatttcgacgtagctgctgcccagcagggaatcgtctatattgatgaagttgataaaataacaaagaaggctgaaagcatcaatcttagcagagatgtttcaggtgaaggtgtgcaacaagcattgttgaaaatgcttgaaggaacgataggttgttagtgttcctgagaaaggggccagaaggcacccaaggggtgacaatatccagattgataccaaaaacattctcttcatctgcggtggtgcttttgtggacttggagaaaactatttctgaaaggagacatgattcttcaattggtttccgagcgcaggttcgttcaaatatgcgatctggtggtgtcataaatgctgagattacatcatcgctactgaaatcagttgaaagtggcgatctcattgcgtatggactaatcccagagtttgttggtagatttccaattcttgttggtctatcctccctcagcgaagatcagcttgttgaggttctcacagagccaaagaatgcccttggcaggcagtataccaagttgttcgaaatgaatgacgtcaaattgcattttacggaggaggctttacggcttattgccaaaagagcaatatcgaagaatactggggctcgtggtttaaggtccatattagaaagtatattgacagaagctatgtatgagattccagagacacgaactggaaaagataaaatagatgctgtggttgttgacgaggagtctgttggatctgtaaatcagcatggaattggagctaagattctttgcggagaaaaagctttggatgtctatctggccaatcacaacaataaagaatcaacgggccaactccaggagagaccaaacggggaatcagagatcgatacggaagccccctctagagtggccagcatgtagaggttcctggcaacaataattatgtatataaataacttattgtctgccttgtaactgtaaccaattcaaatgtaaagtcgggccatataaattcatcatgtgaccggcgctgggttgtaatttgtcatgttgaatttcgggggactgaagcttgatcttgcagtatttacataaggaaagtaaagaggatcgctttgcgtctttgggcaaatcagggaaccatccaactctgatttccgtttcatctttcacgcgatggataggtatgctagtagccagatcttttttttgaagcctgcaatgttgttccgtatggtttcgtttcaggtttttttttctgacctgcgtattttttc

SEQ ID NO: 54335 - DNA, 1600 bp, Zea Mays
aataattgggctctagaagattttagcaagtaccaaaatttcaaaactggaggtggtgttctcaagggaaaaaatagtaaaagcacttattttaggttgcacagtgtctgtgattgcgaagccaaactcgtgctgttatgcactagccctgccggggaatgggcactgagatggtcaattcccttcctcatgtgaagccactgccgctcagccatcctccagtgttgtttatcctgtcatgaacatgggatgggacatggcatatgaagtatgtgaagatcgtaaaagataatataaagcataaactttggatttgtctccaagccaggcagagtgaagctgctgatttcgacgtagctgctgcccagcagggaatcgtctatattgatgaagttgataaaataacaaagaaggctgaaagcatcaatcttagcagagatgtttcaggtgaaggtgtgcaacaagcattgttgaaaatgcttgaaggaacggttgttagtgttcctgagaaaggggccagaaggcacccaaggggtgacaatatccagattgataccaaaaacattctcttcatctgcggtggtgcttttgtggacttggagaaaactatttctgaaaggagacatgattcttcaattggtttccgagcgcaggttcgttcaaatatgcgatctggtggtgtcataaatgctgagattacatcatcgctactgaaatcagttgaaagtggcgatctcattgcgtatggactaatcccagagtttgttggtagatttccaattcttgttggtctatcctccctcagcgaagatcagcttgttgaggttctcacagagccaaagaatgcccttggcaggcagtataccaagttgttcgaaatgaatgacgtcaaattgcattttacggaggaggctttacggcttattgccaaaagagcaatatcgaagaatactggggctcgtggtttaaggtccatattagaaagtatattgacagaagctatgtatgagattccagagacacgaactggaaaagataaaatagatgctgtggttgttgacgaggagtctgttggatctgtaaatcagcatggaattggagctaagattctttgcggagaaaaagctttggatgtctatctggccaatcacaacaataaagaatcaacgggccaactccaggagagaccaaacggggaatcagagatcgatacggaagccccctctagagtggccagcatgtagaggttcctggcaacaataattatgtatataaataacttattgtctgccttgtaactgtaaccaattcaaatgtaaagtcgggccatataaattcatcatgtgaccggcgctgggttgtaatttgtcatgttgaatttcgggggactgaagcttgatcttgcagtatttacataaggaaagtaaagaggatcgctttgcgtctttgggcaaatcagggaaccatccaactctgatttccgtttcatctttcacgcgatggataggtatgctagtagccagatcttttttttgaagcctgcaatgttgttccgtatggtttcgtttcaggtttttttttctgacctgcgtattttttc

SEQ ID NO: 54336 - DNA, 1419 bp, Zea Mays
cgaaatatgcaatagtattgcatcagggaaaacattgctggcaaaaacactggcaagatttgtgaacgtgcccttcgttatagctgatgcgacaagcctcactcaggctggatatgttggtgaggatgttgaatctattttgtataagctcctagcggctgctgatttcgacgtagctgctgcccagcagggaatcgtctatattgatgaagttgataaaataacaaagaaggctgaaagcatcaatcttagcagagatgtttcaggtgaaggtgtgcaacaagcattgttgaaaatgcttgaaggaacggttgttagtgttcctgagaaaggggccagaaggcacccaaggggtgacaatatccagattgataccaaaaacattctcttcatctgcggtggtgcttttgtggacttggagaaaactatttctgaaaggagacatgattcttcaattggtttccgagcgcaggttcgttcaaatatgcgatctggtggtgtcataaatgctgagattacatcatcgctactgaaatcagttgaaagtggcgatctcattgcgtatggactaatcccagagtttgttggtagatttccaattcttgttggtctatcctccctcagcgaagatcagcttgttgaggttctcacagagccaaagaatgcccttggcaggcagtataccaagttgttcgaaatgaatgacgtcaaattgcattttacggaggaggctttacggcttattgccaaaagagcaatatcgaagaatactggggctcgtggtttaaggtccatattagaaagtatattgacagaagctatgtatgagattccagagacacgaactggaaaagataaaatagatgctgtggttgttgacgaggagtctgttggatctgtaaatcagcatggaattggagctaagattctttgcggagaaaaagctttggatgtctatctggccaatcacaacaataaagaatcaacgggccaactccaggagagaccaaacggggaatcagagatcgatacggaagccccctctagagtggccagcatgtagaggttcctggcaacaataattatgtatataaataacttattgtctgccttgtaactgtaaccaattcaaatgtaaagtcgggccatataaattcatcatgtgaccggcgctgggttgtaatttgtcatgttgaatttcgggggactgaagcttgatcttgcagtatttacataaggaaagtaaagaggatcgctttgcgtctttgggcaaatcagggaaccatccaactctgatttccgtttcatctttcacgcgatggataggtatgctagtagccagatcttttttttgaagcctgcaatgttgttccgtatggtttcgtttcaggtttttttttctgacctgcgtattttttc

SEQ ID NO: 54337 - DNA, 1928 bp, Zea Mays
attccagtccaccctcccttccccgcacgaaacccccaccagtattcatccatgtcagccgccgtccgctcccgcgccgcagcggccgccctctcggccgcgcgccgcatccacgctggccacgccgcggggcagaagcagcagggcagcaacagcactggcgcctttcgccgaccttggaccctcttcaggcgccagcagcaggaggagcggagccacgttccccgcgccgccgctcctgtcctggatgctgtcgccgatcacagggccggcggttcggacggtgcggagcccccagagatctggcgacagcccggagaagcccctgtcgctcccgagggtgtgggcgccgtcgggaggatcgacgtggttagggttgcagcccccggtggggaagactttgatggaaaggacgggggcggggaaagcgggggttggggtggctctaacctgggacgacggtttcccacgcccaaggagatttgccgtgggctggacaagtttgtcatcggccagcagcgagccaagaaggtgttgtcagtagcagtttataatcactataaaaggatctattgtgaatcactcatcaacaggtctgctgcggattgcagtcagagtgattcttgcacgagtgacaccgacatggtagagcttgagaaaagcaatattcttgtcatgggaccaacgggctcggggaaaacattgctggcaaaaacactggcaagatttgtgaacgtgcccttcgttatagctgatgcgacaagcctcactcaggctggatatgttggtgaggatgttgaatctattttgtataagctcctagcggctgctgatttcgacgtagctgctgcccagcagggaatcgtctatattgatgaagttgataaaataacaaagaaggctgaaagcatcaatcttagcagagatgtttcaggtgaaggtgtgcaacaagcattgttgaaaatgcttgaaggaacggttgttagtgttcctgagaaaggggccagaaggcacccaaggggtgacaatatccagattgataccaaaaacattctcttcatctgcggtggtgcttttgtggacttggagaaaactatttctgaaaggagacatgattcttcaattggtttccgagcgcaggttcgttcaaatatgcgatctggtggtgtcataaatgctgagattacatcatcgctactgaaatcagttgaaagtggcgatctcattgcgtatggactaatcccagagtttgttggtagatttccaattcttgttggtctatcctccctcagcgaagatcagcttgttgaggttctcacagagccaaagaatgcccttggcaggcagtataccaagttgttcgaaatgaatgacgtcaaattgcattttacggaggaggctttacggcttattgccaaaagagcaatatcgaagaatactggggctcgtggtttaaggtccatattagaaagtatattgacagaagctatgtatgagggccaactccaggagagaccaaacggggaatcagagatcgatacggaagccccctctagagtggccagcatgtagaggttcctggcaacaataattatgtatataaataacttattgtctgccttgtaactgtaaccaattcaaatgtaaagtcgggccatataaattcatcatgtgaccggcgctgggttgtaatttgtcatgttgaatttcgggggactgaagcttgatcttgcagtatttacataaggaaagtaaagaggatcgctttgcgtctttgggcaaatcagggaaccatccaactctgatttccgtttcatctttcacgcgatggataggtatgctagtagccagatcttttttttgaagcctgcaatgttgttccgtatggtttcgtttcaggtttttttttctgacctgcgtattttttc

SEQ ID NO: 54338 - DNA, 2040 bp, Zea Mays
attccagtccaccctcccttccccgcacgaaacccccaccagtattcatccatgtcagccgccgtccgctcccgcgccgcagcggccgccctctcggccgcgcgccgcatccacgctggccacgccgcggggcagaagcagcagggcagcaacagcactggcgcctttcgccgaccttggaccctcttcaggcgccagcagcaggaggagcggagccacgttccccgcgccgccgctcctgtcctggatgctgtcgccgatcacagggccggcggttcggacggtgcggagcccccagagatctggcgacagcccggagaagcccctgtcgctcccgagggtgtgggcgccgtcgggaggatcgacgtggttagggttgcagcccccggtggggaagactttgatggaaaggacgggggcggggaaagcgggggttggggtggctctaacctgggacgacggtttcccacgcccaaggagatttgccgtgggctggacaagtttgtcatcggccagcagcgagccaagaaggtgttgtcagtagcagtttataatcactataaaaggatctattgtgaatcactcatcaacaggtctgctgcggattgcagtcagagtgattcttgcacgagtgacaccgacatggtagagcttgagaaaagcaatattcttgtcatgggaccaacgggctcggggaaaacattgctggcaaaaacactggcaagatttgtgaacgtgcccttcgttatagctgatgcgacaagcctcactcaggctgctgatttcgacgtagctgctgcccagcagggaatcgtctatattgatgaagttgataaaataacaaagaaggctgaaagcatcaatcttagcagagatgtttcaggtgaaggtgtgcaacaagcattgttgaaaatgcttgaaggaacgataggttgttagtgttcctgagaaaggggccagaaggcacccaaggggtgacaatatccagattgataccaaaaacattctcttcatctgcggtggtgcttttgtggacttggagaaaactatttctgaaaggagacatgattcttcaattggtttccgagcgcaggttcgttcaaatatgcgatctggtggtgtcataaatgctgagattacatcatcgctactgaaatcagttgaaagtggcgatctcattgcgtatggactaatcccagagtttgttggtagatttccaattcttgttggtctatcctccctcagcgaagatcagcttgttgaggttctcacagagccaaagaatgcccttggcaggcagtataccaagttgttcgaaatgaatgacgtcaaattgcattttacggaggaggctttacggcttattgccaaaagagcaatatcgaagaatactggggctcgtggtttaaggtccatattagaaagtatattgacagaagctatgtatgagattccagagacacgaactggaaaagataaaatagatgctgtggttgttgacgaggagtctgttggatctgtaaatcagcatggaattggagctaagattctttgcggagaaaaagctttggatgtctatctggccaatcacaacaataaagaatcaacgggccaactccaggagagaccaaacggggaatcagagatcgatacggaagccccctctagagtggccagcatgtagaggttcctggcaacaataattatgtatataaataacttattgtctgccttgtaactgtaaccaattcaaatgtaaagtcgggccatataaattcatcatgtgaccggcgctgggttgtaatttgtcatgttgaatttcgggggactgaagcttgatcttgcagtatttacataaggaaagtaaagaggatcgctttgcgtctttgggcaaatcagggaaccatccaactctgatttccgtttcatctttcacgcgatggataggtatgctagtagccagatcttttttttgaagcctgcaatgttgttccgtatggtttcgtttcaggtttttttttctgacctgcgtattttttc

SEQ ID NO: 54339 - DNA, 2095 bp, Zea Mays
attccagtccaccctcccttccccgcacgaaacccccaccagtattcatccatgtcagccgccgtccgctcccgcgccgcagcggccgccctctcggccgcgcgccgcatccacgctggccacgccgcggggcagaagcagcagggcagcaacagcactggcgcctttcgccgaccttggaccctcttcaggcgccagcagcaggaggagcggagccacgttccccgcgccgccgctcctgtcctggatgctgtcgccgatcacagggccggcggttcggacggtgcggagcccccagagatctggcgacagcccggagaagcccctgtcgctcccgagggtgtgggcgccgtcgggaggatcgacgtggttagggttgcagcccccggtggggaagactttgatggaaaggacgggggcggggaaagcgggggttggggtggctctaacctgggacgacggtttcccacgcccaaggagatttgccgtgggctggacaagtttgtcatcggccagcagcgagccaagaaggtgttgtcagtagcagtttataatcactataaaaggatctattgtgaatcactcatcaacaggtctgctgcggattgcagtcagagtgattcttgcacgagtgacaccgacatggtagagcttgagaaaagcaatattcttgtcatgggaccaacgggctcggtcagggaaaacattgctggcaaaaacactggcaagatttgtgaacgtgcccttcgttatagctgatgcgacaagcctcactcaggctggatatgttggtgaggatgttgaatctattttgtataagctcctagcggctgctgatttcgacgtagctgctgcccagcagggaatcgtctatattgatgaagttgataaaataacaaagaaggctgaaagcatcaatcttagcagagatgtttcaggtgaaggtgtgcaacaagcattgttgaaaatgcttgaaggaacgataggttgttagtgttcctgagaaaggggccagaaggcacccaaggggtgacaatatccagattgataccaaaaacattctcttcatctgcggtggtgcttttgtggacttggagaaaactatttctgaaaggagacatgattcttcaattggtttccgagcgcaggttcgttcaaatatgcgatctggtggtgtcataaatgctgagattacatcatcgctactgaaatcagttgaaagtggcgatctcattgcgtatggactaatcccagagtttgttggtagatttccaattcttgttggtctatcctccctcagcgaagatcagcttgttgaggttctcacagagccaaagaatgcccttggcaggcagtataccaagttgttcgaaatgaatgacgtcaaattgcattttacggaggaggctttacggcttattgccaaaagagcaatatcgaagaatactggggctcgtggtttaaggtccatattagaaagtatattgacagaagctatgtatgagattccagagacacgaactggaaaagataaaatagatgctgtggttgttgacgaggagtctgttggatctgtaaatcagcatggaattggagctaagattctttgcggagaaaaagctttggatgtctatctggccaatcacaacaataaagaatcaacgggccaactccaggagagaccaaacggggaatcagagatcgatacggaagccccctctagagtggccagcatgtagaggttcctggcaacaataattatgtatataaataacttattgtctgccttgtaactgtaaccaattcaaatgtaaagtcgggccatataaattcatcatgtgaccggcgctgggttgtaatttgtcatgttgaatttcgggggactgaagcttgatcttgcagtatttacataaggaaagtaaagaggatcgctttgcgtctttgggcaaatcagggaaccatccaactctgatttccgtttcatctttcacgcgatggataggtatgctagtagccagatcttttttttgaagcctgcaatgttgttccgtatggtttcgtttcaggtttttttttctgacctgcgtattttttc

SEQ ID NO: 54340 - DNA, 2225 bp, Zea Mays
ttttgtctcatacctatatcttaacagaggaattctacacgggttagcgagtattgggtcccattgacatctctaggtgtcacgggcatttaccggtccacaaatatttccctacctctgctttcattcgattcattccagtccaccctcccttccccgcacgaaacccccaccagtattcatccatgtcagccgccgtccgctcccgcgccgcagcggccgccctctcggccgcgcgccgcatccacgctggccacgccgcggggcagaagcagcagggcagcaacagcactggcgcctttcgccgaccttggaccctcttcaggcgccagcagcaggaggagcggagccacgttccccgcgccgccgctcctgtcctggatgctgtcgccgatcacagggccggcggttcggacggtgcggagcccccagagatctggcgacagcccggagaagcccctgtcgctcccgagggtgtgggcgccgtcgggaggatcgacgtggttagggttgcagcccccggtggggaagactttgatggaaaggacgggggcggggaaagcgggggttggggtggctctaacctgggacgacggtttcccacgcccaaggagatttgccgtgggctggacaagtttgtcatcggccagcagcgagccaagaaggtgttgtcagtagcagtttataatcactataaaaggatctattgtgaatcactcatcaacaggtctgctgcggattgcagtcagagtgattcttgcacgagtgacaccgacatggtagagcttgagaaaagcaatattcttgtcatgggaccaacgggctcggtcagggaaaacattgctggcaaaaacactggcaagatttgtgaacgtgcccttcgttatagctgatgcgacaagcctcactcaggctggatatgttggtgaggatgttgaatctattttgtataagctcctagcggctgctgatttcgacgtagctgctgcccagcagggaatcgtctatattgatgaagttgataaaataacaaagaaggctgaaagcatcaatcttagcagagatgtttcaggtgaaggtgtgcaacaagcattgttgaaaatgcttgaaggaacggttgttagtgttcctgagaaaggggccagaaggcacccaaggggtgacaatatccagattgataccaaaaacattctcttcatctgcggtggtgcttttgtggacttggagaaaactatttctgaaaggagacatgattcttcaattggtttccgagcgcaggttcgttcaaatatgcgatctggtggtgtcataaatgctgagattacatcatcgctactgaaatcagttgaaagtggcgatctcattgcgtatggactaatcccagagtttgttggtagatttccaattcttgttggtctatcctccctcagcgaagatcagcttgttgaggttctcacagagccaaagaatgcccttggcaggcagtataccaagttgttcgaaatgaatgacgtcaaattgcattttacggaggaggctttacggcttattgccaaaagagcaatatcgaagaatactggggctcgtggtttaaggtccatattagaaagtatattgacagaagctatgtatgagattccagagacacgaactggaaaagataaaatagatgctgtggttgttgacgaggagtctgttggatctgtaaatcagcatggaattggagctaagattctttgcggagaaaaagctttggatgtctatctggccaatcacaacaataaagaatcaacgggccaactccaggagagaccaaacggggaatcagagatcgatacggaagccccctctagagtggccagcatgtagaggttcctggcaacaataattatgtatataaataacttattgtctgccttgtaactgtaaccaattcaaatgtaaagtcgggccatataaattcatcatgtgaccggcgctgggttgtaatttgtcatgttgaatttcgggggactgaagcttgatcttgcagtatttacataaggaaagtaaagaggatcgctttgcgtctttgggcaaatcagggaaccatccaactctgatttccgtttcatctttcacgcgatggataggtatgctagtagccagatcttttttttgaagcctgcaatgttgttccgtatggtttcgtttcaggtttttttttctgacctgcgtattttttc

SEQ ID NO: 54341 - DNA, 697 bp, Zea Mays
cagcactaaactccaacatccaattgataccaaaaacattctcttcatctgcggtggtgcttttgtggacttggagaaaactatttctgaaaggagacatgattcttcaattggtttccgagcgcaggttcgttcaaatatgcgatctggtggtgtcataaatgctgagattacatcatcgctactgaaatcagttgaaagtggcgatctcattgcgtatggactaatcccagagtttgttggtagatttccaattcttgttggtctatcctccctcagcgaagatcagcttgttgaggttctcacagagccaaagaatgcccttggcaggcagtataccaagttgttcgaaatgaatgacgtcaaattgcattttacggaggaggctttacggcttattgccaaaagagcaatatcgaagaatactggggctcgtggtttaaggtccatattagaaagtatattgacagaagctatgtatgagattccagagacacgaactggaaaagataaaatagatgctgtggttgttgacgaggagtctgttggatctgtaaatcagcatggaattggagctaagattctttgcggagaaaaagctttggatgtctatctggccaatcacaacaataaagaatcaacggatgctacatgtttggctgcatacgttggtgtgtccatggtggaggtgattaac

SEQ ID NO: 54342 - DNA, 1210 bp, Zea Mays
ccagcccccgcaaaactcgccacaaccgaacgcccccacgcccgccgccgccgcgaatctcgcccgcacgcccgccatcgcgaaaccctccgataccgcaccgctcacacgccagcgcccgcgaatccctccggttccgaaccgcccgcacgccacgcaatccgctcctccctccgcctgagcttgccgtcatcagtctgcaccgcgccggatccgtctgctcccccctcgagatggcagccccagctatgcccgcgtcgagccctcacccacggatccgaggatctcctacctctctacaccggatcagctcctccctccgcccgagattgtcatcatcaatccgctctgcgccggatccgtccgctcccccactcgcgatggcgcccgcgtggaaaatgatctgcgtgtttgattagaaaatgatctgcgtgtttgcaatcaaattattcagttcttgcaagaatgacatgattttgttactaaatagtgttccttttattcagaaatgaccaagacaatgcaagtgcttaatgaagcaagctggcaggaaacatttaaagctctttggatttccacccttcgtcttgtacaacggagaacctcttgaaggaccgattcctcatctagatgcaaggttatgcatgttgttagctcttataccattatcaattgctgcgaatcttcaagaggaaagtgatatgtttggagttgaagggaacaaaattcttccacaaagacaagggcttatatcatctctccagaatctgatccaatattcaggacttcttgtaccaccttcatcagtggtgaatgcagctaatgttgcagcctcaaaagcagcaatatttaaggccaactataaggctggggttggcaacactagcatgatggaccagactgactcttcaatgaaagctggaaaacggagtcaaaaatgaattttgccttgacctgcgcaaacaagatgcaggaaatgtatctaatctcttgagactccatcttaaacagttggcaaatattccatatgatgacttacttaaagttggtacaggcatttgctcttcaacacctaaaattgttgaaccccagcaacataattgtacctctgtaacagaagatcatctgataatccctaaagaagctgacaatgtttgtgggcagcattatcctatcactggaaaccgtccaccagcaaagtttcctgttt

SEQ ID NO: 54343 - DNA, 1367 bp, Zea Mays
atcagttccaagatgggacaaagaagaagaaagaactgtttagctgtttatgtgaagtgtaaacatccaaattgcacaccccaagatggatatgcatgtccaatcttctatagatgaactcttggtagtaattctgacttgtgtgtactttactatgatggtatctatcatttcatcatctaccttaagttttttacatggcagctaaaatgcaagtatatactatataatatgcaatcatgttgccacatctgcctatccttcagtaaaaagaagtctgtttcactacctatgttatatgctaaatagaagtctatttcactgccaacttctatgttaagctgaaatttatatgctcaggcataaatatcacttcatattatacttcaaactttacagagatactcaatatcattcgtaacgaagaaaccttgaatggtgaaattgaatcaaatcaacagagcaagcttatgttagccaacccagttgagaacttaactatcattgttgatgcagatgatgacttacttaaagttggtacaggcatttgctcttcaacacctaaaattgttgaaccccagcaacataattgtacctctgtaacagaagatcatctgataatccctaaagaagctgacaatgtttgtgggcagcattatcctatcactgagaaaatctaccgttcacacatgtggcaaagagagcaatcaaaagaagaatggtgcaggatgcattggacagtaatgcttgagtatggtacatcagggggctgtcagctacaaccttgatggaatacctccatcgatctaagggatattatagcagaaattgatcttcacccgggaatacacgacctactggcacatttgatcaccatccattataggagaattctcaaccaaatctgcttattgtagtttctttgtcgggggctcggggctgttgattttgacccatggaaagaaatctagaagttttggactgcacctccaatgcaagtttttcatttggttagctgctctaaatcagtgttggactgcagtcaggttagctcactggggacttgagcatcatgagagttgtccattgtatgatcaagaagaggagaacatacaacatttgctcacctcctatgtatttggcgggggcagtctacagtatcgtcttgcaaaatggctcaatttttagctgtggtccaaacatgccctaattgttctccacttcttgcagctaatagctaacatgttcttttcattattttcccccttctactgtcatctaacttgccatgtgtttccttttctaagtacatactaaagatacttatgatccatgctgtgcgaacattgattggaggctgtaacaag

SEQ ID NO: 54344 - DNA, 1041 bp, Zea Mays
gcaaatattccatcagttccaagatgggacaaagaagaagaaaggccggtctcgcggacgcacggggcaccaccgggcggcctagtgctggtctccaaggatccggacaacatccgcgagatcgcgctgcgtgagtacaccgagctggtgatcgacgagacggaggtgtcggaggccactccagcagaagatgatgacttacttaaagttggtacaggcatttgctcttcaacacctaaaattgttgaaccccagcaacataattgtacctctgtaacagaagatcatctgataatccctaaagaagctgacaatgtttgtgggcagcattatcctatcactgagaaaatctaccgttcacacatgtggcaaagagagcaatcaaaagaagaatggtgcaggatgcattggacagtaatgcttgagtatggtacatcagggggctgtcagctacaaccttgatggaatacctccatcgatctaagggatattatagcagaaattgatcttcacccgggaatacacgacctactggcacatttgatcaccatccattataggagaattctcaaccaaatctgcttattgtagtttctttgtcgggggctcggggctgttgattttgacccatggaaagaaatctagaagttttggactgcacctccaatgcaagtttttcatttggttagctgctctaaatcagtgttggactgcagtcaggttagctcactggggacttgagcatcatgagagttgtccattgtatgatcaagaagaggagaacatacaacatttgctcacctcctatgtatttggcgggggcagtctacagtatcgtcttgcaaaatggctcaatttttagctgtggtccaaacatgccctaattgttctccacttcttgcagctaatagctaacatgttcttttcattattttcccccttctactgtcatctaacttgccatgtgtttccttttctaagtacatactaaagatacttatgatccatgctgtgcgaacattgattggaggctgtaacaag

SEQ ID NO: 54345 - DNA, 944 bp, Zea Mays
cttgagactccatcttaaacagttggcaaatattccataattactattggtgttgatgacagcagttccaagatgggacaaagaagaagaaagatgatgacttacttaaagttggtacaggcatttgctcttcaacacctaaaattgttgaaccccagcaacataattgtacctctgtaacagaagatcatctgataatccctaaagaagctgacaatgtttgtgggcagcattatcctatcactgagaaaatctaccgttcacacatgtggcaaagagagcaatcaaaagaagaatggtgcaggatgcattggacagtaatgcttgagtatggtacatcagggggctgtcagctacaaccttgatggaatacctccatcgatctaagggatattatagcagaaattgatcttcacccgggaatacacgacctactggcacatttgatcaccatccattataggagaattctcaaccaaatctgcttattgtagtttctttgtcgggggctcggggctgttgattttgacccatggaaagaaatctagaagttttggactgcacctccaatgcaagtttttcatttggttagctgctctaaatcagtgttggactgcagtcaggttagctcactggggacttgagcatcatgagagttgtccattgtatgatcaagaagaggagaacatacaacatttgctcacctcctatgtatttggcgggggcagtctacagtatcgtcttgcaaaatggctcaatttttagctgtggtccaaacatgccctaattgttctccacttcttgcagctaatagctaacatgttcttttcattattttcccccttctactgtcatctaacttgccatgtgtttccttttctaagtacatactaaagatacttatgatccatgctgtgcgaacattgattggaggctgtaacaag

SEQ ID NO: 54346 - DNA, 1137 bp, Zea Mays
ctcaaaagcagcaatatttaaggccaactataaggctggggttggcaacactagcatgatggaccagactgactcttcaatgaaagctggaaaacggagtcaaaaatgaattttgccttgacctgcgcaaacaagatgcaggaaatgtatctaatctcttgagactccatcttaaacagttggcaaatattccataactgtttagctgtttatgtgaagtgtaaacatccaaattgcacaccccaagatggatatgcatgtccaatcttctatagatgaactcttgatgatgacttacttaaagttggtacaggcatttgctcttcaacacctaaaattgttgaaccccagcaacataattgtacctctgtaacagaagatcatctgataatccctaaagaagctgacaatgtttgtgggcagcattatcctatcactgagaaaatctaccgttcacacatgtggcaaagagagcaatcaaaagaagaatggtgcaggatgcattggacagtaatgcttgagtatggtacatcagggggctgtcagctacaaccttgatggaatacctccatcgatctaagggatattatagcagaaattgatcttcacccgggaatacacgacctactggcacatttgatcaccatccattataggagaattctcaaccaaatctgcttattgtagtttctttgtcgggggctcggggctgttgattttgacccatggaaagaaatctagaagttttggactgcacctccaatgcaagtttttcatttggttagctgctctaaatcagtgttggactgcagtcaggttagctcactggggacttgagcatcatgagagttgtccattgtatgatcaagaagaggagaacatacaacatttgctcacctcctatgtatttggcgggggcagtctacagtatcgtcttgcaaaatggctcaatttttagctgtggtccaaacatgccctaattgttctccacttcttgcagctaatagctaacatgttcttttcattattttcccccttctactgtcatctaacttgccatgtgtttccttttctaagtacatactaaagatacttatgatccatgctgtgcgaacattgattggaggctgtaacaag

SEQ ID NO: 54347 - DNA, 2807 bp, Zea Mays
cgaatcttcaagaggaaagtgatatgtttggagttgaagggaacaaaattcttccacaaagacaagggcttatatcatctctccagaatctgatccaatattcaggacttcttgtaccaccttcatcagtggtgaatgcagctaatgttgcagcctcaaaagcagcaatatttaaggccaactataaggctggggttggcaacactagcatgatggaccagactgactcttcaatgaaagctggaaaacggagtcaaaaatgaattttgccttgacctgcgcaaacaagatgcaggaaatgtatctaatctcttgagactccatcttaaacagttggcaaatattccatgccggtctcgcggacgcacggggcaccaccgggcggcctagtgctggtctccaaggatccggacaacatccgcgagatcgcgctgcgtgagtacaccgagctggtgatcgacgagacggaggtgtcggaggccactccagcagaaggtgtgacaccccttgctcgctctttctaggtccaatctgatctgccttcttgaacctgatgtgtctatgctgtcaggcaattggttgggcctgtcttattccattttttaagatccattataatcaattcatcaatttctctttagtttcattagtaagcaaccgacacattaggttgtgatccttatctcataagttgagtatagcagcgagagagcgtgaaattgacctatggatggtctcacacaatttttagacctagctaacatatgaaaggttgttgtcctgtgagtattaaagaatatatatgtacactttagtttagcacaagtcaaagaagtaaaggcagtctctctctctctctaagttgcgttgcgaatcatgttcttcagaagacagtaaaaagactttatgcctatagattctcagaatggttctattaattataatgaggtacttcctgttcattttttttaagttttgttgaaactcaggattgggtgatgtgcctttgttaccatcttggggcttcagttttactctgcaataatatttcacattttttttgttttatgtacaatacccattgtgtacaggagttcatatttttctattgatctttgaacatttcatactatgcatgtgactgttccagattgatttgctgctggtaggactttatagcgagggaaggggtagctccagcagtcttgacagtgaccagtcttaggcaacgagttcttgctttctttctttctaattccccgtgtaaagaacttccatggttctatgaattgtactgcactggagcctggaatagagtgttcttatctgttgggttgggtgaataagtgaatgtgcatacttcattgtcatctttggtgttacgataatattatgactgttttagtaattccttgatgaatgtgtttactttgctgtcatctttttgtgatgattgtgctattaatgacacagaactgtttagctgtttatgtgaagtgtaaacatccaaattgcacaccccaagatggatatgcatgtccaatcttctatagatgaactcttggtagtaattctgacttgtgtgtactttactatgatggtatctatcatttcatcatctaccttaagttttttacatggcagctaaaatgcaagtatatactatataatatgcaatcatgttgccacatctgcctatccttcagtaaaaagaagtctgtttcactacctatgttatatgctaaatagaagtctatttcactgccaacttctatgttaagctgaaatttatatgctcaggcataaatatcacttcatattatacttcaaactttacagagatactcaatatcattcgtaacgaagaaaccttgaatggtgaaattgaatcaaatcaacagagcaagcttatgttagccaacccagttgagaacttaactatcattgttgatgcagatgatgacttacttaaagttggtacaggcatttgctcttcaacacctaaaattgttgaaccccagcaacataattgtacctctgtaacagaagatcatctgataatccctaaagaagctgacaatgtttgtgggcagcattatcctatcactgagaaaatctaccgttcacacatgtggcaaagagagcaatcaaaagaagaatggtgcaggatgcattggacagtaatgcttgagtatggtacatcagggggctgtcagctacaaccttgatggaatacctccatcgatctaagggatattatagcagaaattgatcttcacccgggaatacacgacctactggcacatttgatcaccatccattataggagaattctcaaccaaatctgcttattgtagtttctttgtcgggggctcggggctgttgattttgacccatggaaagaaatctagaagttttggactgcacctccaatgcaagtttttcatttggttagctgctctaaatcagtgttggactgcagtcaggttagctcactggggacttgagcatcatgagagttgtccattgtatgatcaagaagaggagaacatacaacatttgctcacctcctatgtatttggcgggggcagtctacagtatcgtcttgcaaaatggctcaatttttagctgtggtccaaacatgccctaattgttctccacttcttgcagctaatagctaacatgttcttttcattattttcccccttctactgtcatctaacttgccatgtgtttccttttctaagtacatactaaagatacttatgatccatgctgtgcgaacattgattggaggctgtaacaag

SEQ ID NO: 54348 - DNA, 1878 bp, Zea Mays
ccagcccccgcaaaactcgccacaaccgaacgcccccacgcccgccgccgccgcgaatctcgcccgcacgcccgccatcgcgaaaccctccgataccgcaccgctcacacgccagcgcccgcgaatccctccggttccgaaccgcccgcacgccacgcaatccgctcctccctccgcctgagcttgccgtcatcagtctgcaccgcgccggatccgtctgctcccccctcgagatggcagccccagctatgcccgcgtcgagccctcacccacggatccgaggatctcctacctctctacaccggatcagctcctccctccgcccgagattgtcatcatcaatccgctctgcgccggatccgtccgctcccccactcgcgatggcgcccgcgtggaaaatgatctgcgtgtttgattagaaaatgatctgcgtgtttgcaatcaaattattcagttcttgcaagaatgacatgattttgttactaaatagtgttccttttattcagaaatgaccaagacaatgcaagtgcttaatgaagcaagctggcaggaaacatttaaagctctttggatttccacccttcgtcttgtacaacggagaacctcttgaaggaccgattcctcatctagatgcaaggttatgcatgttgttagctcttataccattatcaattgctgcgaatcttcaagaggaaagtgatatgtttggagttgaagggaacaaaattcttccacaaagacaagggcttatatcatctctccagaatctgatccaatattcaggacttcttgtaccaccttcatcagtggtgaatgcagctaatgttgcagcctcaaaagcagcaatatttaaggccaactataaggctggggttggcaacactagcatgatggaccagactgactcttcaatgaaagctggaaaacggagtcaaaaatgaattttgccttgacctgcgcaaacaagatgcaggaaatgtatctaatctcttgagactccatcttaaacagttggcaaatattccatatgatgacttacttaaagttggtacaggcatttgctcttcaacacctaaaattgttgaaccccagcaacataattgtacctctgtaacagaagatcatctgataatccctaaagaagctgacaatgtttgtgggcagcattatcctatcactgagaaaatctaccgttcacacatgtggcaaagagagcaatcaaaagaagaatggtgcaggatgcattggacagtaatgcttgagtatggtacatcagggggctgtcagctacaaccttgatggaatacctccatcgatctaagggatattatagcagaaattgatcttcacccgggaatacacgacctactggcacatttgatcaccatccattataggagaattctcaaccaaatctgcttattgtagtttctttgtcgggggctcggggctgttgattttgacccatggaaagaaatctagaagttttggactgcacctccaatgcaagtttttcatttggttagctgctctaaatcagtgttggactgcagtcaggttagctcactggggacttgagcatcatgagagttgtccattgtatgatcaagaagaggagaacatacaacatttgctcacctcctatgtatttggcgggggcagtctacagtatcgtcttgcaaaatggctcaatttttagctgtggtccaaacatgccctaattgttctccacttcttgcagctaatagctaacatgttcttttcattattttcccccttctactgtcatctaacttgccatgtgtttccttttctaagtacatactaaagatacttatgatccatgctgtgcgaacattgattggaggctgtaacaag

SEQ ID NO: 54349 - DNA, 1032 bp, Zea Mays
ccgccaactcaaaatccgaccgagtcgtccgcatcagttttccttcccattccccgttcccaacccaccgtaaaccctagctgcgagctatggcccgcaagcgccaggcgccgccgccgccgccgccgccgccgccgccgcaggaggaggaggatgagtcatcctccgaggaatctggctccgaagaggagtctcctcgcctccccgagctccgaaggccctcgcaggccgccgccgccaacaacgccgactcgtcggacgcggactcggattccgacgccgacgtccaagccttccagatgcgccaggtgccccgcttccccaccaagcagacacacccagtctctcacccagaatccggtgccgaagaggaggagggcgagttgtcagagtcggagcacgagaacccggtgcctgtggttcagaagaaggccgtggcggcggcagggatgtccaagacagggcaggagaggaagaggcccgcctcggatcctgctccaagcgggaaggcaaaaaagaccaaggctgaggctacccctcctgctaaggcgaagaagggagagaagctggcgcctgatgcgactcctgcaggaaaggcaaagaagggcaagaccgagctagagacactggcacctgatgccactccagcaggaaaggcgaagaaaggtaaggtcgagaagacagctcctgaggccactccctcaggcaaggggaagaagggtggggacaaactggagaagccagcagcgctcgatcgctcaccttcagacagcaagtctgaaaagcttgcacatttttcccgcacatgggagaaagatgatgagatgaagatcttggaggctctcgcggcccatgtcaagagtgagggcgtgctgccgaagactgattttcttcttgctagtgttcgtgaccgccttgtcaggaagaacgagtaaagaagatgagctccagatatataatctctctaaaacaatctggggagagaagtcaaaggaggctactgctgccattacgtctcaaaaaggtggtgct

SEQ ID NO: 54350 - DNA, 517 bp, Zea Mays
tgacacttcattacagtttaggttccgtggtttcttttggaaggctgctaggataggtgaacgccttagcccctgggtagccattgggtgctctgtgatgggcatatcaattttattttggtgaaattggaagatttgtatggccttctttgcttacgattactccattaagagaagcatcagaattttgcagttacagtctgattcttcgagatgtcgcatgcttgtaatcttgtagctgtggtgtattattgtgctatgttatgcattttgactattgggcaccatcatgttatgttgttttattgtatttcaattatccggtttttatatatcatataaataggtatttgagattattatttaaatataattattgtttatttctaaacactgtacgtgtggtctgttggttaactctaaatttctgaagcaagggttgtaggtttgagtactcactttgcagtatttttatatataattattgtttatttctaaatattaagctagcttagag

SEQ ID NO: 54351 - DNA, 2061 bp, Zea Mays
cttctttctgcttgctcatcccagccccagcccactgaaactctcgaatccgcggccgccccctccgcgatcccgacgtccgtccgccttgctcgaactcgacgctctcttctcctcaacgcgctgcacctcccccccccctcccggggggcggcgcggccaccggggccctctagcgcggctgggctgattaggtggagtagaatggaggcccggccggagtgggatctacgcaagatgagggagctgcgcttcgttgtgttgcttctggtgatatccttgccgtgcttctctgcatccgatcgccaaggagatgctttatatgatatgaaacaaaaactgaatgttactggcggtcagctttcagattggaaccaaaatcaagttaacccttgcacatggaattctgttatttgtgacaataacaacaatgttattcaagtcactttggctgcgcgaggattcactggtgttttgtcaccaagaattggcgaactccaaaatttgagtgtcctgtcattggctggtaacaggattactggtaccatacctgaggagtttggcaatctatctagcttgacaagcttagatttagaggacaatcttttagttggagaagtaccagcttcccttggcaacctttctaagcttcagctgttgatactgagtcaaaataatttcaatgggtcaattcctggtagcatagcgaacatttcaagcttgacagacatacgcctggcatataataatttgtccggtcagatacctgggttgctgtttcaagtagcacgttacaacttttctggcaatcacttaaactgtggacctaacttcccgcactattgtgcatcgaacacatcctatccgagtggatcccataactcaaaaattggcttaatacttggaacagttgggggaattttagggcttattatcgtgggagctctgtttctaatctgtaatgcaaggaggaaaagccatctgcgggaagtttttgtggatgtagcaggcgaggatgatcgacgaattgcgtttggccagctcaaaagatttgcatggcgagaactgcagattgcgactgataatttcaatgaaagaaatgttcttggacagggaggttttggtaaagtgtacaagggagttcttccagatggcactaagattgctgtaaaacgactgactgactatgagagtcctggtggggaggctgccttcttgcgtgaggttgagcttatcagtgttgcagttcaccgcaatctcttaagattaattggcttctgcacaacacaaacagagcgcttgttggtctatccatttatgcagaatttgagtgttgcctaccgcttaagagattttaagcctggagaagccatcctggattggccttcaaggaaacgggtggctataggtacagctcgtggactggagtatctgcatgaacactgcaaccccaagatcatacaccgtgatgttaaagctgcaaatgtattgcttgacgaggatttcgagcctgttgtcggcgattttggcctagcaaagctagtagatgtgcagaagacgtctgtgacaacacaagtccgcggaaccatgggtcacatagcacccgagtacctgtccacagggaagtcttccgagaggacagatgtttttggatatgggatcatgcttcttgaacttgtgactggtcaacgggctattgacttctcacggctggaagacgaagatgatgtgctattgcttgatcatgtaaagaagctacagagagaaggggagctggactccatcgtggacagcaaccttaaccagaattatgacggcgaggatatcgagatgataatacagatagcgctgctctgcactcaggcatcacctgaggaccgtccatcgatgtctgaagtggttaggatgctggaaggcgagggtttggcggaacggtgggaagagtggcagcatgtggaggtgacaaggaggcaagaatatgagcggatgcagcggaggtttgactggggagaggattcgttctacaaccaggaagcgatagagctgtctgcaggcatacta

SEQ ID NO: 54352 - DNA, 2285 bp, Zea Mays
aggacaagtgctcgaggttcttgctccgctcttctttctgcttgctcatcccagccccagcccactgaaactctcgaatccgcggccgccccctccgcgatcccgacgtccgtccgccttgctcgaactcgacgctctcttctcctcaacgcgctgcacctcccccccccctcccggggggcggcgcggccaccggggccctctagcgcggctgggctgattaggtggagtagaatggaggcccggccggagtgggatctacgcaagatgagggagctgcgcttcgttgtgttgcttctggtgatatccttgccgtgcttctctgcatccgatcgccaaggagatgctttatatgatatgaaacaaaaactgaatgttactggcggtcagctttcagattggaaccaaaatcaagttaacccttgcacatggaattctgttatttgtgacaataacaacaatgttattcaagtcactttggctgcgcgaggattcactggtgttttgtcaccaagaattggcgaactccaaaatttgagtgtcctgtcattggctggtaacaggattactggtaccatacctgaggagtttggcaatctatctagcttgacaagcttagatttagaggacaatcttttagttggagaagtaccagcttcccttggcaacctttctaagcttcagctgttgatactgagtcaaaataatttcaatgggtcaattcctggtagcatagcgaacatttcaagcttgacagacatacgcctggcatataataatttgtccggtcagatacctgggttgctgtttcaagtagcacgttacaacttttctggcaatcacttaaactgtggacctaacttcccgcactattgtgcatcgaacacatcctatccgagtggatcccataactcaaaaattggcttaatacttggaacagttgggggaattttagggcttattatcgtgggagctctgtttctaatctgtaatgcaaggaggaaaagccatctgcgggaagtttttgtggatgtagcaggcgaggatgatcgacgaattgcgtttggccagctcaaaagatttgcatggcgagaactgcagattgcgactgataatttcaatgaaagaaatgttcttggacagggaggttttggtaaagtgtacaagggagttcttccagatggcactaagattgctgtaaaacgactgactgactatgagagtcctggtggggaggctgccttcttgcgtgaggttgagcttatcagtgttgcagttcaccgcaatctcttaagattaattggcttctgcacaacacaaacagagcgcttgttggtctatccatttatgcagaatttgagtgttgcctaccgcttaagagattttaagcctggagaagccatcctggattggccttcaaggaaacgggtggctataggtacagctcgtggactggagtatctgcatgaacactgcaaccccaagatcatacaccgtgatgttaaagctgcaaatgtattgcttgacgaggatttcgagcctgttgtcggcgattttggcctagcaaagctagtagatgtgcagaagacgtctgtgacaacacaagtccgcggaaccatgggtcacatagcacccgagtacctgtccacagggaagtcttccgagaggacagatgtttttggatatgggatcatgcttcttgaacttgtgactggtcaacgggctattgacttctcacggctggaagacgaagatgatgtgctattgcttgatcatgtaaagaagctacagagagaaggggagctggactccatcgtggacagcaaccttaaccagaattatgacggcgaggatatcgagatgataatacagatagcgctgctctgcactcaggcatcacctgaggaccgtccatcgatgtctgaagtggttaggatgctggaaggcgagggtttggcggaacggtgggaagagtggcagcatgtggaggtgacaaggaggcaagaatatgagcggatgcagcggaggtttgactggggagaggattcgttctacaaccaggaagcgatagagctgtctgcaggtagatgataatctgtggaaacggatggttgtaaatgcgcaacgaagtggtgcctgctgtgccgtatataactattatttgtagagtagctattagatagatatgttcataagattattcaaacaaacttgctcggcgatagcatgaatgtggatgaaattagatgcataaataaataaatggaagtagagatgaaagtggt

SEQ ID NO: 54353 - DNA, 606 bp, Zea Mays
  misc_feature (606)..(606): n is a, c, g, or t
gtttttttttggcctgctggagtcagaattcaacttgtgaagttcacactatcctctaaccaggtacttgatctacgtgagatgaagaatgctggaaaccgacttatttcagcactttcactggcaaggtatcgtcacctcaaagtattaaaccttgaatttgctcaagatattgaggatcgatattttgttcatctaaaagaaatgagtggcatctcactggaaaatttggaattcctgaacctaaatgcatgtcagaagatctctgataaaggaattgaagctgttaccagtctttgtcctaatcttcagcgccttgctatctattggattgtaggactgacagactcaagtattgggcacattacaaagaactgcaagcatctagtgcaccttaacttgagcggttgtaagaatatcaaggataaaggaatgcagttgattgctaataattaccaaggactaaagagattgaacataaccaggtgtgttaagttgacagatgatgggcttaaccaagttcttctgaagtgttcttcacttgaaagcctaaacctttatgccctttcaagttttactgacagtgtttatagggagataggatcn

SEQ ID NO: 54354 - DNA, 792 bp, Zea Mays
  misc_feature (792)..(792): n is a, c, g, or t
gctgcgccaccatcacccacatcttcgtccgctgcttcctgtgctgcgtccatggccgacaacagcgaccttagggtcaccattgcgcaggtcgccgaaagcgtcaaggctcttcaggcgaccgcggaggccaacgctagggccacacggccatcctcgagctgtccggctccaagcaagtcacgggcggacacaacaccgaccgaccacctccacgtttccagaagctcgatttccccaaatacgatggtacttgatctacgtgagatgaagaatgctggaaaccgacttatttcagcactttcactggcaaggtatcgtcacctcaaagtattaaaccttgaatttgctcaagatattgaggatcgatattttgttcatctaaaagaaatgagtggcatctcactggaaaatttggaattcctgaacctaaatgcatgtcagaagatctctgataaaggaattgaagctgttaccagtctttgtcctaatcttcagcgccttgctatctattggattgtaggactgacagactcaagtattgggcacattacaaagaactgcaagcatctagtgcaccttaacttgagcggttgtaagaatatcaaggataaaggaatgcagttgattgctaataattaccaaggactaaagagattgaacataaccaggtgtgttaagttgacagatgatgggcttaaccaagttcttctgaagtgttcttcacttgaaagcctaaacctttatgccctttcaagttttactgacagtgtttatagggagataggatcn

SEQ ID NO: 54355 - DNA, 541 bp, Zea Mays
  misc_feature (541)..(541): n is a, c, g, or t
ttcgtggtgaggtctggagcgcgactacgagctatgtagtcacggtccagcgactctgggagccgagacacttgacaacctggtacttgatctacgtgagatgaagaatgctggaaaccgacttatttcagcactttcactgagtggcatctcactggaaaatttggaattcctgaacctaaatgcatgtcagaagatctctgataaaggaattgaagctgttaccagtctttgtcctaatcttcagcgccttgctatctattggattgtaggactgacagactcaagtattgggcacattacaaagaactgcaagcatctagtgcaccttaacttgagcggttgtaagaatatcaaggataaaggaatgcagttgattgctaataattaccaaggactaaagagattgaacataaccaggtgtgttaagttgacagatgatgggcttaaccaagttcttctgaagtgttcttcacttgaaagcctaaacctttatgccctttcaagttttactgacagtgtttatagggagataggatcn

SEQ ID NO: 54356 - DNA, 768 bp, Zea Mays
  misc_feature (768)..(768): n is a, c, g, or t
gtggctaccaatactcgaacagggcctaatgtgtaggcatggcactaggttggatttgggcctaaacaggctttggtgggacatccacatccttgtccgcggcgaaacaaaatttcccacagcgagcgaggttcccctcccgactcggtgatggcggcgccggcggcggacgaggcatggtgccggaagacggtgccacgggtgatggaactggtgtgtcggcgccttccgcagcgggacgcatgcgcgctgcttgctgtcagtccctggtgctaccgtgccctcgttgctaactccaggctctgggaggtacttgatctacgtgagatgaagaatgctggaaaccgacttatttcagcactttcactgagtggcatctcactggaaaatttggaattcctgaacctaaatgcatgtcagaagatctctgataaaggaattgaagctgttaccagtctttgtcctaatcttcagcgccttgctatctattggattgtaggactgacagactcaagtattgggcacattacaaagaactgcaagcatctagtgcaccttaacttgagcggttgtaagaatatcaaggataaaggaatgcagttgattgctaataattaccaaggactaaagagattgaacataaccaggtgtgttaagttgacagatgatgggcttaaccaagttcttctgaagtgttcttcacttgaaagcctaaacctttatgccctttcaagttttactgacagtgtttatagggagataggatcn

SEQ ID NO: 54357 - DNA, 1052 bp, Zea Mays
  misc_feature (1052)..(1052): n is a, c, g, or t
gtggctaccaatactcgaacagggcctaatgtgtaggcatggcactaggttggatttgggcctaaacaggctttggtgggacatccacatccttgtccgcggcgaaacaaaatttcccacagcgagcgaggttcccctcccgactcggtgatggcggcgccggcggcggacgaggcatggtgccggaagacggtgccacgggtgatggaactggtgtgtcggcgccttccgcagcgggacgcatgcgcgctgcttgctgtcagtccctggtgctaccgtgccctcgttgctaactccaggctctgggaggtacttgatctacgtgagatgaagaatgctggaaaccgacttatttcagcactttcactgagtggcatctcactggaaaatttggaattcctgaacctaaatgcatgtcagaagatctctgataaaggaattgaagctgttaccagtctttgtcctaatcttcagcgccttgctatctattggattgtaggactgacagactcaagtattgggcacattacaaagaactgcaagcatctagtgcaccttaacttgagcggttgtaagatgtatagcgtgaagctaggtagtgacgacgggatccgaagccatagagatcgatgtgcacaagcgctgcctcggacgtggcggcctgtgtgtggatgtccatggcaacctctatgttccggactcagaggaagaagactacgacatcgaggtcgagccgccgagcaaaaatattctgaactcctaaagaacactccagaatgcgatgattgcttcagtctccgtgtatgggcataacgatagaggaggggcaaatgcataattttacatctacaacctcaaaaaatatcaaggataaaggaatgcagttgattgctaataattaccaaggactaaagagattgaacataaccaggtgtgttaagttgacagatgatgggcttaaccaagttcttctgaagtgttcttcacttgaaagcctaaacctttatgccctttcaagttttactgacagtgtttatagggagataggatcn

SEQ ID NO: 54358 - DNA, 551 bp, Zea Mays
tccagattgttaaagagtgcattcatatgaattatgaaactccagttatgtttgttttactgtggctgtttctgttagcctgacagaaatgagcgggtctgttcactggtaggtttcatcaagtaaatgaccgaattggctctcccagatatggagacttttgtagagggataaaagttcttactttcagcagaatttcatgatttttggttgagtagtttgtgagatatcgaattttgaaagttaactatgctgctgtctaaaacagattcagtcagttatcttgttagatgttttagaacttatagatggcagaatttaattatccatcgaataccgaagttgtagaatattttgtgtagatactcatggagtatttgtttgatatcaccactgttataattttaaagatacaaaattaacaaacaacattgctattgcatggcatgtggttcagagtgggaggttttccaccaggtcttggtttcaggtgtaggatcgatttgttaattgttggcaaatgtttgtgaaatatttgtactaagttttct

SEQ ID NO: 54359 - DNA, 443 bp, Zea Mays
ttcggtgcgtggatgtgggaaaagggttgtgggccgttggatgctaagtcagagtcatctgtggcgtcgcttcttttctcccgcaaagaaaaccctagtggtggccttttcccccttttgcccctacttggccgccacccctttccccccctcccacacttggccgcccctctctccttttcccttggactggctttcctctcctcccatggcagcccctctccacggcttcctcctccctctagatctccccccgcgcagcaaggatcgagaagaggaggagcacattgagttgaaggggaagagaggatcaaggagatgttcttccccatctcttcttgcagaatttcttggggaaaccctaggtatggatgagatccttgttgctccctgtaattatgtgcttttggaggttgtggatcatgggaattaaaggattagag

SEQ ID NO: 54360 - DNA, 778 bp, Zea Mays
agaaagtgtaacaccccgggatcctcaaacacccagaatgctactaaactacacatctaacattcatatataaaatttcgacagcatcccctttgaaaattacataaacggggaagcaacaaaatataaatagatatcatgataagagaacataatagacattaataatctgctagcaatggaaagacaaccataacggcatgaactaaatcaaccagtgtgcacaactagttagaaacaatatcctttgacaagaagtttctaattaaatcatgactgcgcctaagcagcgttattatgagagtgaaggtggatgtgctgctacttcccacttcccttgatgagcaacaagcacctgcattgagtaatgcaagagtgagatgaaacatctcagcaagcgaattattttgacaagatatttaaaccacaaattgaattaatcaacattttaaaagaatcacaattaagatcagaaattcttgtagatatagaactcagtagtctcaatataaccaataccatctcatttccttaaacaaccacaatagtttgtataacacttccctgcgtcaacaatacctgcaaatatcacttcaatgtatgcataggaacacaaagtgtaggtactctgtcttcatacctctgagggtataaaaccacatcatatgcaaatatcacttcaatgaatgcatatgaatgcaatgcatatgtcctctgccttcatacctctaagggtatgaagccgcatcgtacccctcctcgggcaacgtacgatgct

SEQ ID NO: 54361 - DNA, 1204 bp, Zea Mays
agccgcgttgctgggaagtctggaacaaggaagcagccgtccccgtccagccttccgccccgcacgccgcaagccgtgctcctgccttcctacccgtcgcgcgcatcgccgattcaccggtgcccgtcgctcgcagacctctccctcgcccctcgcccagcttgtcggaggccgaaattgatttgctctgtccagctctgggctctgctgctttggcctccaagcgcgccatgtgtttctatcgacaataaaattcacaacttgccggagcttgcaactgttctgctctaaaccagtgaaacgtgaagactgaacctgcttctgcttggctgcttgctccaattcaagaatcctctcttctcggcttacttcatttactcttgcttctgaggaagatgtcaagcagaggcagatcattgaaaatcgtgccagaaatataagccacaatgttaggtgcactgagtgtggtagccaatcgattgaagattcacaggctgatgttgctattctccttaggaagctcattcgtgatgaaataaaagcaggaaagagtgataaagagatctacaagaaactagaggatgattatggggagacagtactatatgcccctaaatttgatcttcagactgctgggatttggctttcgcctgtcattgttggtggtatagcagctggaatctgggcttaccaaaggcataggcaaaggacaaatgttcacattatggctctgaacctggtccgaggggtaccactgactccaagggagaaggagaccatgctagacatccttacacctccaccggctccaaggaaatggtggtggccaggcaaatgatgtagaattcatgtgctggacctggtagatgctcacaaatggttaggatgcaaattacagtttggatgcatgatactttgatcgtgactttcagtttaaccaaaagcctgttcatttggctataattcatacaggcttctactagctcaatagtgttttgtctctatggattgtagctgcagcagctcaaacagttggctttaatccgaagcgaacaactagaagtcaaaactttgtaatgtgtactctatcatcgaactagttgtatgtcacacccgattttggaaggcaaaccgaatgcgaaccatgtatgtgtcaggatcagaaacccacgtacacatcgattatataattagacattatcac

SEQ ID NO: 54362 - DNA, 1251 bp, Zea Mays
agccgcgttgctgggaagtctggaacaaggaagcagccgtccccgtccagccttccgccccgcacgccgcaagccgtgctcctgccttcctacccgtcgcgcgcatcgccgattcaccggtgcccgtcgctcgcagacctctccctcgcccctcgcccagcttgtcggaggccgaaattgatttgctctgtccagctctgggctctgctgctttggcctccaagcgcgccatgtgtttctatcgacaataaaattcacaatgtgcttgcccctagcagcttgccggagcttgcaactgttctgctctaaaccagtgaaacgtgaagactgaacctgcttctgcttggctgcttgctccaattcaagaatcctctcttctcggcttacttcatttactcttgcttatcaattacattgaattttaccatggcagctgaggaagatgtcaagcagaggcagatcattgaaaatcgtgccagaaatataagccacaatgttaggtgcactgagtgtggtagccaatcgattgaagattcacaggctgatgttgctattctccttaggaagctcattcgtgatgaaataaaagcaggaaagagtgataaagagatctacaagaaactagaggatgattatggggagacagtactatatgcccctaaatttgatcttcagactgctgggatttggctttcgcctgtcattgttggtggtatagcagctggaatctgggcttaccaaaggcataggcaaaggacaaatgttcacattatggctctgaacctggtccgaggggtaccactgactccaagggagaaggagaccatgctagacatccttacacctccaccggctccaaggaaatggtggtggccaggcaaatgatgtagaattcatgtgctggacctggtagatgctcacaaatggttaggatgcaaattacagtttggatgcatgatactttgatcgtgactttcagtttaaccaaaagcctgttcatttggctataattcatacaggcttctactagctcaatagtgttttgtctctatggattgtagctgcagcagctcaaacagttggctttaatccgaagcgaacaactagaagtcaaaactttgtaatgtgtactctatcatcgaactagttgtatgtcacacccgattttggaaggcaaaccgaatgcgaaccatgtatgtgtcaggatcagaaacccacgtacacatcgattatataattagacattatcac

SEQ ID NO: 54363 - DNA, 1822 bp, Zea Mays
agccgcgttgctgggaagtctggaacaaggaagcagccgtccccgtccagccttccgccccgcacgccgcaagccgtgctcctgccttcctacccgtcgcgcgcatcgccgattcaccggtgcccgtcgctcgcagacctctccctcgcccctcgcccagcttgtcggaggccgaaattgatttgctctgtccagctctgggctctgctgctttggcctccaagcgcgccatgtgtttctatcgacaataaaattcacaatgtgcttgcccctagcagcttgccggagcttgcaactgttctgctctaaaccagtgaaacgtgaagactgaacctgcttctgcttggctgcttgctccaattcaagaatcctctcttctcggcttacttcatttactcttgcttgtaagcttttatgcctcaacaaagttcactgttatgcacattttttctgattaatatattagttatatttatactctataatttatatcacaaattgcctaaatcttagcaaagttcactattatgcatattttatttcactgttatttttatagtttatatttacaaagttcactattatgcatttgatgtgctgctatttttatatgcagtgatccgcgttgtaactgtggttgaaacttgtcttataatttactgaaagagaattctttttgcaaggataaagtcatcatcgctcgttttcaaaatatgaaggatcgaaaacttaccttataatctttaaactttattagtcatttatttataggataggtgattaggttacattgtttggtattcctggtcaacagtttagttgactgctctttttgaaccagagatggtgcaatttgtttatgtgcaactgttgtcatgtcatatacccacctcacaagttattagctattacttcacctgtttgctttctttgctttcaggttctattccttgttaactgactgctgtaatacagatcaattacattgaattttaccatggcagctgaggaagatgtcaagcagaggcagatcattgaaaatcgtgccagaaatataagccacaatgttaggtgcactgagtgtggtagccaatcgattgaagattcacaggctgatgttgctattctccttaggaagctcattcgtgatgaaataaaagcaggaaagagtgataaagagatctacaagaaactagaggatgattatggggagacagtactatatgcccctaaatttgatcttcagactgctgggatttggctttcgcctgtcattgttggtggtatagcagctggaatctgggcttaccaaaggcataggcaaaggacaaatgttcacattatggctctgaacctggtccgaggggtaccactgactccaagggagaaggagaccatgctagacatccttacacctccaccggctccaaggaaatggtggtggccaggcaaatgatgtagaattcatgtgctggacctggtagatgctcacaaatggttaggatgcaaattacagtttggatgcatgatactttgatcgtgactttcagtttaaccaaaagcctgttcatttggctataattcatacaggcttctactagctcaatagtgttttgtctctatggattgtagctgcagcagctcaaacagttggctttaatccgaagcgaacaactagaagtcaaaactttgtaatgtgtactctatcatcgaactagttgtatgtcacacccgattttggaaggcaaaccgaatgcgaaccatgtatgtgtcaggatcagaaacccacgtacacatcgattatataattagacattatcac

SEQ ID NO: 54364 - DNA, 1333 bp, Zea Mays
gccctagccgcgttgctgggaagtctggaacaaggaagcagccgtccccgtccagccttccgccccgcacgccgcaagccgtgctcctgccttcctacccgtcgcgcgcatcgccgattcaccggtgcccgtcgctcgcagacctctccctcgcccctcgcccagcttgtcggaggccgaaattgatttgctctgtccagctctgggctctgctgctttggcctccaagcgcgccatgtgtttctatcgacaataaaattcacaacaagtgcacttcgaattactggataattggagctgtgtgcagtgtgcttgcccctagcagcttgccggagcttgcaactgttctgctctaaaccagtgaaacgtgaagactgaacctgcttctgcttggctgcttgctccaattcaagaatcctctcttctcggcttacttcatttactcttgcttgttctattccttgttaactgactgctgtaatacagatcaattacattgaattttaccatggcagctgaggaagatgtcaagcagaggcagatcattgaaaatcgtgccagaaatataagccacaatgttaggtgcactgagtgtggtagccaatcgattgaagattcacaggctgatgttgctattctccttaggaagctcattcgtgatgaaataaaagcaggaaagagtgataaagagatctacaagaaactagaggatgattatggggagacagtactatatgcccctaaatttgatcttcagactgctgggatttggctttcgcctgtcattgttggtggtatagcagctggaatctgggcttaccaaaggcataggcaaaggacaaatgttcacattatggctctgaacctggtccgaggggtaccactgactccaagggagaaggagaccatgctagacatccttacacctccaccggctccaaggaaatggtggtggccaggcaaatgatgtagaattcatgtgctggacctggtagatgctcacaaatggttaggatgcaaattacagtttggatgcatgatactttgatcgtgactttcagtttaaccaaaagcctgttcatttggctataattcatacaggcttctactagctcaatagtgttttgtctctatggattgtagctgcagcagctcaaacagttggctttaatccgaagcgaacaactagaagtcaaaactttgtaatgtgtactctatcatcgaactagttgtatgtcacacccgattttggaaggcaaaccgaatgcgaaccatgtatgtgtcaggatcagaaacccacgtacacatcgattatataattagacattatcac

SEQ ID NO: 54365 - DNA, 1274 bp, Zea Mays
tgccctagccgcgttgctgggaagtctggaacaaggaagcagccgtccccgtccagccttccgccccgcacgccgcaagccgtgctcctgccttcctacccgtcgcgcgcatcgccgattcaccggtgcccgtcgctcgcagacctctccctcgcccctcgcccagcttgtcggaggccgaaattgatttgctctgtccagctctgggctctgctgctttggcctccaagcgcgccatgtgtttctatcgacaataaaattcacaacttgccggagcttgcaactgttctgctctaaaccagtgaaacgtgaagactgaacctgcttctgcttggctgcttgctccaattcaagaatcctctcttctcggcttacttcatttactcttgcttgttctattccttgttaactgactgctgtaatacagatcaattacattgaattttaccatggcagctgaggaagatgtcaagcagaggcagatcattgaaaatcgtgccagaaatataagccacaatgttaggtgcactgagtgtggtagccaatcgattgaagattcacaggctgatgttgctattctccttaggaagctcattcgtgatgaaataaaagcaggaaagagtgataaagagatctacaagaaactagaggatgattatggggagacagtactatatgcccctaaatttgatcttcagactgctgggatttggctttcgcctgtcattgttggtggtatagcagctggaatctgggcttaccaaaggcataggcaaaggacaaatgttcacattatggctctgaacctggtccgaggggtaccactgactccaagggagaaggagaccatgctagacatccttacacctccaccggctccaaggaaatggtggtggccaggcaaatgatgtagaattcatgtgctggacctggtagatgctcacaaatggttaggatgcaaattacagtttggatgcatgatactttgatcgtgactttcagtttaaccaaaagcctgttcatttggctataattcatacaggcttctactagctcaatagtgttttgtctctatggattgtagctgcagcagctcaaacagttggctttaatccgaagcgaacaactagaagtcaaaactttgtaatgtgtactctatcatcgaactagttgtatgtcacacccgattttggaaggcaaaccgaatgcgaaccatgtatgtgtcaggatcagaaacccacgtacacatcgattatataattagacattatcac

SEQ ID NO: 54366 - DNA, 1301 bp, Zea Mays
gcgtgcacctgccctagccgcgttgctgggaagtctggaacaaggaagcagccgtccccgtccagccttccgccccgcacgccgcaagccgtgctcctgccttcctacccgtcgcgcgcatcgccgattcaccggtgcccgtcgctcgcagacctctccctcgcccctcgcccagcttgtcggaggccgaaattgatttgctctgtccagctctgggctctgctgctttggcctccaagcgcgccatgtgtttctatcgacaataaaattcacaatgtgcttgcccctagcagcttgccggagcttgcaactgttctgctctaaaccagtgaaacgtgaagactgaacctgcttctgcttggctgcttgctccaattcaagaatcctctcttctcggcttacttcatttactcttgcttgttctattccttgttaactgactgctgtaatacagatcaattacattgaattttaccatggcagctgaggaagatgtcaagcagaggcagatcattgaaaatcgtgccagaaatataagccacaatgttaggtgcactgagtgtggtagccaatcgattgaagattcacaggctgatgttgctattctccttaggaagctcattcgtgatgaaataaaagcaggaaagagtgataaagagatctacaagaaactagaggatgattatggggagacagtactatatgcccctaaatttgatcttcagactgctgggatttggctttcgcctgtcattgttggtggtatagcagctggaatctgggcttaccaaaggcataggcaaaggacaaatgttcacattatggctctgaacctggtccgaggggtaccactgactccaagggagaaggagaccatgctagacatccttacacctccaccggctccaaggaaatggtggtggccaggcaaatgatgtagaattcatgtgctggacctggtagatgctcacaaatggttaggatgcaaattacagtttggatgcatgatactttgatcgtgactttcagtttaaccaaaagcctgttcatttggctataattcatacaggcttctactagctcaatagtgttttgtctctatggattgtagctgcagcagctcaaacagttggctttaatccgaagcgaacaactagaagtcaaaactttgtaatgtgtactctatcatcgaactagttgtatgtcacacccgattttggaaggcaaaccgaatgcgaaccatgtatgtgtcaggatcagaaacccacgtacacatcgattatataattagacattatcac

SEQ ID NO: 54367 - DNA, 924 bp, Zea Mays
aggagaataacaaagaatagttcgtcatcgtcttcttcctcctccaacaaaaaccgcctaacatgctcctcccaagaacccattatctagaaacataaaattgatgcatataaagtctgttcatcagagaatgcatcagaatgtgagtgaactaatgaacttaagtagtctgtctgactaatgaacaataaattctaggccatacaattgccagattcaacaaaaattcaagttataaaactttgaatattttcttcacatgattaacgacgaacaacgtgattagaatgatcagcacacatgtaactaacaacactccacttatgatgcactccggttatacctgacagcagtccagttaataggtggtgcaaaaagtagattaacacagcaagagctcccttggtgctagaaagagattagtaagcaatggaatcctgttggtttaattcctttcaaaagccctaaccagcagaggtaacccggccacctcagacaaatagatcgataatggcagcacctaattcgcatgagtacctagtatcaagagtcaaaacgcttagtattaacacgtgaatctgcacgcagagcagactccagtgaccagttagctactacggtttcatctatacaagaaacgaacgggatatataaatcggaatctctcggtcagataggcgttcagttcaaaagctaaaaattgaggaaagtgaggtcgactatacgttcaatcgattgagaaactatagatgccgggaagaatccagataacagcaagcacgggaagaatcccccagttccgaatccgaagaatcgaagcaggagagccgtgcgaaccaggaggaaatccatgagaacagcaagcactagaacaacaaccttccaatggcggctcagtggacgacgatggcacgacggtggagc

SEQ ID NO: 54368 - DNA, 2664 bp, Zea Mays
gccagccgtctccttatccctgcgacgccgctcacctgggctcatcttccagccgccctctctgcccaacagcagagcacaacatcctctccactcggatccccaagccctcgcctccagctcttgccacggcatacatcccttgctcgtacctccacccggccacgtcctcgccggtggccagcgccgatgcatcgcccttcctagcgtcgaccttggcaccgcttccccgagcgccccagtcgagctcgcccctcccctcaaccatggacacgacgatctgcagcccttcttggtggccgagcccatattcctactcgcgccccctctttttccacctctacgtgtatcagctcgcccagccccaactcctctgtctttttcctgctcgcccatggcgccggctccctgctcggctcctctgctgaccgtgcgctgctccctgttgttctggttgccgtgcgcgcgaaactgctctggtcgactgtgtctgtaccccaggcccagatcgacatggcctcatgctcggcctactccagattcgtagcttgtcgctctgtatgctcgaccttgccttgtcgccgaaccccaacgccgtcgaccttcagctccgtgccttgtccctggctgcgcgcgtgtgcttcactatttggttatcatcgcgcaagctcctctgttgggctcgccagccgccattgtcctacccgcgccagcacgcgaccgtggtcgtgttcgtcgaattcgccaacgctctgttgccgattcgactatcgtcgttgttgtgtgcctcgctgcgtgctcgctgggtgtcatctgttgtatccagcacttgtgcttgccgctggctagcgttaacgctcgcgcctgctcgttgtcactgctcgttgttaccctagctattgaacccgtcctccctggctcgtgacttcgtcgtcgcctgagctcgcgctaacctgctcgaccccacctcaccagctcgctccaaattcgatcttgccatcgttccgaacatcatcaagaaaacccaagagtcgggtgaagacgaagctagcagcgtgatattcaccaagtgctcgacaaaagctccattctatactcgtcagctgttcgatagaggacttcaactaaaggtcgtcgtcgttcaggcaactaccagattgaattgagatgtggtgagccaattcactatttttattattgattttatgatcgggaaataagacgcttagtttgcgtatgaagtttaagttagaataccagtgatgcgaggtgtgcttcggtgtatttagttatcaagtatattcgaactagttctattttgcagagtgtagtatttcggtgacgcgtaggttaagtttagtattttaagcaagtatcgataagtctgtcgatgctaattgtgttcagtgagtgtaagttgaagtcaataatttgcgttaggagtcttataatagtaagcctaagttcattaatctttgggtgtattctttagctaagaaaaatatagtctttatacataattgtagtttcttgttcaagttaacttcgattaagctataggaacttgattattatgtttaatggtttagctgcatatggcgtgtgcttatgagtgatgtattgtgcttcgccattaagtaattaattatctatcatgtaacattatttaagttatgacattcatgtttatatgcattcatgtgcattatgcataccatataggtacgataattcttcacgtgatacgtaagacgaaccaagtcgacccccaagcgtgggctactccacatggtggtgctgatggacggacctgcctgaacaaatgccaagacaaaaggatggtcgtcaagtggtcgccacctaacaaacactaacgtagtgtttattctaggcaagccccggtgcattcgccccttccttgtgttttaaatgctttttcaccttacctgatgcattaggtgataggaattgtgtgataaacaattgatgcattaccattccttggaaactccttaatcccgattttataaaaagaactgataatgcttagccctgcttagaaactgaaaaaaatcatttgttttcaaaaagaatgattgtggaacattggttatgggcctttcgtttcaaaaatcaaagcaaacttatggtgatgattccacttcggccggagcgggttcatcattcggaaaagagtacccctgtcgggtaccgaaaatgggaaaatggtttgaatacatctagaccagacgctgagcggacatggtcgtccgtctgtgtcgattaaggaccgttcgatgtaggcctgttgtggtggagactttgcaactagccacatgctctggtaagcctgaacctggctattccatacgtgaaaagacaaccgcgcactgggcatgggagatggtgggagaagcgtgtaccctcctggctagaggctggatggaggagtactatgctcccggatagcgcggaccggttcacgttgtggaggatctgtgggaacgattgacatatgcaagggttaagtgctacatatgttgtgtggttagggatccccagctaggtataatcggtttgaatcgtcgttgctcctcagtcatggagactctaccctccgaccactcatcgtagttgacaagtgaaatatgaattggctaaaag

SEQ ID NO: 54369 - DNA, 2013 bp, Zea Mays
ctttataggaagaaatcctctccatattcccgagaggactatcaaacttataagccaaaataaggtgctgcacaaaaagataaaagccaaggttaacatttaaatatgataatatatccttccattttgaaattcataggagaacgttagaagatacttcagtgtttaaggcactaaagaacatagggcagtgatgctgggtaccgggaactcactgtactaccatcaaggtctgaagccaacatggatagagagaataatggtttctagtttccatttgcaggtctgtaaactgttcactctaacatggattaagttgacttatatgttctttcaaactaatccattcttttttgtcctgcgaacaaaataactaagcagattcatttggaagtttgaacctctgttgattgagaccaaacttaactggcaagactataaaagtttccaaaccaaccctgactgcgtgtaccactcccttgataagggtcatcacaggagaacagcatagcactcaaaattaccaaatgtaaagattcaagcattaaaaatgaatggagaaaagttacatcagttatttatgactagtgagtactgattaataaggtagtgtttggttctggagcgggacatcaaggctggagtcgtccccagagaaaaatattcctctagattcagggatacatccatccccaaaaactgaggtatgcagccatcccacccaccccccccccccccagacagtgttttatttgtgtttggcatcagaggagaatggagagagcacagcgagctcggctccgacgcaggcggacagcggacgcagcgcagatggcaagggcaaggcgcgggtgagctcagtccgggaagacatggccccggcaagggtgggcaagctcgacaccagcatcacgagcgagctcagccccagcggcggcgcaggtggccatggcggtggcgtgggcagccctgacggcagcgctagcggccccaacggttacacaggcagccccaatgagggaagccacatggcgcgggcggagcctagtgtgagctcggccatggtgcatttgaactgcattgaaggaagaagcagcagcagagagaggatggcagatgaacgccacctaacagatgtctaaccgtgtacagacatgatgttatccccttcattccatccctccaaccaaacacagagaaaggacgcccccgacctcccaaccaaacaccgagatagaatcatcctatcccaaaaaaatagagtggatccatttcatccctctcatcccaaaaccaaacacaccccaaagtatgacagcttaagccttataattcgagaagtttctcctaccccaggttatatgttccgtataatagatgcatccactaaattcaattgcaaatatctctggagtaatttctaacagtgcattctattggagaacacaaagattcagtacttgcagaggccagaggtgtaatgtcaggatactactcatagtcatagttatatgagatagcaatgtatcagaaaaatgctctgaaacaggtttgttgcacgaagtcacacaaacacatgcatctttcagtcaggttctgaacttttttttctgtagctcatatccttcttgttgacttccaacgaaataattgatgacaccagttctttctcagtctttgatcttaggtatttgaaatgccaatttacattttcatgacgaatcaccaattgtcttgcatctttctagcaatgaattgtcagttggaaaggaagaggggggaggggtgtcaagaaatatttagcatgattgcaccaatacatctgattgcacatgatatgccccttatacattaaacagcattcaatgcttatgttgatactcataaaaataaatgtacaaatcaaaaataaagaaaagagccattgtgggactgaattaaaagtcaacttcaatacattggtgcacagctacatagagtaagttgccaagacaatagacatagagtaaattg

SEQ ID NO: 54370 - DNA, 1485 bp, Zea Mays
gatttaatcggtcaaaactgatagtattaacttagataaatctaatatgactaaattacgtgaacgtaagacggaaggagtaggaaaaaaaaacgttggtggctttttgtgccgcatcgtacaaacacagaagtaggacaagcagttggggagccgtcgtccgggactccgggctcgcctaaaaagccaccaattgatgagagttgaccaccgttcgtttccactccgcccgccttctcagaatccgatggcccaccttccctcctctccggcggccgctgtacccaccggccaccgcgtctcgccctcgcctcattcttgccgttccctcccgcagctgaagaccgtactgttgtcgataggagccgccgcgggtccccctaggcggtcatggaggggaatggaatcggtggccgcggctcccacgggctcggataacgccgtcacctctatgagttagaacaacaccttgaccgcttcctgaagtctgcatcgatggccaaaataccattacctttcaatcgctcaacaattagaagcatacttattcagactgtgagtgcatcaaattgcacccaaggatcactcagatactggttgtctgctggacctggagacttccagttatcttcatctggctgtacaaacccagccctctatgctgttgttattgaaagcccatccttacaagtaccgtcctgctgcagagtggtcacatcatctataccgataaagtctcctcaatttgcagtcatgaaaagcgtgaattacttgcccaatgcactcaccaaggtggaaggagaagagaatggtgcatttactggcatttggctagacgatgagggcttcgttgcagagggttcgaacatgaatgttggcttcgtgacaaagaacaaggagcttctcatgcctcgttttgacaagatcctgagtgggtgcacagcaagacgggttctgaccctcgctgagcatctagtagctcatggaaagctcagcagggtaatatcaaggaatgtgagtgttgaggaagggaagatggccgatgagatgatgctcatcggtagtggcattcttgtcaaacctgttgttcagtgggatgataagataattggttctggacaagaaggcccgatagctcaagcgctttatgaccttattctcgaggacatgagatctggtccgccgtctgttcgtatccccatcccttactaaaactgtttggagttgtgcaaatgattacaagggtgaacactgatttgttggttgtcagagtttggtcaaaacgagaggttggacgaactcatagaagagaacaagtcggcaacagccgaaattgtcaaagagattgatatcttaatttgatgtacaataggacttaagggcctacaaacatttgtgaaaatatttgtaatatataactcgggaatatgttgcaatgatgtttaccgtttgttggttttgcatgcactgactatatgcccctcc

SEQ ID NO: 54371 - DNA, 1664 bp, Zea Mays
gatttaatcggtcaaaactgatagtattaacttagataaatctaatatgactaaattacgtgaacgtaagacggaaggagtaggaaaaaaaaacgttggtggctttttgtgccgcatcgtacaaacacagaagtaggacaagcagttggggagccgtcgtccgggactccgggctcgcctaaaaagccaccaattgatgagagttgaccaccgttcgtttccactccgcccgccttctcagaatccgatggcccaccttccctcctctccggcggccgctgtacccaccggccaccgcgtctcgccctcgcctcattcttgccgttccctcccgcagctgaagaccgtactgttgtcgataggagccgccgcgggtccccctaggcggtcatggaggggaatggaatcggtggccgcggctcccacgggctcggataacgccggttgccgaaaggctcgatacattccatgcgtctggagctaggaatcaaaattacatggccatgtactctagcatttttggtggaattacaacaaacccttctgcaatggtgataccaatcgatgatcacatggttcatagaggtcatggggtttttgatactgcagctattatggatggtcacctctatgagttagaacaacaccttgaccgcttcctgaagtctgcatcgatggccaaaataccattacctttcaatcgctcaacaattagaagcatacttattcagactgtgagtgcatcaaattgcacccaaggatcactcagatactggttgtctgctggacctggagacttccagttatcttcatctggctgtacaaacccagccctctatgctgttgttattgaaagcccatccttacaagtaccgtcctgctgcagagtggtcacatcatctataccgataaagtctcctcaatttgcagtcatgaaaagcgtgaattacttgcccaatgcactcaccaaggtggaaggagaagagaatggtgcatttactggcatttggctagacgatgagggcttcgttgcagagggttcgaacatgaatgttggcttcgtgacaaagaacaaggagcttctcatgcctcgttttgacaagatcctgagtgggtgcacagcaagacgggttctgaccctcgctgagcatctagtagctcatggaaagctcagcagggtaatatcaaggaatgtgagtgttgaggaagggaagatggccgatgagatgatgctcatcggtagtggcattcttgtcaaacctgttgttcagtgggatgataagataattggttctggacaagaaggcccgatagctcaagcgctttatgaccttattctcgaggacatgagatctggtccgccgtctgttcgtatccccatcccttactaaaactgtttggagttgtgcaaatgattacaagggtgaacactgatttgttggttgtcagagtttggtcaaaacgagaggttggacgaactcatagaagagaacaagtcggcaacagccgaaattgtcaaagagattgatatcttaatttgatgtacaataggacttaagggcctacaaacatttgtgaaaatatttgtaatatataactcgggaatatgttgcaatgatgtttaccgtttgttggttttgcatgcactgactatatgcccctcc

SEQ ID NO: 54372 - DNA, 1717 bp, Zea Mays
gatttaatcggtcaaaactgatagtattaacttagataaatctaatatgactaaattacgtgaacgtaagacggaaggagtaggaaaaaaaaacgttggtggctttttgtgccgcatcgtacaaacacagaagtaggacaagcagttggggagccgtcgtccgggactccgggctcgcctaaaaagccaccaattgatgagagttgaccaccgttcgtttccactccgcccgccttctcagaatccgatggcccaccttccctcctctccggcggccgctgtacccaccggccaccgcgtctcgccctcgcctcattcttgccgttccctcccgcagctgaagaccgtactgttgtcgataggagccgccgcgggtccccctaggcggtcatggaggggaatggaatcggtggccgcggctcccacgggctcggataacgccgcgaccggaacaattgcccatgcaaatgaagttcctgtcttgtctttctctgaggttgccgaaaggctcgatacattccatgcgtctggagctaggaatcaaaattacatggccatgtactctagcatttttggtggaattacaacaaacccttctgcaatggtgataccaatcgatgatcacatggttcatagaggtcatggggtttttgatactgcagctattatggatggtcacctctatgagttagaacaacaccttgaccgcttcctgaagtctgcatcgatggccaaaataccattacctttcaatcgctcaacaattagaagcatacttattcagactgtgagtgcatcaaattgcacccaaggatcactcagatactggttgtctgctggacctggagacttccagttatcttcatctggctgtacaaacccagccctctatgctgttgttattgaaagcccatccttacaagtaccgtcctgctgcagagtggtcacatcatctataccgataaagtctcctcaatttgcagtcatgaaaagcgtgaattacttgcccaatgcactcaccaaggtggaaggagaagagaatggtgcatttactggcatttggctagacgatgagggcttcgttgcagagggttcgaacatgaatgttggcttcgtgacaaagaacaaggagcttctcatgcctcgttttgacaagatcctgagtgggtgcacagcaagacgggttctgaccctcgctgagcatctagtagctcatggaaagctcagcagggtaatatcaaggaatgtgagtgttgaggaagggaagatggccgatgagatgatgctcatcggtagtggcattcttgtcaaacctgttgttcagtgggatgataagataattggttctggacaagaaggcccgatagctcaagcgctttatgaccttattctcgaggacatgagatctggtccgccgtctgttcgtatccccatcccttactaaaactgtttggagttgtgcaaatgattacaagggtgaacactgatttgttggttgtcagagtttggtcaaaacgagaggttggacgaactcatagaagagaacaagtcggcaacagccgaaattgtcaaagagattgatatcttaatttgatgtacaataggacttaagggcctacaaacatttgtgaaaatatttgtaatatataactcgggaatatgttgcaatgatgtttaccgtttgttggttttgcatgcactgactatatgcccctcc

SEQ ID NO: 54373 - DNA, 1420 bp, Zea Mays
gatttaatcggtcaaaactgatagtattaacttagataaatctaatatgactaaattacgtgaacgtaagacggaaggagtaggaaaaaaaaacgttggtggctttttgtgccgcatcgtacaaacacagaagtaggacaagcagttggggagccgtcgtccgggactccgggctcgcctaaaaagccaccaattgatgagagttgaccaccgttcgtttccactccgcccgccttctcagaatccgatggcccaccttccctcctctccggcggccgctgtacccaccggccaccgcgtctcgccctcgcctcattcttgccgttccctcccgcagctgaagaccgtactgttgtcgataggagccgccgcgggtccccctaggcggtcatggaggggaatggaatcggtggccgcggctcccacgggctcggataacgccgcagcgaccggaacaattgcccatgcaaatgaagttcctgtcttgtctttctctgaggttgccgaaaggctcgatacattccatgcgtctggagctaggaatcaaaattacatggccatgtactctagcatttttggtggaattacaacaaacccttctgcaatggtgataccaatcgatgatcacatggttcatagaggtcatggggtttttgatactgcagctattatggatggtcacctctatgagttagaacaacaccttgaccgcttcctgaagtctgcatcgatggccaaaataccattacctttcaatcgctcaacaattagaagcatacttattcagactgtgagtgcatcaaattgcacccaaggatcactcagatactggttgtctgctggacctggagacttccagttatcttcatctggctgtacaaacccagccctctatgctgttgttattgaaagcccatccttacaagtaccgtcctgctgcagagtggtcacatcatctataccgataaagtctcctcaatttgcagtcatgaaaagcgtgaattacttgcccaatgcactcaccaaggtggaaggagaagagaatggtgcatttactggcatttggctagacgatgagggcttcgttgcagagggttcgaacatgagatctggtccgccgtctgttcgtatccccatcccttactaaaactgtttggagttgtgcaaatgattacaagggtgaacactgatttgttggttgtcagagtttggtcaaaacgagaggttggacgaactcatagaagagaacaagtcggcaacagccgaaattgtcaaagagattgatatcttaatttgatgtacaataggacttaagggcctacaaacatttgtgaaaatatttgtaatatataactcgggaatatgttgcaatgatgtttaccgtttgttggttttgcatgcactgactatatgcccctcc

SEQ ID NO: 54374 - DNA, 1412 bp, Zea Mays
gatttaatcggtcaaaactgatagtattaacttagataaatctaatatgactaaattacgtgaacgtaagacggaaggagtaggaaaaaaaaacgttggtggctttttgtgccgcatcgtacaaacacagaagtaggacaagcagttggggagccgtcgtccgggactccgggctcgcctaaaaagccaccaattgatgagagttgaccaccgttcgtttccactccgcccgccttctcagaatccgatggcccaccttccctcctctccggcggccgctgtacccaccggccaccgcgtctcgccctcgcctcattcttgccgttccctcccgcagctgaagaccgtactgttgtcgataggagccgccgcgggtccccctaggcggtcatggaggggaatggaatcggtggccgcggctcccacgggctcggataacgccgcagcgaccggaacaattgcccatgcaaatgaagttcctgtcttgtctttctctgaggttgccgaaaggctcgatacattccatgcgtctggagctaggaatcaaaattacatggccatgtactctagcatttttggtggaattacaacaaacccttctgcaatggtgataccaatcgatgatcacatggttcatagaggtcatggggtttttgatactgcagctattatggatggtcatgaaaagcgtgaattacttgcccaatgcactcaccaaggtggaaggagaagagaatggtgcatttactggcatttggctagacgatgagggcttcgttgcagagggttcgaacatgaatgttggcttcgtgacaaagaacaaggagcttctcatgcctcgttttgacaagatcctgagtgggtgcacagcaagacgggttctgaccctcgctgagcatctagtagctcatggaaagctcagcagggtaatatcaaggaatgtgagtgttgaggaagggaagatggccgatgagatgatgctcatcggtagtggcattcttgtcaaacctgttgttcagtgggatgataagataattggttctggacaagaaggcccgatagctcaagcgctttatgaccttattctcgaggacatgagatctggtccgccgtctgttcgtatccccatcccttactaaaactgtttggagttgtgcaaatgattacaagggtgaacactgatttgttggttgtcagagtttggtcaaaacgagaggttggacgaactcatagaagagaacaagtcggcaacagccgaaattgtcaaagagattgatatcttaatttgatgtacaataggacttaagggcctacaaacatttgtgaaaatatttgtaatatataactcgggaatatgttgcaatgatgtttaccgtttgttggttttgcatgcactgactatatgcccctcc

SEQ ID NO: 54375 - DNA, 1386 bp, Zea Mays
gatttaatcggtcaaaactgatagtattaacttagataaatctaatatgactaaattacgtgaacgtaagacggaaggagtaggaaaaaaaaacgttggtggctttttgtgccgcatcgtacaaacacagaagtaggacaagcagttggggagccgtcgtccgggactccgggctcgcctaaaaagccaccaattgatgagagttgaccaccgttcgtttccactccgcccgccttctcagaatccgatggcccaccttccctcctctccggcggccgctgtacccaccggccaccgcgtctcgccctcgcctcattcttgccgttccctcccgcagctgaagaccgtactgttgtcgataggagccgccgcgggtccccctaggcggtcatggaggggaatggaatcggtggccgcggctcccacgggctcggataacgccgcgaccggaacaattgcccatgcaaatgaagttcctgtcttgtctttctctgagtcacctctatgagttagaacaacaccttgaccgcttcctgaagtctgcatcgatggccaaaataccattacctttcaatcgctcaacaattagaagcatacttattcagactagtggtcacatcatctataccgataaagtctcctcaatttgcagtcatgaaaagcgtgaattacttgcccaatgcactcaccaaggtggaaggagaagagaatggtgcatttactggcatttggctagacgatgagggcttcgttgcagagggttcgaacatgaatgttggcttcgtgacaaagaacaaggagcttctcatgcctcgttttgacaagatcctgagtgggtgcacagcaagacgggttctgaccctcgctgagcatctagtagctcatggaaagctcagcagggtaatatcaaggaatgtgagtgttgaggaagggaagatggccgatgagatgatgctcatcggtagtggcattcttgtcaaacctgttgttcagtgggatgataagataattggttctggacaagaaggcccgatagctcaagcgctttatgaccttattctcgaggacatgagatctggtccgccgtctgttcgtatccccatcccttactaaaactgtttggagttgtgcaaatgattacaagggtgaacactgatttgttggttgtcagagtttggtcaaaacgagaggttggacgaactcatagaagagaacaagtcggcaacagccgaaattgtcaaagagattgatatcttaatttgatgtacaataggacttaagggcctacaaacatttgtgaaaatatttgtaatatataactcgggaatatgttgcaatgatgtttaccgtttgttggttttgcatgcactgactatatgcccctcc

SEQ ID NO: 54376 - DNA, 1595 bp, Zea Mays
gatttaatcggtcaaaactgatagtattaacttagataaatctaatatgactaaattacgtgaacgtaagacggaaggagtaggaaaaaaaaacgttggtggctttttgtgccgcatcgtacaaacacagaagtaggacaagcagttggggagccgtcgtccgggactccgggctcgcctaaaaagccaccaattgatgagagttgaccaccctgaagaccgtactgttgtcgataggagccgccgcgggtccccctaggcggtcatggaggggaatggaatcggtggccgcggctcccacgggctcggataacgccgcagcgaccggaacaattgcccatgcaaatgaagttcctgtcttgtctttctctgaggttgccgaaaggctcgatacattccatgcgtctggagctaggaatcaaaattacatggccatgtactctagcatttttggtggaattacaacaaacccttctgcaatggtgataccaatcgatgatcacatggttcatagaggtcatggggtttttgatactgcagctattatggatggtcacctctatgagttagaacaacaccttgaccgcttcctgaagtctgcatcgatggccaaaataccattacctttcaatcgctcaacaattagaagcatacttattcagactgtgagtgcatcaaattgcacccaaggatcactcagatactggttgtctgctggacctggagacttccagttatcttcatctggctgtacaaacccagccctctatgctgttgttattgaaagcccatccttacaagtaccgtcctgctgcagagtggtcacatcatctataccgataaagtctcctcaatttgcagtcatgaaaagcgtgaattacttgcccaatgcactcaccaaggtggaaggagaagagaatggtgcatttactggcatttggctagacgatgagggcttcgttgcagagggttcgaacatgaatgttggcttcgtgacaaagaacaaggagcttctcatgcctcgttttgacaagatcctgagtgggtgcacagcaagacgggttctgaccctcgctgagcatctagtagctcatggaaagctcagcagggtaatatcaaggaatgtgagtgttgaggaagggaagatggccgatgagatgatgctcatcggtagtggcattcttgtcaaacctgttgttcagtgggatgataagataattggttctggacaagaaggcccgatagctcaagcgctttatgaccttattctcgaggacatgagatctggtccgccgtctgttcgtatccccatcccttactaaaactgtttggagttgtgcaaatgattacaagggtgaacactgatttgttggttgtcagagtttggtcaaaacgagaggttggacgaactcatagaagagaacaagtcggcaacagccgaaattgtcaaagagattgatatcttaatttgatgtacaataggacttaagggcctacaaacatttgtgaaaatatttgtaatatataactcgggaatatgttgcaatgatgtttaccgtttgttggttttgcatgcactgactatatgcccctcc

SEQ ID NO: 54377 - DNA, 1541 bp, Zea Mays
gatttaatcggtcaaaactgatagtattaacttagataaatctaatatgactaaattacgtgaacgtaagacggaaggagtaggaaaaaaaaacgttggtggctttttgtgccgcatcgtacaaacacagaagtaggacaagcagttggggagccgtcgtccgggactccgggctcgcctaaaaagccaccaattgatgagagttgaccaccgttcgtttccactccgcccgccttctcagaatccgatggcccaccttccctcctctccggcggccgctgtacccaccggccaccgcgtctcgccctcgcctcattcttgccgttccctcccgcagctgaagaccgtactgttgtcgataggagccgccgcgggtccccctaggcggtcatggaggggaatggaatcggtggccgcggctcccacgggctcggataacgccgcagcgaccggaacaattgcccatgcaaatgaagttcctgtcttgtctttctctgagtcacctctatgagttagaacaacaccttgaccgcttcctgaagtctgcatcgatggccaaaataccattacctttcaatcgctcaacaattagaagcatacttattcagactgtgagtgcatcaaattgcacccaaggatcactcagatactggttgtctgctggacctggagacttccagttatcttcatctggctgtacaaacccagccctctatgctgttgttattgaaagcccatccttacaagtaccgtcctgctgcagagtggtcacatcatctataccgataaagtctcctcaatttgcagtcatgaaaagcgtgaattacttgcccaatgcactcaccaaggtggaaggagaagagaatggtgcatttactggcatttggctagacgatgagggcttcgttgcagagggttcgaacatgaatgttggcttcgtgacaaagaacaaggagcttctcatgcctcgttttgacaagatcctgagtgggtgcacagcaagacgggttctgaccctcgctgagcatctagtagctcatggaaagctcagcagggtaatatcaaggaatgtgagtgttgaggaagggaagatggccgatgagatgatgctcatcggtagtggcattcttgtcaaacctgttgttcagtgggatgataagataattggttctggacaagaaggcccgatagctcaagcgctttatgaccttattctcgaggacatgagatctggtccgccgtctgttcgtatccccatcccttactaaaactgtttggagttgtgcaaatgattacaagggtgaacactgatttgttggttgtcagagtttggtcaaaacgagaggttggacgaactcatagaagagaacaagtcggcaacagccgaaattgtcaaagagattgatatcttaatttgatgtacaataggacttaagggcctacaaacatttgtgaaaatatttgtaatatataactcgggaatatgttgcaatgatgtttaccgtttgttggttttgcatgcactgactatatgcccctcc

SEQ ID NO: 54378 - DNA, 1540 bp, Zea Mays
aactgtatgcagggggaaatttatttttcaaggagcatgataacatgaagggtccagcacattaacaaggacccatcaatgaatccataaagtttctaccaacaaatagtctatgaattgaagccaggtagcagcaagggatttgaaaatcacatttaccgtgagagcaagaagttggacttttgggttcttgtgtgcaatgcgtttcttgagggactttaccacatcttttgcttgtctaagaatatgacaatagaaaaatgtttactacaaggtgatcatggcacatcaatacaggaatgcagaacgaccagaattacaacaatgcagttcaagtttcatgaaaaactgggtcaattctttttcttttaataatgcatgcaacaatgttcttgccaccctttctagaacaaagatctagtttcatggaaggttgctgttttcatatattttaatataattagagcaagttccaagagcaattagatattctctttatacttcaaatggaaagtaattttttaattaacagagattccatcacaagtcgtggcacaaaagtgaaaagaatagttcacaagatggaaaattgaaagcagacattaagtgacagcagaaagaaacccagaaaattatgaagcagtcctgaaattgaaaactatgagcagagctccttcccctctttctttaaattctcaactcttactagcatgaaagatacatgatcttgaaattaacaattcttatttagccaacataaaaatgacgaatcccagtcctaagagtcaaaggcaaggaaaaaaaccaaacgaaatatccacaaatatgtcacgtctgcaaattttaccggagatgaataaagcatatgcatattacagtttatggttgtggcaacgaaccaaacactaaacgaaattcataaagaactagccccaatacaaaaaccatgaccaagttcaccatgtgtgtcctgcaacagaactcatggtagtaagagcatcttctcgtcgccagtcggcgctgctccttctcgttgccgtgctggtgctcttcgcgtccaccgccatggtgcagcagcagagaattgctcgtccgccatgttctccgccagggcgattgttccagcggtgcactaacctccccgtgcgcggcgccagcctgtactggacgaaccacgcggcgaacgcgttccgggcgccgcaggccaccagcggctgggtcgcggggggcgtcaacaccgagctcgccagcacaatggccggcaggagcctgttcatcgcctcgcactcccagggcggcaacagcgcggtgcccgtcctgatgacctacctggagagcacggcgacaacaccctcagggtcgccgtgcccactgggccggccgcggagtactcgggcggcgcgtacaccatctacgcgacggtggcgctgccggggaacagcacggtgcagaacactgtgtggcatccgggccgctctgtggcggggaaatcgcgacgcgcagctcggggcacggccgcgcagatcctgcggaaaatctc

SEQ ID NO: 54379 - DNA, 50 bp, Zea Mays
catcctgtctaagcccctgaaatctggcacggtaagtagattgatttgaa

SEQ ID NO: 54380 - DNA, 2061 bp, Zea Mays
cccgccgccgccgtgggacttcatcacgccgcttccgtcgacctccacgttgcactgtcgtacgggcgagtaagggtagtgctagggcttcagcatcgagtaaggggtccgcgcggaattgctcgccaggattctcctctgccgcgtccgcgtggacagcgctgcgctcacctactcctctggtaactttcgccgcccctgactctgccttaatcaatacattgtgatgcgctagtcggttcgagcttgggtggatggagtcgaggggtatgggatcgccggcaatggccaccgccgcgagctggtttgtgccgtcacgtccgggtccgattggggagaagagtgcccaaccgtttgatcgggttttgagattgggatttaatctaggtgctggttggtgcggttgatatcagcatcgttggttatagagcaaacgaccaggattgaaaacacataccctttcgcgagatttgattcgtggccgtaggttggagatccaaaggctagagcggttttagttaggggagcgattctggaccgttgatcctcgatcctgtggtcgtttttgcgcgctagctcgggggaatcacgatctaatcaggcgcgtcggaatttgatcggacggtagataatgtgctcatcattatctaccaaaatataatttatggtaaatttataacttagattaaagttgagataattatttatagaataaccactaatatgatttacactaaccaatttataatatagtttaatattttaatcacatagatcctctatagaatcataactccttgaccatgactccgatcttagcagttctcgatcccacgatctcgtagcaacgcgtagattattattctgtttgtacttatatttggtgtgatgttaattttttctataccatgtttgtttgtgttgctacgactagcagtgaggtttcgaggatctaaagaatcaccctggtacctggaattctcaagtgctagacaagttgtgcccttgaccacttttattacccaataatgttatttaatataacttattcatgcataggtttaaatttgatggaacccaataggtcaccctagtctgtttatcctttttaccttgtttacccctgaatcatttgggtagttttgctattgctttatatggttttgggttaatatttcattatatccatgttccaattattttgttattttatttatgtttatgtcaagatcattattgttaattggaacatggagcttacttgagaacacgtgccaccacaagggaggaatggaaccccttggctaactaattaggaaagctagtgaaagactaccttacccgaaaggggcaaggacagtaggggagttgcatgcaaggaggttctcgggttgattttgctgcgatggcggtcagacgagggatttttgcaagtgctcttcccataaactgtagcaggttttcagaagctagtggaactttgtaaaggcctcgtatcggatctctagccattcacctcggtagtgtctaagggccttgcaaaccctggcgacatgggaaacacgacttgtgggaaaagggtacaaccactgcagagtgtaaaactggtatactagccgagctcacggtcatgacaagctcaggactctcacatgattaatttatgtaacttaaatttaattggtcatatgcattgcatgggatttgttattaattttgttctattatttattatggtttgatatttacttacacttagtaactactaataaaattttgaccaacttataaaagcaatgctcagcttcaacctttattttgttgatcagccttacacttcacatgaactcccacctttggtgagttcatgcacaatattccccacaacttgttgagcgatgaacatgtgtgagctcaccattgctgtctcacacccccataggagaagaacatgtggttcaagaggagccacacaacgaggagtttgatctgatctagttggcgtttcccagttgactttatggcgccaaggacgattcttagttcgtttttatatttacc

SEQ ID NO: 54381 - DNA, 257 bp, Zea Mays
gtgggacttcatcacgccgcttccgtcgacctccacgttgcactgtcgtacgggcgagtaagggtagtgctagggcttcagcatcgagtaaggggtccgcgcggaattgctcgccaggattctcctctgccgcgtccgcgtggacagcgctgcgctcacctactcctctggagaagaacatgtggttcaagaggagccacacaacgaggagtttgatctgatctagttggcgtttcccagttgactttatggcgcca

SEQ ID NO: 54382 - DNA, 704 bp, Zea Mays
tatgatttgtctgagctgctcatggcaagtaccagaaaactctgtttttgtgatgggagataaccgaaacaacagctacgattcacatgtgtggggccctcttccagcaaaaaacatattggggagatcaatttttcggtattggcctcctggtcgaatagggggtactaccaagggttgcttcagccctgaattaagccctggagcaaagccagaatcacttactgatgtcaaatcgacaaagtaggagattgagaagttagttttggtggtgcctgatgtgcaggggaagcttcggttattcttcgtggtagaatgtcacagaggaatcctgtgttgtgtggcaggtagttctattagaacccagagagcggaagacaatttgattctcattgagtcattgggattgggattggattggccagaaggcacagaaaccattttgtctcagggtttcttgtccttttgccttgctgtatacgtacgtattagggaaacttgataccatgatggctgacctagttaagctgcaaaaaagtatggttccactgttgaaatctagagtctggaacatgatgaaatccgcgtacagcatgacgcgcaagtacatcctgtaaatggagaacgtgtctattcaatgtgccgttgaacaacgcagagaaactacccggattacttacgctaccgcagaaaaagatggatta

SEQ ID NO: 54383 - DNA, 2097 bp, Zea Mays
ctaccttccagtcttctcccctccctccagttcattcccatttcccaacccaaaccagcggctggcacggacgccggcgagccgcgcggcccggaggaccactgcctcctgcatatagccggcttccgcggccatgtcatccgtacacttctttcctgcctcctcccagaccccggtccccgcctgccttctcaaaacctctccaaagtcacccctcccgtgcccccgcacccttgccaccacctctctccagagtgttggcggcaattgcaatgcgtggcaccgcccgcacctacggctgcagcggagggtccgcacccctgcagcaccgtccgacgcgccgcctgtgggccccgatggcgggagcgggggcggcggcgcggggggagggagtggaggggaggatgaggaggaggagggggagaagaagaagggactgttgcccgagtggatgaacttgacaacagaggacgccaagacggtgctggccgcggtagctatctcgctcgctttccgaaccttcgtcgccgagccgcgcttcatcccctcgctctccatgttccccaccttcgacgtcggtgaccgcatcgtcgccgagaaggttacttactactttaggaagccatgtgttaatgatataataattttcaaaagccctccagtgctgcaggaggttgggtatactgataatgatgttttcattaaaagagtagttgccagggagggagatgttgttgaggttcatgaaggaaaactcgttgtgaatggtgagggtagaaatgaagaattcattcttgagccaccttcttatgacatgaatcctgtggtatgatttgtctgagctgctcatgggtaacatgtgaaattcctgtatacatgacttttatatgtttatgtttttctctgatatttatatacatgacttttatatgtttatgtttttctctgatatttatgtatgtagtatgaatgattctctatctcgcgacactttgtatgaccaacaaatggaagatacaatgattatgtttagttagacaacggactcccactcccagaagtcgcaggctcgcagcagtggctgcatcgttgtttggtagatgaatttataggttctgcaacctgcttttaatccatttcatgaaaaaatgcattttgagtggctcagtaccatgctatgccaaattatggataagagtaaactgatatattctgaatcatattaaccaacgaaaatagagttgcatctttcttgagagcacccacccaattgaatgcatatgcagcaacatgcacagataaaatgttttataaatatggtttcttctgctcggtagaatgtatttttcaaatccttgtaaaaaaagaatgttaattttcatgttttgtcttttgttttcttaaccatcttgatgcagcaagtaccagaaaactctgtttttgtgatgggagataaccgaaacaacagctacgattcacatgtgtggggccctcttccagcaaaaaacatattggggagatcaatttttcggtattggcctcctggtcgaatagggggtactaccaagggttgcttcagccctgaattaagccctggagcaaagccagaatcacttactgatgtcaaatcgacaaagtaggagattgagaagttagttttggtggtgcctgatgtgcaggggaagcttcggttattcttcgtggtagaatgtcacagaggaatcctgtgttgtgtggcaggtagttctattagaacccagagagcggaagacaatttgattctcattgagtcattgggattgggattggattggccagaaggcacagaaaccattttgtctcagggtttcttgtccttttgccttgctgtatacgtacgtattagggaaacttgataccatgatggctgacctagttaagctgcaaaaaagtatggttccactgttgaaatctagagtctggaacatgatgaaatccgcgtacagcatgacgcgcaagtacatcctgtaaatggagaacgtgtctattcaatgtgccgttgaacaacgcagagaaactacccggattacttacgctaccgcagaaaaagatggatta

SEQ ID NO: 54384 - DNA, 922 bp, Zea Mays
ctctgttcttgttggaaggcgcaggttcatatacgagtttaatatacgttgctgctgatgtacttttgtggaaagacaagaagacctctgctgcggtagttggtggtgcaactgtcctatgggttctgttcgaaattgtagaataccatctcctgaccctggtttctcatgtgctgatcgctgcactgaccatcttgttcctgtggtccaatgcgactgtctttatcaaaaaatatctgaagaccttgctgtaaacattgcgctagcattgcgtgctgacatcaacaaggcacttgccctgcttcgggagattgctctgggccataacctgatgaagttcctaggcgtggtcgtcgccctttggattctttcagagatcggggagctatgtgatctcctgagattgatgtacattgtggtcttgatcctccacacagtgccgatactgtaccacaagtatcaggaccaggtggacaatttcgctgcaaaggcgcacagggagctctgcaagcaatacgcggtcctggatgccaaagttctgagcaagattccaagagctccaccaaaagataagaaacagaactagaacgtggaggatgacaagcgccttgttttcggcttgggcgacgagagtttgtagccaatggtctgatgtggttcgtgggctttgtgtaggtgcacagtttcacgtatatgttctggtcgtgtaatctatatgtttatataaacctgtaggggtgttgatgaccatcgaaagtgtcgtaaatattcagtagtatatgtagcttagggcttaagcggttgtgtttataaggtcattgtcgttgtcgatgggaagtattatcatgttattttcaggactcaggagtataaaatgaaataaaatgtgaattcatctgaagctgaaacccaaactaagaga

SEQ ID NO: 54385 - DNA, 919 bp, Zea Mays
gtaagcacagcacgattcgtctgctgatgtacttttgtggaaagacaagaagacctctgctgcggtagttggtggtgcaactgtcctatgggttctgttcgaaattgtagaataccatctcctgaccctggtttctcatgtgctgatcgctgcactgaccatcttgttcctgtggtccaatgcgactgtctttatcaaaaagagtcctcctgatgttcctgaagtgcagatatctgaagaccttgctgtaaacattgcgctagcattgcgtgctgacatcaacaaggcacttgccctgcttcgggagattgctctgggccataacctgatgaagttcctaggcgtggtcgtcgccctttggattctttcagagatcggggagctatgtgatctcctgagattgatgtacattgtggtcttgatcctccacacagtgccgatactgtaccacaagtatcaggaccaggtggacaatttcgctgcaaaggcgcacagggagctctgcaagcaatacgcggtcctggatgccaaagttctgagcaagattccaagagctccaccaaaagataagaaacagaactagaacgtggaggatgacaagcgccttgttttcggcttgggcgacgagagtttgtagccaatggtctgatgtggttcgtgggctttgtgtaggtgcacagtttcacgtatatgttctggtcgtgtaatctatatgtttatataaacctgtaggggtgttgatgaccatcgaaagtgtcgtaaatattcagtagtatatgtagcttagggcttaagcggttgtgtttataaggtcattgtcgttgtcgatgggaagtattatcatgttattttcaggactcaggagtataaaatgaaataaaatgtgaattcatctgaagctgaaacccaaactaagaga

SEQ ID NO: 54386 - DNA, 994 bp, Zea Mays
ccttttcctcatcttcttgtcttatattgtgattttcctctcttttttttttgcaagttgattgcttcgtcgggctgaaattctgcgttcctcaactgctgatgtacttttgtggaaagacaagaagacctctgctgcggtagttggtggtgcaactgtcctatgggttctgttcgaaattgtagaataccatctcctgaccctggtttctcatgtgctgatcgctgcactgaccatcttgttcctgtggtccaatgcgactgtctttatcaaaaagagtcctcctgatgttcctgaagtgcagatatctgaagaccttgctgtaaacattgcgctagcattgcgtgctgacatcaacaaggcacttgccctgcttcgggagattgctctgggccataacctgatgaagttcctaggcgtggtcgtcgccctttggattctttcagagatcggggagctatgtgatctcctgagattgatgtacattgtggtcttgatcctccacacagtgccgatactgtaccacaagtatcaggaccaggtggacaatttcgctgcaaaggcgcacagggagctctgcaagcaatacgcggtcctggatgccaaagttctgagcaagattccaagagctccaccaaaagataagaaacagaactagaacgtggaggatgacaagcgccttgttttcggcttgggcgacgagagtttgtagccaatggtctgatgtggttcgtgggctttgtgtaggtgcacagtttcacgtatatgttctggtcgtgtaatctatatgtttatataaacctgtaggggtgttgatgaccatcgaaagtgtcgtaaatattcagtagtatatgtagcttagggcttaagcggttgtgtttataaggtcattgtcgttgtcgatgggaagtattatcatgttattttcaggactcaggagtataaaatgaaataaaatgtgaattcatctgaagctgaaacccaaactaagaga

SEQ ID NO: 54387 - DNA, 1467 bp, Zea Mays
aaacaacacaccaaaccaaaccatgacatgctgccgcggacaggaaaggcaccagtgccatggccacgtttcttatcttggtgcgccctggcgctggcgctgccgaccctcagcagatccatttattatatattcaacgaaacattcagcaataccatgatcatacggacagctacgaggatgtattatacacacaaaaaaagtttcattcaattctcggagaagaattctcatatcatttcccgtcaaatttcagaaggttcctctcatgtcagagaaaggaaaaccacacaccggccaaaccacgactgcaggaggcgggtagtagcaagagaaaggaaacgctctcccagccccaaagaaaaaggcagcacaccaactcaccaagaaagtgtggaactgctcctgcctgcagcctcctgctcatcgaccctttcgccccacaagctcgattcctcgctcggccatggctgcacccgcggaggagacgcttgccgccgaggatacggcgtcaccaccgccgccggcgaggataagtctgtccacaaggctctcggcgggggtaaaactgctgatgtacttttgtggaaagacaagaagacctctgctgcggtagttggtggtgcaactgtcctatgggttctgttcgaaattgtagaataccatctcctgaccctggtttctcatgtgctgatcgctgcactgaccatcttgttcctgtggtccaatgcgactgtctttatcaaaaagagtcctcctgatgttcctgaagtgcagatatctgaagaccttgctgtaaacattgcgctagcattgcgtgctgacatcaacaaggcacttgccctgcttcgggagattgctctgggccataacctgatgaagttcctaggcgtggtcgtcgccctttggattctttcagagatcggggagctatgtgatctcctgagattgatgtacattgtggtcttgatcctccacacagtgccgatactgtaccacaagtatcaggaccaggtggacaatttcgctgcaaaggcgcacagggagctctgcaagcaatacgcggtcctggatgccaaagttctgagcaagattccaagagctccaccaaaagataagaaacagaactagaacgtggaggatgacaagcgccttgttttcggcttgggcgacgagagtttgtagccaatggtctgatgtggttcgtgggctttgtgtaggtgcacagtttcacgtatatgttctggtcgtgtaatctatatgtttatataaacctgtaggggtgttgatgaccatcgaaagtgtcgtaaatattcagtagtatatgtagcttagggcttaagcggttgtgtttataaggtcattgtcgttgtcgatgggaagtattatcatgttattttcaggactcaggagtataaaatgaaataaaatgtgaattcatctgaagctgaaacccaaactaagaga

SEQ ID NO: 54388 - DNA, 2171 bp, Zea Mays
ggggaagccagttcgattacttacttagcagatgtgcagatgtgaagcagcacaaccagaatgcagaaggctttccgtcttatagaagtaaaaggacgcctttggaagtctctatacagaaatctcttggttttggtttgaagtccgaaaatggtaaacgggattatgttgcgaatgatatggttcaatccttgcataagcaagatagtaagatggtcacaaaaaagaccataaagttgttggatgctccaccttattcaaaaaggctaaagcttgagccagtacaaactggtagagatgctgagattaagggacatgaattcatatcacagaagaatgtgcctgatttggcaccatgtgcaacatctgaaaaatctcggttgctcaagcagaagcgcatttctgatgcaaagagaattgataagaagaatattaggtccggtgtcagatcaaaatacgattgtttctcatcaaaagctggtttagcacatttttgttctggtttctcaggaaacagcgtacttggagcgcatggccttaaatctgatgttcgtgacatcacgaatcacattgagaacctctcattgagtgaacttcttgatggcacctacaagtattccagcttaggaagagataaaggaaagaaggactctaatctcattctgggtccgaaacctcctcctgcatgcacctctagctgtgatatcaaggagcaatgttgtgacaagccatcccccttggttaaggactcgtcacaaatcaatgtctgtgatactgcactttgtcatccaaaagatatcttaagccgattaacacttcctcatcaacaagatctggactctcttttaacacctggaagtgagagcacagctgcagttaagccagttcgtggagctagtttaccaccatttccttggtcacactcacaggctgggggctgtcgacaaagtgttgactgtggtaaacatgggtcaagtagaagttactcccagtggcaatgggtgcgggttggatccaacctcacttctctagattatgaagatacgtctgtccatagaattgatcatctccttcaagagatggatgcagcaaaattatgtagaatggattcatgtgatgggcaatataatttgtgtggcacggaatcaacatctggatcacttgcacaaaacattcaatccagaaaaaatgggggtgagcatggttctcagcaactgcaaaccctggatcgtgttgactctttagatggcttccagaagcatgacagtgaacattctcttttaaaaacttctcaagtatcgccaaagatacagcatgccgctgaaatcttatgtgatatgagaagaagcattgaatcgttgagtggccagggatacagcaatggggtgattaagtggccaaaatcaccatccgaaaaggtgatgaaagcacggaagccctcatcccagtttggtataactgagagctcatcaggttctcgtaacaacgatgcaacttggaacggtagcagtcactctaccaagaaattttgtgacaggaagaatgattctgcatgcttgaattaccctggtaaggaaactataaggtggcctgtgcctgtggaaggtggcgcttctcctgtcaggtcgtccgagcgcggtcctatgctcgatatgaggcagccccatggaaatggtggaagacatcctgttcaggtgccatcacaggtggcacggcttgaaaaggagtatgagaaccagcagaagttgaggaaagcaacactgacctcgtctctagggcctccgggagattggagtagggagaggaacaggagggtgtgaagtctgtacattattcatgtcaaaaatcataggctacggtatatcgtctgggggggaacagcggaaccaggcaactgtttcataagaggtctcagaacatttgggagatgtgataatttaggtggcgggtgatgtatctattgggccatttgttgttggggaaaccgttgtaactagtgtaaatttcgttttttattaccatcatatatcacaggtctcgtctcactatagtccgttgtgtattactagtatgtgtcgaagccctcaatagtttacgcgctaccattttttgatggttgcaacttaatctcagttttgcttgtcgtcagtcttgttaaatcgtcacccgag

SEQ ID NO: 54389 - DNA, 2396 bp, Zea Mays
tttcctccgtcacacccacccacctccgccgctcacaagccctagatgtcccccctctcctgcccccgccgcgccgccgccgcccgcgccacgggccgatcccaccagatctcgcgcgaatcggaggccccgctcctccccgtggcccgattctccgcccgcgcgaccaggaacggcgctgatttgagccggttttggaggtgaggtgggggtgcgatttcggtggtcctgggccttgcggggccgggtggatggatgcggtggagctgccgttaccagccaaggtggagttcgggaagatcctggcgccggcagctgctgtggagggggtggatggggccgtcgtcggtggtggccccggaggtgggagcggggaggtgctcaggagctgcgccgacgcggatcagcgtcacggtggtgatgtgaagcagcacaaccagaatgcagaaggctttccgtcttatagaagtaaaaggacgcctttggaagtctctatacagaaatctcttggttttggtttgaagtccgaaaatggtaaacgggattatgttgcgaatgatatggttcaatccttgcataagcaagatagtaagatggtcacaaaaaagaccataaagttgttggatgctccaccttattcaaaaaggctaaagcttgagccagtacaaactggtagagatgctgagattaagggacatgaattcatatcacagaagaatgtgcctgatttggcaccatgtgcaacatctggagcgcatggccttaaatctgatgttcgtgacatcacgaatcacattgagaacctctcattgagtgaacttcttgatggcacctacaagtattccagcttaggaagagataaaggaaagaaggactctaatctcattctgggtccgaaacctcctcctgcatgcacctctagctgtgatatcaaggagcaatgttgtgacaagccatcccccttggttaaggactcgtcacaaatcaatgtctgtgatactgcactttgtcatccaaaagatatcttaagccgattaacacttcctcatcaacaagatctggactctcttttaacacctggaagtgagagcacagctgcagttaagccagttcgtggagctagtttaccaccatttccttggtcacactcacaggctgggggctgtcgacaaagtgttgactgtggtaaacatgggtcaagtagaagttactcccagtggcaatgggtgcgggttggatccaacctcacttctctagattatgaagatacgtctgtccatagaattgatcatctccttcaagagatggatgcagcaaaattatgtagaatggattcatgtgatgggcaatataatttgtgtggcacggaatcaacatctggatcacttgcacaaaacattcaatccagaaaaaatgggggtgagcatggttctcagcaactgcaaaccctggatcgtgttgactctttagatggcttccagaagcatgacagtgaacattctcttttaaaaacttctcaagtatcgccaaagatacagcatgccgctgaaatcttatgtgatatgagaagaagcattgaatcgttgagtggccagggatacagcaatggggtgattaagtggccaaaatcaccatccgaaaaggtgatgaaagcacggaagccctcatcccagtttggtataactgagagctcatcaggttctcgtaacaacgatgcaacttggaacggtagcagtcactctaccaagaaattttgtgacaggaagaatgattctgcatgcttgaattaccctggtaaggaaactataaggtggcctgtgcctgtggaaggtggcgcttctcctgtcaggtcgtccgagcgcggtcctatgctcgatatgaggcagccccatggaaatggtggaagacatcctgttcaggtgccatcacaggtggcacggcttgaaaaggagtatgagaaccagcagaagttgaggaaagcaacactgacctcgtctctagggcctccgggagattggagtagggagaggaacaggagggtgtgaagtctgtacattattcatgtcaaaaatcataggctacggtatatcgtctgggggggaacagcggaaccaggcaactgtttcataagaggtctcagaacatttgggagatgtgataatttaggtggcgggtgatgtatctattgggccatttgttgttggggaaaccgttgtaactagtgtaaatttcgttttttattaccatcatatatcacaggtctcgtctcactatagtccgttgtgtattactagtatgtgtcgaagccctcaatagtttacgcgctaccattttttgatggttgcaacttaatctcagttttgcttgtcgtcagtcttgttaaatcgtcacccgag

SEQ ID NO: 54390 - DNA, 2086 bp, Zea Mays
atcggtcacgagcgcagaagcttcttcatatccgggcaggcgcgtgcgcaggccgaatgtgaggattatgggtcgtgagtggcaaaactagaccccggtcttgtaacacagtcttgtaacacggatatatgtgcaaggctgaagggagaacaaggcgtggagaataagaaaaacactctaccattgccttcctcctccatccttgggggctggcgcacggatactgtacacgtcgcgccaagaagtcgagggtccatggaaccaaatctgcactcggcaattgaggagcaatctcgtcttctccgtgacatctgcgaccgtctggtcactggtggcacaggatacgcgctggtgcatgctagagtctgcggtggcacagaactccgcctcgatccattctctcgaagcgtcagcggccaacgcgtcctcatctgcgccaaggcagaatctcaagatccagatggcaacgacttcggagcgcctggatgcagtcgaggcagaggcagcgtcgtgggtcggcgcgctcgaatccgtgacggtgatcagcgaccttcgaatcgtggcgtcccttcgtcgaggccgcaatagacgacatcaagtattccgtcgagaaattgtgtggcgacttgtccaaattggcggttccggcgcctcatccgctgcacacggccttcgtccactccaccggggttctccgtcctgctccatcggccgcggagcgcccatctgccacagcctacaaggccgatggccctcgtgggcaccgcacgaatcacaattgtcgggagtctggctttgggcatgtatttgctcaaagccatctcctgcccaatggtacgtcctactgctggttctcttcaccattccatcatatggatcctattgtcgatagtgccgataacttgattcaggatacccaattgcactatgatctcggcaaattacctaggcttaatttcccatgttttgacggcgacaatcatagactctggcagcgtcgttgtgaagattatttttcgatgtatgctgttagttgtctggattaaagtctccataatgcatttttctggggcagttgcctgttggctacagtcagtagaaccaacttaccagcctttcctgggatgagtttagccatatgttgaaggagaggtttgggaaagaccaacatgccactctagtgcaccaattattacatatcaaacaacaagggtcggttaccgaatacatagaatagttttcccagctagtttatcacctcaatagctaccaacacatgtctaacccctttactatactatgaaatttttggatggtttatgctatgacattaagtctatggttatgattcagcgcccacaaaacttggatactgcctatgttctcgcacaattgcaggaggagattgtcgagacctcgaagaaggactacaagacatttgcatcaacatctcaagggaagccttatgttcgaggtcctctgccgctgcctctccaccacctaaggtccttgctgctgttacccgaccacctgaacatagatcggtacatcctacctcagctccgttgggggtgatcggctgtcatcagtctatgcctatcgcaaagctcaagggctttgctacaagtgcggatcttcttacacccgtggacaccagtgcccagatacagtccaacttcatcttgtcgaagagctttggcagcagttttcccaaccttcataacataccccatgtgaaactgaagaagttgtggaactcaattgtcttcaactttcacaaccagctgcattgggtgtttcaaacttgaagaccatgcgttttgtgggtgagttcgtggggctctcaattctcatactgttggattcgcgtagctccatttctttttctcagttcaaccatcgcccaacaatgcccccaaagcgtctcccttagctcggcctcttgtggttctagtagccaatggatctcagatggtctgtcgatctgagttggtgaatacagcatggtccatttgttagatttataggcattttcgtatcattttaattccataaattaatattatgacgatgacatataaaagat

SEQ ID NO: 54391 - DNA, 616 bp, Zea Mays
ctgcctcctcctaacctcgccaccaagtctccgtcgtccatgttgggcctgtccaccgccccgccttgaggccgcagtcgctagttcgaccaagaatggtcgagcggagaggctggggagtggtgtcgtcgtcgccagcacatgtgggtgagtggcctggtcgccggggcaaggcgggcgggaagacgaaaaccccaacgttgctgcctgcctgcaaaggcgcagaaacccatttgattatgttcgccagtggtgcccacgacggaggggatggcaagctccgtctccttcctgctgttgaagccggcggagctacggaggggatagcaagctccttctcccttcctgctgttgaagccggcggagcttgtggaggcgctgcacaactacgacacgacacctagctctagcctccgcaccgaggacatcgtcaacctgtagcccaccttcgtcgtcgaggtcctcaccctcgacattggcagtcagcctcctcctcatcgcgcttgtggtggtggcggaagccaacatcgctgctggcaatgacactatttatcgtgtccctgtgcaacaatcagctcttgtatcttattgaaaaggatttaatctagatatttgg

SEQ ID NO: 54392 - DNA, 1888 bp, Zea Mays
gaggggtgcaactcagaaaccatttgcagaatctacaactcacatgtcagaccaaacaaattgcaatgaagttgaagcagaagagtgtgatgcgtatgaagaaaatcaagaggaacctgtagcaatggtagaagaatctccacccgatgttggccaagatggtgatgatgggcaaggtattgattcgtcttggactgtggttggtacaccagttttacgagtcaagacaatttatatcagttcagcgattcttgctgcgaagagtcctttctttttcaagcttttctctaacggcatgaaagaatcggatcagagacatgcaacccttagaattactgactcagaggaaactgccctcatggagcttttaagctttatgtatagtggaaagttggcaactactgagcccactcttctgctggatatcttgatggctgccgacaaatttgaggttgtttcatgcatgaggtactgcagccagttgctcacaagcttgccgatgaccacagaatctgcacttctctacctagatctcccttgctcaatttcaatggcagcagcagttcaacctctgacagatgcagctaaggatttccttgctgtaaaatacaaggatttgactaagttccaagatgaagtgatgaacattcctcttgctggaattgaagccatcttgtcaagtaatgacctccaggtggcatctgaagataccatctatgacttcttgctcagatgggcccgtgcacaatacccgaaatcagaagagagacgtgagatccttagttctcggctgctccctcttgtgcgattcagtcacatgacatgtaggaagctgcggaaggtcctaacatgcacagatatagaccacgagcaggcaaccaagtgtgtcaccgaggctcttctgtacaaagctgatgcaccacaccggcaacgagctcttgcagcggacacaacaacctgtcggaaattcgctgagcgggcttacaagtacagaccactcaaggtcgttgagtttgatcggccctatccacagtgcatagcatacttggatctcaagcgcgaggagtgctctcgactctttcctgcaggccggatatactcgcaagcgttccacctcgcagggcagggcttcttcctctcagctcactgtaacatggagcagcaaagcaccttctactgctttggcctgttcctggggatgcaagagaagggctcaacgagcgtgaccgtggactatgagtttgctgcaaggacgagaccatccggcgagtttgtgagcaagtataagggtaactacacatttaccggtgggaaggcagttgggtacaggaatctctttggaatcccgtggcaggcgttcatggccgatgacagcctcttcttcatcgacgggatgctgcatctgagagctgagcttacgataaagcaacctacgtagatgtgctgccgtcgggttaagtgtgtccagtcatgggtgatgtggaaaatgctgtgtgctgcagatatcctttttgttttttttccttttgttcacgcaccttaatccttacattaatagacagtttggtgatgacaaaatataaaggaaaaaaaagggctggaaagctgccttttgttgtttcactaagatgaaggttgtatgatctctgtctcttcgtagtggaagttgttacaccagatgaaaaagaaaagatatcggatgggaatcctcactagcttgagttctctgcaagtttccagattggccggtatctcactgctaatgagctatgttctggttcgagcttttctttttcttttgttttcttttctttttttgatgggaaggacgagctgtcctattggcagcaaatgcggacgtttgtcgttggtaaggcctgctgctgct

SEQ ID NO: 54393 - DNA, 1976 bp, Zea Mays
ctcgtttattttagtaaaatctgattcacgtaggtacccgacaatataggttataatggaaagggaatcggtgaaggatagagaggaatttcaatttggagctgccatgacgcacttaatctacaactcacatgtcagaccaaacaaattgcaatgaagttgaagcagaagagtgtgatgcgtatgaagaaaatcaagaggaacctgtagcaatggtagaagaatctccacccgatgttggccaagatggtgatgatgggcaaggtattgattcgtcttggactgtggttggtacaccagttttacgagtcaagacaatttatatcagttcagcgattcttgctgcgaagagtcctttctttttcaagcttttctctaacggcatgaaagaatcggatcagagacatgcaacccttagaattactgactcagaggaaactgccctcatggagcttttaagctttatgtatagtggaaagttggcaactactgagcccactcttctgctggatatcttgatggctgccgacaaatttgaggttgtttcatgcatgaggtactgcagccagttgctcacaagcttgccgatgaccacagaatctgcacttctctacctagatctcccttgctcaatttcaatggcagcagcagttcaacctctgacagatgcagctaaggatttccttgctgtaaaatacaaggatttgactaagttccaagatgaagtgatgaacattcctcttgctggaattgaagccatcttgtcaagtaatgacctccaggtggcatctgaagataccatctatgacttcttgctcagatgggcccgtgcacaatacccgaaatcagaagagagacgtgagatccttagttctcggctgctccctcttgtgcgattcagtcacatgacatgtaggaagctgcggaaggtcctaacatgcacagatatagaccacgagcaggcaaccaagtgtgtcaccgaggctcttctgtacaaagctgatgcaccacaccggcaacgagctcttgcagcggacacaacaacctgtcggaaattcgctgagcgggcttacaagtacagaccactcaaggtcgttgagtttgatcggccctatccacagtgcatagcatacttggatctcaagcgcgaggagtgctctcgactctttcctgcaggccggatatactcgcaagcgttccacctcgcagggcagggcttcttcctctcagctcactgtaacatggagcagcaaagcaccttctactgctttggcctgttcctggggatgcaagagaagggctcaacgagcgtgaccgtggactatgagtttgctgcaaggacgagaccatccggcgagtttgtgagcaagtataagggtaactacacatttaccggtgggaaggcagttgggtacaggaatctctttggaatcccgtggcaggcgttcatggccgatgacagcctcttcttcatcgacgggatgctgcatctgagagctgagcttacgataaagcaacctacgtagatgtgctgccgtcgggttaagtgtgtccagtcatgggtgatgtggaaaatgctgtgtgctgcagatatcctttttgttttttttccttttgttcacgcaccttaatccttacattaatagacagtttggtgatgacaaaatataaaggaaaaaaaagggctggaaagctgccttttgttgtttcactaagatgaaggttgtatgatctctgtctcttcgtagtggaagttgttacaccagatgaaaaagaaaagatatcggatgggaatcctcactagcttgagttctctgcaagtttccagattggccggtatctcactgctaatgagctatgttctggttcgagcttttctttttcttttgttttcttttctttttttgatgggaaggacgagctgtcctattggcagcaaatgcggacgtttgtcgttggtaaggcctgctgctgct

SEQ ID NO: 54394 - DNA, 2633 bp, Zea Mays
agcccctccattgcctcattataaccaccaccgtctcttccttgtgtcttctcctcctttccctcccggccacttctctcgtttcgccctccccctcgagcaccccgccggctagggttacggccaccgccttccacgcctcccccacttcccgtaggcggaggctggtcggcgtgcacgcgaccgcggcggcggagatggacccggacttctcgcccgggggcggggggcccagctttgaattcgccttcaacgaggtcaacttctccgaccgggaattgcgtatcgaggtcgtcgccggggatgactacgctccggggtccagcggcgccggtgccggaggaggtggcctcgccgactgggcgcgccaccgcaagcgccgccgtgaggagctcctcaaggagaaagaatctacaactcacatgtcagaccaaacaaattgcaatgaagttgaagcagaagagtgtgatgcgtatgaagaaaatcaagaggaacctgtagcaatggtagaagaatctccacccgatgttggccaagatggtgatgatgggcaaggtattgattcgtcttggactgtggttggtacaccagttttacgagtcaagacaatttatatcagttcagcgattcttgctgcgaagagtcctttctttttcaagcttttctctaacggcatgaaagaatcggatcagagacatgcaacccttagaattactgactcaggtaacgtgacaactttgggaaactagagcatcctgcttcttttgtatttatttcctaataattttcatttttaaatcaactgttatgattatatatgccaagaatattcgatgtttccaaagttgtgcttttttttctttgatagtgacattgcctactatttttccctccttagctctacctatcaaatggatattttgtgtagcctgctttctgtacagatttcatcatttgttctctgagaaccagttgccacaaaaacacacacacacgtgcacaaacaaacacaaataaaatagaaaaatccttctctagtggatctttactttgtgcgtcatcctttttcccttaattctcttggaacagaggaaactgccctcatggagcttttaagctttatgtatagtggaaagttggcaactactgagcccactcttctgctggatatcttgatggctgccgacaaatttgaggttgtttcatgcatgaggtactgcagccagttgctcacaagcttgccgatgaccacagaatctgcacttctctacctagatctcccttgctcaatttcaatggcagcagcagttcaacctctgacagatgcagctaaggatttccttgctgtaaaatacaaggatttgactaagttccaagatgaagtgatgaacattcctcttgctggaattgaagccatcttgtcaagtaatgacctccaggtggcatctgaagataccatctatgacttcttgctcagatgggcccgtgcacaatacccgaaatcagaagagagacgtgagatccttagttctcggctgctccctcttgtgcgattcagtcacatgacatgtaggaagctgcggaaggtcctaacatgcacagatatagaccacgagcaggcaaccaagtgtgtcaccgaggctcttctgtacaaagctgatgcaccacaccggcaacgagctcttgcagcggacacaacaacctgtcggaaattcgctgagcgggcttacaagtacagaccactcaaggtcgttgagtttgatcggccctatccacagtgcatagcatacttggatctcaagcgcgaggagtgctctcgactctttcctgcaggccggatatactcgcaagcgttccacctcgcagggcagggcttcttcctctcagctcactgtaacatggagcagcaaagcaccttctactgctttggcctgttcctggggatgcaagagaagggctcaacgagcgtgaccgtggactatgagtttgctgcaaggacgagaccatccggcgagtttgtgagcaagtataagggtaactacacatttaccggtgggaaggcagttgggtacaggaatctctttggaatcccgtggcaggcgttcatggccgatgacagcctcttcttcatcgacgggatgctgcatctgagagctgagcttacgataaagcaacctacgtagatgtgctgccgtcgggttaagtgtgtccagtcatgggtgatgtggaaaatgctgtgtgctgcagatatcctttttgttttttttccttttgttcacgcaccttaatccttacattaatagacagtttggtgatgacaaaatataaaggaaaaaaaagggctggaaagctgccttttgttgtttcactaagatgaaggttgtatgatctctgtctcttcgtagtggaagttgttacaccagatgaaaaagaaaagatatcggatgggaatcctcactagcttgagttctctgcaagtttccagattggccggtatctcactgctaatgagctatgttctggttcgagcttttctttttcttttgttttcttttctttttttgatgggaaggacgagctgtcctattggcagcaaatgcggacgtttgtcgttggtaaggcctgctgctgct

SEQ ID NO: 54395 - DNA, 4286 bp, Zea Mays
tccgcataaataccgcgcgtctgctccgcgccgcgaaacaacacgcaagaaaccagaagcgctcgcgagaagtaagggagagagaggggggacgacgacagccttgggacccgcggactgcatcgctcgccggtagctgacgtcactcggccccgtggaattttcaagctttggtggtggctcgtctgtctgatccgcgctctgctgctttttcttcgcccgccgcactgtatcacaactataacagtacctacgtgttcacagatgggaaatcccatccggtcatccacaggcaatggactcatcttattattatcggccaccaaactgtggaacttggccatatcatgatatctcacatccttctgagttccattgttgctgcaaccgggcatatcttcctgattactacagtttcagacccccattccctcaagagcttccaccccctcatttatactatcacgtgccatctccacatcatccaaatgcatgtccttcttactttgtcccatcacatccttacccttttgatcagacaccatatggttatgaaaagttcaagagccactgctgtggatgtccaactcatgtgtgccctggggctgagaagaacaatgtgaaaatcgaggaacaaaggcctgatgtcaagcttgagagcggtgagcacaagaatgctgatagtgacagtataattcaacacccaaacaagaagtatccattcatatggctgccatcaggcaatatgaaaggcaaggagaatggagagcattatgaattgtcacctcaggttttaaatgaatgggctcctgtgagtgggaagtggttaggggatgtgaagcaacaagggcaggataatgagaaggggaaacaattccagtggccaatagtttggatgccagcaggatatgatgcaccaaaccaaaaggctaaagatatgaatgacacagaagagaccccaaaatccccaaagatttctgaagtgtctcctcaatcacccaagatcattcctctgtcttggtttgggaatggtcatcatcatgatcagaaatcggctgccagaaatggttctggagaccacaacaacggatcagcagtgaagaaccaacctgtggttactgaccatcaagacagcatgatactggaaggaaaccctaaaatcactccagctgtgcccaagagcatacacgttgggaagaaacctccaagggaaaactgcaagaccattccagttgtgccagagaaagagattaatgaaaagaaggccagtacttacagaaccattccggtcataaaagaaagtgatgagaagaagattggcatgagggaaaagagggagtcaaaggaggccaacagtgctgaaatggttgaagagaacaggaaaacaaaacacaatgactcatcagtagttaagcattcaaaattgcccccagtatgcttacgtgtggatcccttgccaagaaagaaacctggaaatggttcttctaggtctcctagtccaccaaggaaggatactgacaacacgaagaaggacgtggatgaggcccagagccagatcctggagcctaaacagtctagtacaagtaaggatatcactgtgtctgaagtgaaagaaaaatcgccttatgaaatgaagaaggaagttgggtttagaaatgaaacagtggaagctgcttctgttgaacatctgcaggaggaagaagctcccacaagtaaagatggccaaaaggtccaagctgctagcactacagttggtgatcaagaaaatgcagccctgaatagcatagaggaagatcatgtgcaagaaaatgctggtgcaggaagcttgaatggatgtgacaaaagaaaaaatgaagatgggacagtgattgaaagtgaaactgcgaaagatgatgccagaacatatggagttaatttgtcagaatcagatgctgcagttcgtattcagtctgcctacagagggtatgatgttcgaaaatggcaacctttggataaactctggaagatcaagcatgtgcatgaacagatgcaagttgtgaggaagcagattcaatgccttttagattcttgcagtaagccaacacaaaaagagcaagtggccataggtgaaactattatgaatttactcctgaagcttgacgcaatccagggcttgcatccaagtgtaagggaagctaggaagtctgttgctcgagaactgatttgcttgcaggagaagcttgatactttatgcaaagcagcatctggagacttgaatcacacagatagtaatgatgatgaatctgaggggaccaagaacattatccaaactgaagctcctactgtaataactgaagcttctgatagacagaagagaactattgaactgggtaaggtacaagaaccatgttcagtggactccatggagccatgcaacacagttccatctggagtttcctgggaggtgaggccagatgtagacgctagcgaggagaagaatgaaaaacaagagtcatgtagcaccacagtggacgaagcgcacgaacaactgacaaccaggagcatggaattggagaatcaaatgttacttcagtggaacaagtgactgaagaagagaaaccagcatctgaggatgaagtaaaagagccaccattggtgaactccacggcactattgtatgatactacttcatcaggggattccagtggactgaaacaatacacagcttcgaccgatcagaatctctatgctgaatcaaatacagggtcgtctcctgcatccactgaggacattgacataagtactctggctgtggaaagtgaagtggcggctgagaatgatggcccaattaacagtcaggtgcatgaaactgtagctctagaaaatgtggaaatgaaagatgatgtttcttctgctgaaaatgagcataacagatcgagcagccctgttattcatttagaggacccactagtgtctttgaaggatgttgagcagcatggtccaactcctactaaggactttgttgtacctaacacagaagaccaacaagaagccagagatatcagcttgcaggtacaagctgtggattccatgaaagattgtggcgaagtaccagatggaacaatagaggcttcgacgaatgatgatgaattagaactgggtacttctgcagatgtagaaaagaatgatcaacctaccttgctggaaccaagatcggagtctgtctctgtcccagaactgtccgtcttggatgaatctgacgataaaatgcaatgtggtgtttctggcaaggatgaggaagcacatgtggaggagaaaactgtaactattgctgttgacaaggtaacaggaggttctgcaaatttcgaggatcctctttgtgaggcatcgaggaaggaacctgacattgagaagagtcacccaagcctcggagaagaggaagacgatacaataggtggaacagtcttccctggttcaggtagctgtgaattatcatgtccacaggatggtggcatcgcagtctacgaggggcctgagatggtgtcaccagagagccaaactgatgctcggaaagaaaacatccattcagatgtcgctgagacagatgaatgcaccaagactcagaaggccgctctagcaggcacagagggagaaaattctgctgaagattctggtgtgccggtgtctgagatggacaaatgcaacgagatgccgaaggatgctccgacacttacagcagcaggtgcaaatcctgctgaagacgaagcttccctgaaagacctctctgtgcagacagagaacaaggcttcttctgcctccccagctcctgatgatccgaaggccagcgacgagaagacgctggcagaagagaaccagaagctgaaagagcttctgcaaaagcttctggcgtccggcaacgatcagatgggggtcatcacggacctaagtgagaaggtcaaggtgctggagcggaggctggcacgcaagaagagaccaaaggtgagggtgcacaagccatccaggcatgcttcctgtgtccactgaaaggataagtctgtaaggttttgaggttttatgttgtatggatccccatgttgcttcctgtgtccagctattgtgcactgtgtaggtatagccatgctgtggcactgtgcttcgtcttggacaacacaaggtgtggcatgttctgtattttatgtctgtataatgcatccaactacatctagtgttctgtgagcaattgattgggacaaatcgatatgacatatgcgtctgtgttgtgctatatataattcgaaaaacacata

SEQ ID NO: 54396 - DNA, 4460 bp, Zea Mays
tccgcataaataccgcgcgtctgctccgcgccgcgaaacaacacgcaagaaaccagaagcgctcgcgagaagtaagggagagagaggggggacgacgacagccttgggacccgcggactgcatcgctcgccggtagctgacgtcactcggccccgtggaattttcaagctttggtggtggctcgtctgtctgatccgcgctctgctgctttttcttcgcccgccgcactgtatcacaactataacagtacctacgtgttcacaggtctaggcatttgtcctaccagtacagtacattggactagtaataactagtatgtatccagcaaaccgccacatggatccatactactcgcactatagaaaccatgttccttacccatactatcctcctgccagatgggaaatcccatccggtcatccacaggcaatggactcatcttattattatcggccaccaaactgtggaacttggccatatcatgatatctcacatccttctgagttccattgttgctgcaaccgggcatatcttcctgattactacagtttcagacccccattccctcaagagcttccaccccctcatttatactatcacgtgccatctccacatcatccaaatgcatgtccttcttactttgtcccatcacatccttacccttttgatcagacaccatatggttatgaaaagttcaagagccactgctgtggatgtccaactcatgtgtgccctggggctgagaagaacaatgtgaaaatcgaggaacaaaggcctgatgtcaagcttgagagcggtgagcacaagaatgctgatagtgacagtataattcaacacccaaacaagaagtatccattcatatggctgccatcaggcaatatgaaaggcaaggagaatggagagcattatgaattgtcacctcaggttttaaatgaatgggctcctgtgagtgggaagtggttaggggatgtgaagcaacaagggcaggataatgagaaggggaaacaattccagtggccaatagtttggatgccagcaggatatgatgcaccaaaccaaaaggctaaagatatgaatgacacagaagagaccccaaaatccccaaagatttctgaagtgtctcctcaatcacccaagatcattcctctgtcttggtttgggaatggtcatcatcatgatcagaaatcggctgccagaaatggttctggagaccacaacaacggatcagcagtgaagaaccaacctgtggttactgaccatcaagacagcatgatactggaaggaaaccctaaaatcactccagctgtgcccaagagcatacacgttgggaagaaacctccaagggaaaactgcaagaccattccagttgtgccagagaaagagattaatgaaaagaaggccagtacttacagaaccattccggtcataaaagaaagtgatgagaagaagattggcatgagggaaaagagggagtcaaaggaggccaacagtgctgaaatggttgaagagaacaggaaaacaaaacacaatgactcatcagtagttaagcattcaaaattgcccccagtatgcttacgtgtggatcccttgccaagaaagaaacctggaaatggttcttctaggtctcctagtccaccaaggaaggatactgacaacacgaagaaggacgtggatgaggcccagagccagatcctggagcctaaacagtctagtacaagtaaggatatcactgtgtctgaagtgaaagaaaaatcgccttatgaaatgaagaaggaagttgggtttagaaatgaaacagtggaagctgcttctgttgaacatctgcaggaggaagaagctcccacaagtaaagatggccaaaaggtccaagctgctagcactacagttggtgatcaagaaaatgcagccctgaatagcatagaggaagatcatgtgcaagaaaatgctggtgcaggaagcttgaatggatgtgacaaaagaaaaaatgaagatgggacagtgattgaaagtgaaactgcgaaagatgatgccagaacatatggagttaatttgtcagaatcagatgctgcagttcgtattcagtctgcctacagagggtatgatgttcgaaaatggcaacctttggataaactctggaagatcaagcatgtgcatgaacagatgcaagttgtgaggaagcagattcaatgccttttagattcttgcagtaagccaacacaaaaagagcaagtggccataggtgaaactattatgaatttactcctgaagcttgacgcaatccagggcttgcatccaagtgtaagggaagctaggaagtctgttgctcgagaactgatttgcttgcaggagaagcttgatactttatgcaaagcagcatctggagacttgaatcacacagatagtaatgatgatgaatctgaggggaccaagaacattatccaaactgaagctcctactgtaataactgaagcttctgatagaaagagaactattgaactgggtaaggtacaagaaccatgttcagtggactccatggagccatgcaacacagttccatctggagtttcctgggaggtgaggccagatgtagacgctagcgaggagaagaatgaaaaacaagagtcatgtagcaccacagtggacgaagcgcacgaacaagtagcatcatcgatggatatgataagtgatgaagcttttacagctgacaaccaggagcatggaattggagaatcaaatgttacttcagtggaacaagtgactgaagaagagaaaccagcatctgaggatgaagtaaaagagccaccattggtgaactccacggcactattgtatgatactacttcatcaggggattccagtggactgaaacaatacacagcttcgaccgatcagaatctctatgctgaatcaaatacagggtcgtctcctgcatccactgaggacattgacataagtactctggctgtggaaagtgaagtggcggctgagaatgatggcccaattaacagtcaggtgcatgaaactgtagctctagaaaatgtggaaatgaaagatgatgtttcttctgctgaaaatgagcataacagatcgagcagccctgttattcatttagaggacccactagtgtctttgaaggatgttgagcagcatggtccaactcctactaaggactttgttgtacctaacacagaagaccaacaagaagccagagatatcagcttgcaggtacaagctgtggattccatgaaagattgtggcgaagtaccagatggaacaatagaggcttcgacgaatgatgatgaattagaactgggtacttctgcagatgtagaaaagaatgatcaacctaccttgctggaaccaagatcggagtctgtctctgtcccagaactgtccgtcttggatgaatctgacgataaaatgcaatgtggtgtttctggcaaggatgaggaagcacatgtggaggagaaaactgtaactattgctgttgacaaggtaacaggaggttctgcaaatttcgaggatcctctttgtgaggcatcgaggaaggaacctgacattgagaagagtcacccaagcctcggagaagaggaagacgatacaataggtggaacagtcttccctggttcaggtagctgtgaattatcatgtccacaggatggtggcatcgcagtctacgaggggcctgagatggtgtcaccagagagccaaactgatgctcggaaagaaaacatccattcagatgtcgctgagacagatgaatgcaccaagactcagaaggccgctctagcaggcacagagggagaaaattctgctgaagattctggtgtgccggtgtctgagatggacaaatgcaacgagatgccgaaggatgctccgacacttacagcagcaggtgcaaatcctgctgaagacgaagcttccctgaaagacctctctgtgcagacagagaacaaggcttcttctgcctccccagctcctgatgatccgaaggccagcgacgagaagacgctggcagaagagaaccagaagctgaaagagcttctgcaaaagcttctggcgtccggcaacgatcagatgggggtcatcacggacctaagtgagaaggtcaaggtgctggagcggaggctggcacgcaagaagagaccaaaggtgagggtgcacaagccatccaggcatgcttcctgtgtccactgaaaggataagtctgtaaggttttgaggttttatgttgtatggatccccatgttgcttcctgtgtccagctattgtgcactgtgtaggtatagccatgctgtggcactgtgcttcgtcttggacaacacaaggtgtggcatgttctgtattttatgtctgtataatgcatccaactacatctagtgttctgtgagcaattgattgggacaaatcgatatgacatatgcgtctgtgttgtgctatatataattcgaaaaacacata

SEQ ID NO: 54397 - DNA, 4475 bp, Zea Mays
tccgcataaataccgcgcgtctgctccgcgccgcgaaacaacacgcaagaaaccagaagcgctcgcgagaagtaagggagagagaggggggacgacgacagccttgggacccgcggactgcatcgctcgccggtagctgacgtcactcggccccgtggaattttcaagctttggtggtggctcgtctgtctgatccgcgctctgctgctttttcttcgcccgccgcactgtatcacaactataacagtacctacgtgttcacaggtctaggcatttgtcctaccagtacagtacattggactagtaataactagtatgtatccagcaaaccgccacatggatccatactactcgcactatagaaaccatgttccttacccatactatcctcctgccagatgggaaatcccatccggtcatccacaggcaatggactcatcttattattatcggccaccaaactgtggaacttggccatatcatgatatctcacatccttctgagttccattgttgctgcaaccgggcatatcttcctgattactacagtttcagacccccattccctcaagagcttccaccccctcatttatactatcacgtgccatctccacatcatccaaatgcatgtccttcttactttgtcccatcacatccttacccttttgatcagacaccatatggttatgaaaagttcaagagccactgctgtggatgtccaactcatgtgtgccctggggctgagaagaacaatgtgaaaatcgaggaacaaaggcctgatgtcaagcttgagagcggtgagcacaagaatgctgatagtgacagtataattcaacacccaaacaagaagtatccattcatatggctgccatcaggcaatatgaaaggcaaggagaatggagagcattatgaattgtcacctcaggttttaaatgaatgggctcctgtgagtgggaagtggttaggggatgtgaagcaacaagggcaggataatgagaaggggaaacaattccagtggccaatagtttggatgccagcaggatatgatgcaccaaaccaaaaggctaaagatatgaatgacacagaagagaccccaaaatccccaaagatttctgaagtgtctcctcaatcacccaagatcattcctctgtcttggtttgggaatggtcatcatcatgatcagaaatcggctgccagaaatggttctggagaccacaacaacggatcagcagtgaagaaccaacctgtggttactgaccatcaagacagcatgatactggaaggaaaccctaaaatcactccagctgtgcccaagagcatacacgttgggaagaaacctccaagggaaaactgcaagaccattccagttgtgccagagaaagagattaatgaaaagaaggccagtacttacagaaccattccggtcataaaagaaagtgatgagaagaagattggcatgagggaaaagagggagtcaaaggaggccaacagtgctgaaatggttgaagagaacaggaaaacaaaacacaatgactcatcagtagttaagcattcaaaattgcccccagtatgcttacgtgtggatcccttgccaagaaagaaacctggaaatggttcttctaggtctcctagtccaccaaggaaggatactgacaacacgaagaaggacgtggatgaggcccagagccagatcctggagcctaaacagtctagtacaagtaaggatatcactgtgtctgaagtgaaagaaaaatcgccttatgaaatgaagaaggaagttgggtttagaaatgaaacagtggaagctgcttctgttgaacatctgcaggaggaagaagctcccacaagtaaagatggccaaaaggtccaagctgctagcactacagttggtgatcaagaaaatgcagccctgaatagcatagaggaagatcatgtgcaagaaaatgctggtgcaggaagcttgaatggatgtgacaaaagaaaaaatgaagatgggacagtgattgaaagtgaaactgcgaaagatgatgccagaacatatggagttaatttgtcagaatcagatgctgcagttcgtattcagtctgcctacagagggtatgatgttcgaaaatggcaacctttggataaactctggaagatcaagcatgtgcatgaacagatgcaagttgtgaggaagcagattcaatgccttttagattcttgcagtaagccaacacaaaaagagcaagtggccataggtgaaactattatgaatttactcctgaagcttgacgcaatccagggcttgcatccaagtgtaagggaagctaggaagtctgttgctcgagaactgatttgcttgcaggagaagcttgatactttatgcaaagcagcatctggagacttgaatcacacagatagtaatgatgatgaatctgaggggaccaagaacattatccaaactgaagctcctactgtaataactgaagcttctgatagacagaagagaactattgaactgggtaaggtacaagaaccatgttcagtggactccatggagccatgcaacacagttccatctggagtttcctgggaggtgaggccagatgtagacgctagcgaggagaagaatgaaaaacaagagtcatgtagcaccacagtggacgaagcgcacgaacaaattgaaattcaggtagcatcatcgatggatatgataagtgatgaagcttttacagctgacaaccaggagcatggaattggagaatcaaatgttacttcagtggaacaagtgactgaagaagagaaaccagcatctgaggatgaagtaaaagagccaccattggtgaactccacggcactattgtatgatactacttcatcaggggattccagtggactgaaacaatacacagcttcgaccgatcagaatctctatgctgaatcaaatacagggtcgtctcctgcatccactgaggacattgacataagtactctggctgtggaaagtgaagtggcggctgagaatgatggcccaattaacagtcaggtgcatgaaactgtagctctagaaaatgtggaaatgaaagatgatgtttcttctgctgaaaatgagcataacagatcgagcagccctgttattcatttagaggacccactagtgtctttgaaggatgttgagcagcatggtccaactcctactaaggactttgttgtacctaacacagaagaccaacaagaagccagagatatcagcttgcaggtacaagctgtggattccatgaaagattgtggcgaagtaccagatggaacaatagaggcttcgacgaatgatgatgaattagaactgggtacttctgcagatgtagaaaagaatgatcaacctaccttgctggaaccaagatcggagtctgtctctgtcccagaactgtccgtcttggatgaatctgacgataaaatgcaatgtggtgtttctggcaaggatgaggaagcacatgtggaggagaaaactgtaactattgctgttgacaaggtaacaggaggttctgcaaatttcgaggatcctctttgtgaggcatcgaggaaggaacctgacattgagaagagtcacccaagcctcggagaagaggaagacgatacaataggtggaacagtcttccctggttcaggtagctgtgaattatcatgtccacaggatggtggcatcgcagtctacgaggggcctgagatggtgtcaccagagagccaaactgatgctcggaaagaaaacatccattcagatgtcgctgagacagatgaatgcaccaagactcagaaggccgctctagcaggcacagagggagaaaattctgctgaagattctggtgtgccggtgtctgagatggacaaatgcaacgagatgccgaaggatgctccgacacttacagcagcaggtgcaaatcctgctgaagacgaagcttccctgaaagacctctctgtgcagacagagaacaaggcttcttctgcctccccagctcctgatgatccgaaggccagcgacgagaagacgctggcagaagagaaccagaagctgaaagagcttctgcaaaagcttctggcgtccggcaacgatcagatgggggtcatcacggacctaagtgagaaggtcaaggtgctggagcggaggctggcacgcaagaagagaccaaaggtgagggtgcacaagccatccaggcatgcttcctgtgtccactgaaaggataagtctgtaaggttttgaggttttatgttgtatggatccccatgttgcttcctgtgtccagctattgtgcactgtgtaggtatagccatgctgtggcactgtgcttcgtcttggacaacacaaggtgtggcatgttctgtattttatgtctgtataatgcatccaactacatctagtgttctgtgagcaattgattgggacaaatcgatatgacatatgcgtctgtgttgtgctatatataattcgaaaaacacata

SEQ ID NO: 54398 - DNA, 4523 bp, Zea Mays
ctcgaacccccaacggcttctccttccaccttcactcctcggagggccctggccccgttctccgcataaataccgcgcgtctgctccgcgccgcgaaacaacacgcaagaaaccagaagcgctcgcgagaagtaagggagagagaggggggacgacgacagccttgggacccgcggactgcatcgctcgccggtagctgacgtcactcggccccgtggaattttcaagctttggtggtggctcgtctgtctgatccgcgctctgctgctttttcttcgcccgccgcactgtatcacaactataacagtacctacgtgttcacaggtctaggcatttgtcctaccagtacagtacattggactagtaataactagtatgtatccagcaaaccgccacatggatccatactactcgcactatagaaaccatgttccttacccatactatcctcctgccagatgggaaatcccatccggtcatccacaggcaatggactcatcttattattatcggccaccaaactgtggaacttggccatatcatgatatctcacatccttctgagttccattgttgctgcaaccgggcatatcttcctgattactacagtttcagacccccattccctcaagagcttccaccccctcatttatactatcacgtgccatctccacatcatccaaatgcatgtccttcttactttgtcccatcacatccttacccttttgatcagacaccatatggttatgaaaagttcaagagccactgctgtggatgtccaactcatgtgtgccctggggctgagaagaacaatgtgaaaatcgaggaacaaaggcctgatgtcaagcttgagagcggtgagcacaagaatgctgatagtgacagtataattcaacacccaaacaagaagtatccattcatatggctgccatcaggcaatatgaaaggcaaggagaatggagagcattatgaattgtcacctcaggttttaaatgaatgggctcctgtgagtgggaagtggttaggggatgtgaagcaacaagggcaggataatgagaaggggaaacaattccagtggccaatagtttggatgccagcaggatatgatgcaccaaaccaaaaggctaaagatatgaatgacacagaagagaccccaaaatccccaaagatttctgaagtgtctcctcaatcacccaagatcattcctctgtcttggtttgggaatggtcatcatcatgatcagaaatcggctgccagaaatggttctggagaccacaacaacggatcagcagtgaagaaccaacctgtggttactgaccatcaagacagcatgatactggaaggaaaccctaaaatcactccagctgtgcccaagagcatacacgttgggaagaaacctccaagggaaaactgcaagaccattccagttgtgccagagaaagagattaatgaaaagaaggccagtacttacagaaccattccggtcataaaagaaagtgatgagaagaagattggcatgagggaaaagagggagtcaaaggaggccaacagtgctgaaatggttgaagagaacaggaaaacaaaacacaatgactcatcagtagttaagcattcaaaattgcccccagtatgcttacgtgtggatcccttgccaagaaagaaacctggaaatggttcttctaggtctcctagtccaccaaggaaggatactgacaacacgaagaaggacgtggatgaggcccagagccagatcctggagcctaaacagtctagtacaagtaaggatatcactgtgtctgaagtgaaagaaaaatcgccttatgaaatgaagaaggaagttgggtttagaaatgaaacagtggaagctgcttctgttgaacatctgcaggaggaagaagctcccacaagtaaagatggccaaaaggtccaagctgctagcactacagttggtgatcaagaaaatgcagccctgaatagcatagaggaagatcatgtgcaagaaaatgctggtgcaggaagcttgaatggatgtgacaaaagaaaaaatgaagatgggacagtgattgaaagtgaaactgcgaaagatgatgccagaacatatggagttaatttgtcagaatcagatgctgcagttcgtattcagtctgcctacagagggtatgatgttcgaaaatggcaacctttggataaactctggaagatcaagcatgtgcatgaacagatgcaagttgtgaggaagcagattcaatgccttttagattcttgcagtaagccaacacaaaaagagcaagtggccataggtgaaactattatgaatttactcctgaagcttgacgcaatccagggcttgcatccaagtgtaagggaagctaggaagtctgttgctcgagaactgatttgcttgcaggagaagcttgatactttatgcaaagcagcatctggagacttgaatcacacagatagtaatgatgatgaatctgaggggaccaagaacattatccaaactgaagctcctactgtaataactgaagcttctgatagacagaagagaactattgaactgggtaaggtacaagaaccatgttcagtggactccatggagccatgcaacacagttccatctggagtttcctgggaggtgaggccagatgtagacgctagcgaggagaagaatgaaaaacaagagtcatgtagcaccacagtggacgaagcgcacgaacaagtagcatcatcgatggatatgataagtgatgaagcttttacagctgacaaccaggagcatggaattggagaatcaaatgttacttcagtggaacaagtgactgaagaagagaaaccagcatctgaggatgaagtaaaagagccaccattggtgaactccacggcactattgtatgatactacttcatcaggggattccagtggactgaaacaatacacagcttcgaccgatcagaatctctatgctgaatcaaatacagggtcgtctcctgcatccactgaggacattgacataagtactctggctgtggaaagtgaagtggcggctgagaatgatggcccaattaacagtcaggtgcatgaaactgtagctctagaaaatgtggaaatgaaagatgatgtttcttctgctgaaaatgagcataacagatcgagcagccctgttattcatttagaggacccactagtgtctttgaaggatgttgagcagcatggtccaactcctactaaggactttgttgtacctaacacagaagaccaacaagaagccagagatatcagcttgcaggtacaagctgtggattccatgaaagattgtggcgaagtaccagatggaacaatagaggcttcgacgaatgatgatgaattagaactgggtacttctgcagatgtagaaaagaatgatcaacctaccttgctggaaccaagatcggagtctgtctctgtcccagaactgtccgtcttggatgaatctgacgataaaatgcaatgtggtgtttctggcaaggatgaggaagcacatgtggaggagaaaactgtaactattgctgttgacaaggtaacaggaggttctgcaaatttcgaggatcctctttgtgaggcatcgaggaaggaacctgacattgagaagagtcacccaagcctcggagaagaggaagacgatacaataggtggaacagtcttccctggttcaggtagctgtgaattatcatgtccacaggatggtggcatcgcagtctacgaggggcctgagatggtgtcaccagagagccaaactgatgctcggaaagaaaacatccattcagatgtcgctgagacagatgaatgcaccaagactcagaaggccgctctagcaggcacagagggagaaaattctgctgaagattctggtgtgccggtgtctgagatggacaaatgcaacgagatgccgaaggatgctccgacacttacagcagcaggtgcaaatcctgctgaagacgaagcttccctgaaagacctctctgtgcagacagagaacaaggcttcttctgcctccccagctcctgatgatccgaaggccagcgacgagaagacgctggcagaagagaaccagaagctgaaagagcttctgcaaaagcttctggcgtccggcaacgatcagatgggggtcatcacggacctaagtgagaaggtcaaggtgctggagcggaggctggcacgcaagaagagaccaaaggtgagggtgcacaagccatccaggcatgcttcctgtgtccactgaaaggataagtctgtaaggttttgaggttttatgttgtatggatccccatgttgcttcctgtgtccagctattgtgcactgtgtaggtatagccatgctgtggcactgtgcttcgtcttggacaacacaaggtgtggcatgttctgtattttatgtctgtataatgcatccaactacatctagtgttctgtgagcaattgattgggacaaatcgatatgacatatgcgtctgtgttgtgctatatataattcgaaaaacacata

SEQ ID NO: 54399 - DNA, 4465 bp, Zea Mays
ctcgaacccccaacggcttctccttccaccttcactcctcggagggccctggccccgttctccgcataaataccgcgcgtctgctccgcgccgcgaaacaacacgcaagaaaccagaagcgctcgcgagaagtaagggagagagaggggggacgacgacagccttgggacccgcggactgcatcgctcgccggtagctgacgtcactcggccccgtggaattttcaagctttggtggtggctcgtctgtctgatccgcgctctgctgctttttcttcgcccgccgcactgtatcacaactataacagtacctacgtgttcacaggtctaggcatttgtcctaccagtacagtacattggactagtaataactaatgggaaatcccatccggtcatccacaggcaatggactcatcttattattatcggccaccaaactgtggaacttggccatatcatgatatctcacatccttctgagttccattgttgctgcaaccgggcatatcttcctgattactacagtttcagacccccattccctcaagagcttccaccccctcatttatactatcacgtgccatctccacatcatccaaatgcatgtccttcttactttgtcccatcacatccttacccttttgatcagacaccatatggttatgaaaagttcaagagccactgctgtggatgtccaactcatgtgtgccctggggctgagaagaacaatgtgaaaatcgaggaacaaaggcctgatgtcaagcttgagagcggtgagcacaagaatgctgatagtgacagtataattcaacacccaaacaagaagtatccattcatatggctgccatcaggcaatatgaaaggcaaggagaatggagagcattatgaattgtcacctcaggttttaaatgaatgggctcctgtgagtgggaagtggttaggggatgtgaagcaacaagggcaggataatgagaaggggaaacaattccagtggccaatagtttggatgccagcaggatatgatgcaccaaaccaaaaggctaaagatatgaatgacacagaagagaccccaaaatccccaaagatttctgaagtgtctcctcaatcacccaagatcattcctctgtcttggtttgggaatggtcatcatcatgatcagaaatcggctgccagaaatggttctggagaccacaacaacggatcagcagtgaagaaccaacctgtggttactgaccatcaagacagcatgatactggaaggaaaccctaaaatcactccagctgtgcccaagagcatacacgttgggaagaaacctccaagggaaaactgcaagaccattccagttgtgccagagaaagagattaatgaaaagaaggccagtacttacagaaccattccggtcataaaagaaagtgatgagaagaagattggcatgagggaaaagagggagtcaaaggaggccaacagtgctgaaatggttgaagagaacaggaaaacaaaacacaatgactcatcagtagttaagcattcaaaattgcccccagtatgcttacgtgtggatcccttgccaagaaagaaacctggaaatggttcttctaggtctcctagtccaccaaggaaggatactgacaacacgaagaaggacgtggatgaggcccagagccagatcctggagcctaaacagtctagtacaagtaaggatatcactgtgtctgaagtgaaagaaaaatcgccttatgaaatgaagaaggaagttgggtttagaaatgaaacagtggaagctgcttctgttgaacatctgcaggaggaagaagctcccacaagtaaagatggccaaaaggtccaagctgctagcactacagttggtgatcaagaaaatgcagccctgaatagcatagaggaagatcatgtgcaagaaaatgctggtgcaggaagcttgaatggatgtgacaaaagaaaaaatgaagatgggacagtgattgaaagtgaaactgcgaaagatgatgccagaacatatggagttaatttgtcagaatcagatgctgcagttcgtattcagtctgcctacagagggtatgatgttcgaaaatggcaacctttggataaactctggaagatcaagcatgtgcatgaacagatgcaagttgtgaggaagcagattcaatgccttttagattcttgcagtaagccaacacaaaaagagcaagtggccataggtgaaactattatgaatttactcctgaagcttgacgcaatccagggcttgcatccaagtgtaagggaagctaggaagtctgttgctcgagaactgatttgcttgcaggagaagcttgatactttatgcaaagcagcatctggagacttgaatcacacagatagtaatgatgatgaatctgaggggaccaagaacattatccaaactgaagctcctactgtaataactgaagcttctgatagaaagagaactattgaactgggtaaggtacaagaaccatgttcagtggactccatggagccatgcaacacagttccatctggagtttcctgggaggtgaggccagatgtagacgctagcgaggagaagaatgaaaaacaagagtcatgtagcaccacagtggacgaagcgcacgaacaagggaaaactgagggacagattgaaattcaggtagcatcatcgatggatatgataagtgatgaagcttttacagctgacaaccaggagcatggaattggagaatcaaatgttacttcagtggaacaagtgactgaagaagagaaaccagcatctgaggatgaagtaaaagagccaccattggtgaactccacggcactattgtatgatactacttcatcaggggattccagtggactgaaacaatacacagcttcgaccgatcagaatctctatgctgaatcaaatacagggtcgtctcctgcatccactgaggacattgacataagtactctggctgtggaaagtgaagtggcggctgagaatgatggcccaattaacagtcaggtgcatgaaactgtagctctagaaaatgtggaaatgaaagatgatgtttcttctgctgaaaatgagcataacagatcgagcagccctgttattcatttagaggacccactagtgtctttgaaggatgttgagcagcatggtccaactcctactaaggactttgttgtacctaacacagaagaccaacaagaagccagagatatcagcttgcaggtacaagctgtggattccatgaaagattgtggcgaagtaccagatggaacaatagaggcttcgacgaatgatgatgaattagaactgggtacttctgcagatgtagaaaagaatgatcaacctaccttgctggaaccaagatcggagtctgtctctgtcccagaactgtccgtcttggatgaatctgacgataaaatgcaatgtggtgtttctggcaaggatgaggaagcacatgtggaggagaaaactgtaactattgctgttgacaaggtaacaggaggttctgcaaatttcgaggatcctctttgtgaggcatcgaggaaggaacctgacattgagaagagtcacccaagcctcggagaagaggaagacgatacaataggtggaacagtcttccctggttcaggtagctgtgaattatcatgtccacaggatggtggcatcgcagtctacgaggggcctgagatggtgtcaccagagagccaaactgatgctcggaaagaaaacatccattcagatgtcgctgagacagatgaatgcaccaagactcagaaggccgctctagcaggcacagagggagaaaattctgctgaagattctggtgtgccggtgtctgagatggacaaatgcaacgagatgccgaaggatgctccgacacttacagcagcaggtgcaaatcctgctgaagacgaagcttccctgaaagacctctctgtgcagacagagaacaaggcttcttctgcctccccagctcctgatgatccgaaggccagcgacgagaagacgctggcagaagagaaccagaagctgaaagagcttctgcaaaagcttctggcgtccggcaacgatcagatgggggtcatcacggacctaagtgagaaggtcaaggtgctggagcggaggctggcacgcaagaagagaccaaaggtgagggtgcacaagccatccaggcatgcttcctgtgtccactgaaaggataagtctgtaaggttttgaggttttatgttgtatggatccccatgttgcttcctgtgtccagctattgtgcactgtgtaggtatagccatgctgtggcactgtgcttcgtcttggacaacacaaggtgtggcatgttctgtattttatgtctgtataatgcatccaactacatctagtgttctgtgagcaattgattgggacaaatcgatatgacatatgcgtctgtgttgtgctatatataattcgaaaaacacata

SEQ ID NO: 54400 - DNA, 4552 bp, Zea Mays
cactcggccacgacgcgaaccctctcgaacccccaacggcttctccttccaccttcactcctcggagggccctggccccgttctccgcataaataccgcgcgtctgctccgcgccgcgaaacaacacgcaagaaaccagaagcgctcgcgagaagtaagggagagagaggggggacgacgacagccttgggacccgcggactgcatcgctcgccggtagctgacgtcactcggccccgtggaattttcaagctttggtggtggctcgtctgtctgatccgcgctctgctgctttttcttcgcccgccgcactgtatcacaactataacagtacctacgtgttcacaggtctaggcatttgtcctaccagtacagtacattggactagtaataactagtatgtatccagcaaaccgccacatggatccatactactcgcactatagaaaccatgttccttacccatactatcctcctgccagatgggaaatcccatccggtcatccacaggcaatggactcatcttattattatcggccaccaaactgtggaacttggccatatcatgatatctcacatccttctgagttccattgttgctgcaaccgggcatatcttcctgattactacagtttcagacccccattccctcaagagcttccaccccctcatttatactatcacgtgccatctccacatcatccaaatgcatgtccttcttactttgtcccatcacatccttacccttttgatcagacaccatatggttatgaaaagttcaagagccactgctgtggatgtccaactcatgtgtgccctggggctgagaagaacaatgtgaaaatcgaggaacaaaggcctgatgtcaagcttgagagcggtgagcacaagaatgctgatagtgacagtataattcaacacccaaacaagaagtatccattcatatggctgccatcaggcaatatgaaaggcaaggagaatggagagcattatgaattgtcacctcaggttttaaatgaatgggctcctgtgagtgggaagtggttaggggatgtgaagcaacaagggcaggataatgagaaggggaaacaattccagtggccaatagtttggatgccagcaggatatgatgcaccaaaccaaaaggctaaagatatgaatgacacagaagagaccccaaaatccccaaagatttctgaagtgtctcctcaatcacccaagatcattcctctgtcttggtttgggaatggtcatcatcatgatcagaaatcggctgccagaaatggttctggagaccacaacaacggatcagcagtgaagaaccaacctgtggttactgaccatcaagacagcatgatactggaaggaaaccctaaaatcactccagctgtgcccaagagcatacacgttgggaagaaacctccaagggaaaactgcaagaccattccagttgtgccagagaaagagattaatgaaaagaaggccagtacttacagaaccattccggtcataaaagaaagtgatgagaagaagattggcatgagggaaaagagggagtcaaaggaggccaacagtgctgaaatggttgaagagaacaggaaaacaaaacacaatgactcatcagtagttaagcattcaaaattgcccccagtatgcttacgtgtggatcccttgccaagaaagaaacctggaaatggttcttctaggtctcctagtccaccaaggaaggatactgacaacacgaagaaggacgtggatgaggcccagagccagatcctggagcctaaacagtctagtacaagtaaggatatcactgtgtctgaagtgaaagaaaaatcgccttatgaaatgaagaaggaagttgggtttagaaatgaaacagtggaagctgcttctgttgaacatctgcaggaggaagaagctcccacaagtaaagatggccaaaaggtccaagctgctagcactacagttggtgatcaagaaaatgcagccctgaatagcatagaggaagatcatgtgcaagaaaatgctggtgcaggaagcttgaatggatgtgacaaaagaaaaaatgaagatgggacagtgattgaaagtgaaactgcgaaagatgatgccagaacatatggagttaatttgtcagaatcagatgctgcagttcgtattcagtctgcctacagagggtatgatgttcgaaaatggcaacctttggataaactctggaagatcaagcatgtgcatgaacagatgcaagttgtgaggaagcagattcaatgccttttagattcttgcagtaagccaacacaaaaagagcaagtggccataggtgaaactattatgaatttactcctgaagcttgacgcaatccagggcttgcatccaagtgtaagggaagctaggaagtctgttgctcgagaactgatttgcttgcaggagaagcttgatactttatgcaaagcagcatctggagacttgaatcacacagatagtaatgatgatgaatctgaggggaccaagaacattatccaaactgaagctcctactcagaagagaactattgaactgggtaaggtacaagaaccatgttcagtggactccatggagccatgcaacacagttccatctggagtttcctgggaggtgaggccagatgtagacgctagcgaggagaagaatgaaaaacaagagtcatgtagcaccacagtggacgaagcgcacgaacaagggaaaactgagggacagattgaaattcaggtagcatcatcgatggatatgataagtgatgaagcttttacagctgacaaccaggagcatggaattggagaatcaaatgttacttcagtggaacaagtgactgaagaagagaaaccagcatctgaggatgaagtaaaagagccaccattggtgaactccacggcactattgtatgatactacttcatcaggggattccagtggactgaaacaatacacagcttcgaccgatcagaatctctatgctgaatcaaatacagggtcgtctcctgcatccactgaggacattgacataagtactctggctgtggaaagtgaagtggcggctgagaatgatggcccaattaacagtcaggtgcatgaaactgtagctctagaaaatgtggaaatgaaagatgatgtttcttctgctgaaaatgagcataacagatcgagcagccctgttattcatttagaggacccactagtgtctttgaaggatgttgagcagcatggtccaactcctactaaggactttgttgtacctaacacagaagaccaacaagaagccagagatatcagcttgcaggtacaagctgtggattccatgaaagattgtggcgaagtaccagatggaacaatagaggcttcgacgaatgatgatgaattagaactgggtacttctgcagatgtagaaaagaatgatcaacctaccttgctggaaccaagatcggagtctgtctctgtcccagaactgtccgtcttggatgaatctgacgataaaatgcaatgtggtgtttctggcaaggatgaggaagcacatgtggaggagaaaactgtaactattgctgttgacaaggtaacaggaggttctgcaaatttcgaggatcctctttgtgaggcatcgaggaaggaacctgacattgagaagagtcacccaagcctcggagaagaggaagacgatacaataggtggaacagtcttccctggttcaggtagctgtgaattatcatgtccacaggatggtggcatcgcagtctacgaggggcctgagatggtgtcaccagagagccaaactgatgctcggaaagaaaacatccattcagatgtcgctgagacagatgaatgcaccaagactcagaaggccgctctagcaggcacagagggagaaaattctgctgaagattctggtgtgccggtgtctgagatggacaaatgcaacgagatgccgaaggatgctccgacacttacagcagcaggtgcaaatcctgctgaagacgaagcttccctgaaagacctctctgtgcagacagagaacaaggcttcttctgcctccccagctcctgatgatccgaaggccagcgacgagaagacgctggcagaagagaaccagaagctgaaagagcttctgcaaaagcttctggcgtccggcaacgatcagatgggggtcatcacggacctaagtgagaaggtcaaggtgctggagcggaggctggcacgcaagaagagaccaaaggtgagggtgcacaagccatccaggcatgcttcctgtgtccactgaaaggataagtctgtaaggttttgaggttttatgttgtatggatccccatgttgcttcctgtgtccagctattgtgcactgtgtaggtatagccatgctgtggcactgtgcttcgtcttggacaacacaaggtgtggcatgttctgtattttatgtctgtataatgcatccaactacatctagtgttctgtgagcaattgattgggacaaatcgatatgacatatgcgtctgtgttgtgctatatataattcgaaaaacacata

SEQ ID NO: 54401 - DNA, 4549 bp, Zea Mays
cactcggccacgacgcgaaccctctcgaacccccaacggcttctccttccaccttcactcctcggagggccctggccccgttctccgcataaataccgcgcgtctgctccgcgccgcgaaacaacacgcaagaaaccagaagcgctcgcgagaagtaagggagagagaggggggacgacgacagccttgggacccgcggactgcatcgctcgccggtagctgacgtcactcggccccgtggaattttcaagctttggtggtggctcgtctgtctgatccgcgctctgctgctttttcttcgcccgccgcactgtatcacaactataacagtacctacgtgttcacaggtctaggcatttgtcctaccagtacagtacattggactagtaataactagtatgtatccagcaaaccgccacatggatccatactactcgcactatagaaaccatgttccttacccatactatcctcctgccagatgggaaatcccatccggtcatccacaggcaatggactcatcttattattatcggccaccaaactgtggaacttggccatatcatgatatctcacatccttctgagttccattgttgctgcaaccgggcatatcttcctgattactacagtttcagacccccattccctcaagagcttccaccccctcatttatactatcacgtgccatctccacatcatccaaatgcatgtccttcttactttgtcccatcacatccttacccttttgatcagacaccatatggttatgaaaagttcaagagccactgctgtggatgtccaactcatgtgtgccctggggctgagaagaacaatgtgaaaatcgaggaacaaaggcctgatgtcaagcttgagagcggtgagcacaagaatgctgatagtgacagtataattcaacacccaaacaagaagtatccattcatatggctgccatcaggcaatatgaaaggcaaggagaatggagagcattatgaattgtcacctcaggttttaaatgaatgggctcctgtgagtgggaagtggttaggggatgtgaagcaacaagggcaggataatgagaaggggaaacaattccagtggccaatagtttggatgccagcaggatatgatgcaccaaaccaaaaggctaaagatatgaatgacacagaagagaccccaaaatccccaaagatttctgaagtgtctcctcaatcacccaagatcattcctctgtcttggtttgggaatggtcatcatcatgatcagaaatcggctgccagaaatggttctggagaccacaacaacggatcagcagtgaagaaccaacctgtggttactgaccatcaagacagcatgatactggaaggaaaccctaaaatcactccagctgtgcccaagagcatacacgttgggaagaaacctccaagggaaaactgcaagaccattccagttgtgccagagaaagagattaatgaaaagaaggccagtacttacagaaccattccggtcataaaagaaagtgatgagaagaagattggcatgagggaaaagagggagtcaaaggaggccaacagtgctgaaatggttgaagagaacaggaaaacaaaacacaatgactcatcagtagttaagcattcaaaattgcccccagtatgcttacgtgtggatcccttgccaagaaagaaacctggaaatggttcttctaggtctcctagtccaccaaggaaggatactgacaacacgaagaaggacgtggatgaggcccagagccagatcctggagcctaaacagtctagtacaagtaaggatatcactgtgtctgaagtgaaagaaaaatcgccttatgaaatgaagaaggaagttgggtttagaaatgaaacagtggaagctgcttctgttgaacatctgcaggaggaagaagctcccacaagtaaagatggccaaaaggtccaagctgctagcactacagttggtgatcaagaaaatgcagccctgaatagcatagaggaagatcatgtgcaagaaaatgctggtgcaggaagcttgaatggatgtgacaaaagaaaaaatgaagatgggacagtgattgaaagtgaaactgcgaaagatgatgccagaacatatggagttaatttgtcagaatcagatgctgcagttcgtattcagtctgcctacagagggtatgatgttcgaaaatggcaacctttggataaactctggaagatcaagcatgtgcatgaacagatgcaagttgtgaggaagcagattcaatgccttttagattcttgcagtaagccaacacaaaaagagcaagtggccataggtgaaactattatgaatttactcctgaagcttgacgcaatccagggcttgcatccaagtgtaagggaagctaggaagtctgttgctcgagaactgatttgcttgcaggagaagcttgatactttatgcaaagcagcatctggagacttgaatcacacagatagtaatgatgatgaatctgaggggaccaagaacattatccaaactgaagctcctactgtaataactgaagcttctgatagagtacaagaaccatgttcagtggactccatggagccatgcaacacagttccatctggagtttcctgggaggtgaggccagatgtagacgctagcgaggagaagaatgaaaaacaagagtcatgtagcaccacagtggacgaagcgcacgaacaagggaaaactgagggacagattgaaattcaggtagcatcatcgatggatatgataagtgatgaagcttttacagctgacaaccaggagcatggaattggagaatcaaatgttacttcagtggaacaagtgactgaagaagagaaaccagcatctgaggatgaagtaaaagagccaccattggtgaactccacggcactattgtatgatactacttcatcaggggattccagtggactgaaacaatacacagcttcgaccgatcagaatctctatgctgaatcaaatacagggtcgtctcctgcatccactgaggacattgacataagtactctggctgtggaaagtgaagtggcggctgagaatgatggcccaattaacagtcaggtgcatgaaactgtagctctagaaaatgtggaaatgaaagatgatgtttcttctgctgaaaatgagcataacagatcgagcagccctgttattcatttagaggacccactagtgtctttgaaggatgttgagcagcatggtccaactcctactaaggactttgttgtacctaacacagaagaccaacaagaagccagagatatcagcttgcaggtacaagctgtggattccatgaaagattgtggcgaagtaccagatggaacaatagaggcttcgacgaatgatgatgaattagaactgggtacttctgcagatgtagaaaagaatgatcaacctaccttgctggaaccaagatcggagtctgtctctgtcccagaactgtccgtcttggatgaatctgacgataaaatgcaatgtggtgtttctggcaaggatgaggaagcacatgtggaggagaaaactgtaactattgctgttgacaaggtaacaggaggttctgcaaatttcgaggatcctctttgtgaggcatcgaggaaggaacctgacattgagaagagtcacccaagcctcggagaagaggaagacgatacaataggtggaacagtcttccctggttcaggtagctgtgaattatcatgtccacaggatggtggcatcgcagtctacgaggggcctgagatggtgtcaccagagagccaaactgatgctcggaaagaaaacatccattcagatgtcgctgagacagatgaatgcaccaagactcagaaggccgctctagcaggcacagagggagaaaattctgctgaagattctggtgtgccggtgtctgagatggacaaatgcaacgagatgccgaaggatgctccgacacttacagcagcaggtgcaaatcctgctgaagacgaagcttccctgaaagacctctctgtgcagacagagaacaaggcttcttctgcctccccagctcctgatgatccgaaggccagcgacgagaagacgctggcagaagagaaccagaagctgaaagagcttctgcaaaagcttctggcgtccggcaacgatcagatgggggtcatcacggacctaagtgagaaggtcaaggtgctggagcggaggctggcacgcaagaagagaccaaaggtgagggtgcacaagccatccaggcatgcttcctgtgtccactgaaaggataagtctgtaaggttttgaggttttatgttgtatggatccccatgttgcttcctgtgtccagctattgtgcactgtgtaggtatagccatgctgtggcactgtgcttcgtcttggacaacacaaggtgtggcatgttctgtattttatgtctgtataatgcatccaactacatctagtgttctgtgagcaattgattgggacaaatcgatatgacatatgcgtctgtgttgtgctatatataattcgaaaaacacata

SEQ ID NO: 54402 - DNA, 1639 bp, Zea Mays
gcttgaccccggttcggggcggttttcacagggaagaaaaacacaccccggatggtcgggcacgtaagccccgtctcgtcctccagatatcggccgccaccttcacctccaccgccccggcgcacgtgcgcgtctccatcgtcgccgcctctcctccttcggacacgactgaccttccactggcgccgacgaagaagacacataggaagaagctcaccgccaaacctcatccagatccagtcgctaccctccgaaagccgcatacggaacgtctcgtctcttcctttggatccggcagccggtgctcctcctccggatccggtggtcaactccatcacccccagctccacctcccttagtccccctccatccgccctcacccaccgcttctatatcgccacctctctcgttgtagaagacactgaggatctggccatcatcatccgtcgcccctcactcgatttcccatctgccgctccctcctggtctctgagccgctgatcgggtctccgacgcagggaagtgaagccgttccgccgtgaagcagcgccaccccttgccatccgcccgaccgctgggaagcagggcccacgtctccaagcttcctacaggaagagcctgcgcccctcccaaaggacaaagatattaggatggatgaagtcacacaagctgttgaaaatctgaagaaagaatggagccaagctgtttcacagcttgaggagagcattgctgcaattgaatcatgtggaaaaacagggaaaggaacagaggaagcaacttctcttccaaggttgaatggttctgcacaggatgctctgcagttgctcaagtccctgcagttccggcttgatcttctagctcagcagctacctacttttgatgaagtgcagtctgggcaagcaaccttagggtcgtgggatgaacaatacaagaagtatgacagtgttggattttttttaatttttttcttcttcttttagcctgctttttttttgcaaaaaaaattgattgtgtttgcaggttgcgtgctagcctgaggaatgctaacttacaagcgaaagagaacattagaaaagctgctcaggaggagagggagcttcttctagggggtggagaagagtcaacaatccgtaggcgtaatctccagacaaaggttgggatgacatctgctgctgaaagtatcaccgagagcctccgacggtctcgccagatgatggttcaggaagtggaaaggagtgcaagtaccttggcaacatttgatgaatcaacaagtgttctccggaaggctgaaggtgaatatcaaggacaccgctctttgctaatgcgtacccgtggtttgctctccacgatgcaacagcaagatgttcttgataggatcatcctgaccatcggctttatcattttctccttggcggttctttatgttgtctcaagacgtattggtctattgacgctgcaaaggaaactggccgatgccatcagatccggttcattatcagccgatgacatcgtagcgaatgcccaacgtggacctgccccagcaaatgttcctgctcccatctacgatgaactgtgattcgtttgtcctctgtattgttaagcttcaaacatggacctctgcgcatcaaagaaaagtcgg

SEQ ID NO: 54403 - DNA, 2630 bp, Zea Mays
tttgccaaacggacacagggaacctatgccccgctggactgcactacacgtgggacaggccatcatcatccgtcgcccctcactcgatttcccatctgccgctccctcctggtctctgagccgctgatcgggtctccgacgcagggaagtgaagccgttccgccgtgaagcagcgccaccccttgccatccgcccgaccgctgggaagcagggcccacgtctccaagcttcctacaggaagagcctgcgcccctcccaaaggacaaagatattaggatggatgaagtcacacaagctgttgaaaatctgaagaaagaatggagccaagctgtttcacagcttgaggagagcattgctgcaattgaatcatgtggaaaaacagggaaaggaacagaggaagcaacttctcttccaaggttgaatggttctgcacaggatgctctgcagttgctcaagtccctgcagttccggcttgatcttctagctcagcagctacctacttttgatgaagtgcagtctgggcaagcaaccttagggtcgtgggatgaacaatacaagaagtatgacagtgttggattttttttaatttttttcttcttcttttagcctgctttttttttgcaaaaaaaattgattgtgtttgcaggttgcgtgctagcctgaggaatgctaacttacaagcgaaagagaacattagaaaagctgctcaggaggagagggagcttcttctagggggtggagaagagtcaacaatccgtaggcgtaatctccagacaaaggttgggatgacatctgctgctgaaagtatcaccgagagcctccgacggtctcgccagatgatggttcaggaagtggaaaggagtgcaagtaccttggcaacatttgatgaatcaacaagtgttctccggaaggctgaaggtgaatatcaaggacaccgctctttgctaatgcgtacccgtggtttgctctccacgatgcaacagcaagatgttcttgataggatcatcctgaccatcggctttatcattttctccttggcggttctttatgttgtctcaagacgtattggtctattgacgctgcaaaggaaactggccgatgccatcagatccggttcattatcagccgatgacatcgtagcgaatgcccaacgtggacctgccccagcaaatgttcctgctcccatctacgatgaactgtgattcgtttgtcctctgtattgttaaggtcgctgaaacacttggaacaaacagagcttgcttctgaagccctacacctctgaaggatcaggtatcatcaacgaatgtatcaagtaaatttacctgacactcctcgacatcgacgaaacatcttctgatcagttcattcctaactattaaaggaagtttacgctcttccatctactgcaaaattcaattggaaggatatctattgtagaattaatttagaaagactgcatgtacttctagaataggtacgagtttttatttcagacaacacactcacttctatgtttcttcaatgtgttactcaactaaacataccaagaaaaaatgatgatattgccatatatttatgtatgttgttgtattaaactgtggaagcatagatgattagcatcgccaatgcccacgtatttacatatttatatgtcttataaatgtgcatatgcatatataatacgcacacatatgtgctcatattcgttgaacacaaatacctattttctatgtcctccttactcaagtgtaaaccatgagatcatctctatttagctctctttatttcgctttgcctattgaattcgtacttaattaaaggttacagaccaaccaatattgatattactgatgcagaaaatgacgatatcgacgagggaaacatagagatacaatcttctttgtttcaccaatctaccatatttaattctttttcttaaattgaactcattccatccttcacatgctcggttattccatatgaacatttcatacaacagataatactgtcacagttaaatacaaataaaaaatataacaccataatatcatttaataaattataatagaatccattcttgtgcttaatagtattgaaagtcgtctagagggaggtgaataggcaaatctgaaatttgtaaactttaagcacaactacaagtcggggttagctttagaaataaaaccaagtccgaaagagagggtgaaaacaaattaaccaagaaataaagcgagtgacacggtgatttattttaccgaggtttggttcttgcaaacctacttccgttgaggtggtcacaaagactgggtctctttcaaccctttccctctctcaaacggtcacttaaaccgagtgagtttttctcctcaatcaaatgggtcacttagaacccgcaagtaccaccacacaattggtgtctcttgctttgattacaaatgacttgagaacaagaatggggaagaagaaaagcgatccaagcgacaagaactcaaatgaacacgaaaatctctctctcactagtcactaagtgtttggagtgattttggacttgggagaggatttgatctcttgtttgtgttttggagtgaagtctagagcttttgtattgaatgcaatagctggaaaacttg

SEQ ID NO: 54404 - DNA, 2557 bp, Zea Mays
acctgcaacaatctttgccaaacggacacagggaacctatgccccgctggactgcactacacgtgggacagggaagtgaagccgttccgccgtgaagcagcgccaccccttgccatccgcccgaccgctgggaagcagggcccacgtctccaagcttcctacaggaagagcctgcgcccctcccaaaggacaaagatattaggatggatgaagtcacacaagctgttgaaaatctgaagaaagaatggagccaagctgtttcacagcttgaggagagcattgctgcaattgaatcatgtggaaaaacagggaaaggaacagaggaagcaacttctcttccaaggttgaatggttctgcacaggatgctctgcagttgctcaagtccctgcagttccggcttgatcttctagctcagcagctacctacttttgatgaagtgcagtctgggcaagcaaccttagggtcgtgggatgaacaatacaagaagtatgacagtgttggattttttttaatttttttcttcttcttttagcctgctttttttttgcaaaaaaaattgattgtgtttgcaggttgcgtgctagcctgaggaatgctaacttacaagcgaaagagaacattagaaaagctgctcaggaggagagggagcttcttctagggggtggagaagagtcaacaatccgtaggcgtaatctccagacaaaggttgggatgacatctgctgctgaaagtatcaccgagagcctccgacggtctcgccagatgatggttcaggaagtggaaaggagtgcaagtaccttggcaacatttgatgaatcaacaagtgttctccggaaggctgaaggtgaatatcaaggacaccgctctttgctaatgcgtacccgtggtttgctctccacgatgcaacagcaagatgttcttgataggatcatcctgaccatcggctttatcattttctccttggcggttctttatgttgtctcaagacgtattggtctattgacgctgcaaaggaaactggccgatgccatcagatccggttcattatcagccgatgacatcgtagcgaatgcccaacgtggacctgccccagcaaatgttcctgctcccatctacgatgaactgtgattcgtttgtcctctgtattgttaaggtcgctgaaacacttggaacaaacagagcttgcttctgaagccctacacctctgaaggatcaggtatcatcaacgaatgtatcaagtaaatttacctgacactcctcgacatcgacgaaacatcttctgatcagttcattcctaactattaaaggaagtttacgctcttccatctactgcaaaattcaattggaaggatatctattgtagaattaatttagaaagactgcatgtacttctagaataggtacgagtttttatttcagacaacacactcacttctatgtttcttcaatgtgttactcaactaaacataccaagaaaaaatgatgatattgccatatatttatgtatgttgttgtattaaactgtggaagcatagatgattagcatcgccaatgcccacgtatttacatatttatatgtcttataaatgtgcatatgcatatataatacgcacacatatgtgctcatattcgttgaacacaaatacctattttctatgtcctccttactcaagtgtaaaccatgagatcatctctatttagctctctttatttcgctttgcctattgaattcgtacttaattaaaggttacagaccaaccaatattgatattactgatgcagaaaatgacgatatcgacgagggaaacatagagatacaatcttctttgtttcaccaatctaccatatttaattctttttcttaaattgaactcattccatccttcacatgctcggttattccatatgaacatttcatacaacagataatactgtcacagttaaatacaaataaaaaatataacaccataatatcatttaataaattataatagaatccattcttgtgcttaatagtattgaaagtcgtctagagggaggtgaataggcaaatctgaaatttgtaaactttaagcacaactacaagtcggggttagctttagaaataaaaccaagtccgaaagagagggtgaaaacaaattaaccaagaaataaagcgagtgacacggtgatttattttaccgaggtttggttcttgcaaacctacttccgttgaggtggtcacaaagactgggtctctttcaaccctttccctctctcaaacggtcacttaaaccgagtgagtttttctcctcaatcaaatgggtcacttagaacccgcaagtaccaccacacaattggtgtctcttgctttgattacaaatgacttgagaacaagaatggggaagaagaaaagcgatccaagcgacaagaactcaaatgaacacgaaaatctctctctcactagtcactaagtgtttggagtgattttggacttgggagaggatttgatctcttgtttgtgttttggagtgaagtctagagcttttgtattgaatgcaatagctggaaaacttg

SEQ ID NO: 54405 - DNA, 2708 bp, Zea Mays
gcttgaccccggttcggggcggttttcacagggaagaaaaacacaccccggatggtcgggcacgtaagccccgtctcgtcctccagatatcggccgccaccttcacctccaccgccccggcgcacgtgcgcgtctccatcgtcgccgcctctcctccttcggacacgactgaccttccactggcgccgacgaagaagacacataggaagaagctcaccgccaaacctcatccagatccagtcgctaccctccgaaagccgcatacggaacgtctcgtctcttcctttggatccggcagccggtgctcctcctccggatccggtggtcaactccatcacccccagctccacctcccttagtccccctccatccgccctcacccaccgcttctatatcgccacctctctcgttgtagaagacactgaggatctgatattaggatggatgaagtcacacaagctgttgaaaatctgaagaaagaatggagccaagctgtttcacagcttgaggagagcattgctgcaattgaatcatgtggaaaaacagggaaaggaacagaggaagcaacttctcttccaaggttgaatggttctgcacaggatgctctgcagttgctcaagtccctgcagttccggcttgatcttctagctcagcagctacctacttttgatgaagtgcagtctgggcaagcaaccttagggtcgtgggatgaacaatacaagaagttgcgtgctagcctgaggaatgctaacttacaagcgaaagagaacattagaaaagctgctcaggaggagagggagcttcttctagggggtggagaagagtcaacaatccgtaggcgtaatctccagacaaaggttgggatgacatctgctgctgaaagtatcaccgagagcctccgacggtctcgccagatgatggttcaggaagtggaaaggagtgcaagtaccttggcaacatttgatgaatcaacaagtgttctccggaaggctgaaggtgaatatcaaggacaccgctctttgctaatgcgtacccgtggtttgctctccacgatgcaacagcaagatgttcttgataggatcatcctgaccatcggctttatcattttctccttggcggttctttatgttgtctcaagacgtattggtctattgacgctgcaaaggaaactggccgatgccatcagatccggttcattatcagccgatgacatcgtagcgaatgcccaacgtggacctgccccagcaaatgttcctgctcccatctacgatgaactgtgattcgtttgtcctctgtattgttaaggtcgctgaaacacttggaacaaacagagcttgcttctgaagccctacacctctgaaggatcaggtatcatcaacgaatgtatcaagtaaatttacctgacactcctcgacatcgacgaaacatcttctgatcagttcattcctaactattaaaggaagtttacgctcttccatctactgcaaaattcaattggaaggatatctattgtagaattaatttagaaagactgcatgtacttctagaataggtacgagtttttatttcagacaacacactcacttctatgtttcttcaatgtgttactcaactaaacataccaagaaaaaatgatgatattgccatatatttatgtatgttgttgtattaaactgtggaagcatagatgattagcatcgccaatgcccacgtatttacatatttatatgtcttataaatgtgcatatgcatatataatacgcacacatatgtgctcatattcgttgaacacaaatacctattttctatgtcctccttactcaagtgtaaaccatgagatcatctctatttagctctctttatttcgctttgcctattgaattcgtacttaattaaaggttacagaccaaccaatattgatattactgatgcagaaaatgacgatatcgacgagggaaacatagagatacaatcttctttgtttcaccaatctaccatatttaattctttttcttaaattgaactcattccatccttcacatgctcggttattccatatgaacatttcatacaacagataatactgtcacagttaaatacaaataaaaaatataacaccataatatcatttaataaattataatagaatccattcttgtgcttaatagtattgaaagtcgtctagagggaggtgaataggcaaatctgaaatttgtaaactttaagcacaactacaagtcggggttagctttagaaataaaaccaagtccgaaagagagggtgaaaacaaattaaccaagaaataaagcgagtgacacggtgatttattttaccgaggtttggttcttgcaaacctacttccgttgaggtggtcacaaagactgggtctctttcaaccctttccctctctcaaacggtcacttaaaccgagtgagtttttctcctcaatcaaatgggtcacttagaacccgcaagtaccaccacacaattggtgtctcttgctttgattacaaatgacttgagaacaagaatggggaagaagaaaagcgatccaagcgacaagaactcaaatgaacacgaaaatctctctctcactagtcactaagtgtttggagtgattttggacttgggagaggatttgatctcttgtttgtgttttggagtgaagtctagagcttttgtattgaatgcaatagctggaaaacttg

SEQ ID NO: 54406 - DNA, 2832 bp, Zea Mays
gcttgaccccggttcggggcggttttcacagggaagaaaaacacaccccggatggtcgggcacgtaagccccgtctcgtcctccagatatcggccgccaccttcacctccaccgccccggcgcacgtgcgcgtctccatcgtcgccgcctctcctccttcggacacgactgaccttccactggcgccgacgaagaagacacataggaagaagctcaccgccaaacctcatccagatccagtcgctaccctccgaaagccgcatacggaacgtctcgtctcttcctttggatccggcagccggtgctcctcctccggatccggtggtcaactccatcacccccagctccacctcccttagtccccctccatccgccctcacccaccgcttctatatcgccacctctctcgttgtagaagacactgaggatctgggaagtgaagccgttccgccgtgaagcagcgccaccccttgccatccgcccgaccgctgggaagcagggcccacgtctccaagcttcctacaggaagagcctgcgcccctcccaaaggacaaagatattaggatggatgaagtcacacaagctgttgaaaatctgaagaaagaatggagccaagctgtttcacagcttgaggagagcattgctgcaattgaatcatgtggaaaaacagggaaaggaacagaggaagcaacttctcttccaaggttgaatggttctgcacaggatgctctgcagttgctcaagtccctgcagttccggcttgatcttctagctcagcagctacctacttttgatgaagtgcagtctgggcaagcaaccttagggtcgtgggatgaacaatacaagaagttgcgtgctagcctgaggaatgctaacttacaagcgaaagagaacattagaaaagctgctcaggaggagagggagcttcttctagggggtggagaagagtcaacaatccgtaggcgtaatctccagacaaaggttgggatgacatctgctgctgaaagtatcaccgagagcctccgacggtctcgccagatgatggttcaggaagtggaaaggagtgcaagtaccttggcaacatttgatgaatcaacaagtgttctccggaaggctgaaggtgaatatcaaggacaccgctctttgctaatgcgtacccgtggtttgctctccacgatgcaacagcaagatgttcttgataggatcatcctgaccatcggctttatcattttctccttggcggttctttatgttgtctcaagacgtattggtctattgacgctgcaaaggaaactggccgatgccatcagatccggttcattatcagccgatgacatcgtagcgaatgcccaacgtggacctgccccagcaaatgttcctgctcccatctacgatgaactgtgattcgtttgtcctctgtattgttaaggtcgctgaaacacttggaacaaacagagcttgcttctgaagccctacacctctgaaggatcaggtatcatcaacgaatgtatcaagtaaatttacctgacactcctcgacatcgacgaaacatcttctgatcagttcattcctaactattaaaggaagtttacgctcttccatctactgcaaaattcaattggaaggatatctattgtagaattaatttagaaagactgcatgtacttctagaataggtacgagtttttatttcagacaacacactcacttctatgtttcttcaatgtgttactcaactaaacataccaagaaaaaatgatgatattgccatatatttatgtatgttgttgtattaaactgtggaagcatagatgattagcatcgccaatgcccacgtatttacatatttatatgtcttataaatgtgcatatgcatatataatacgcacacatatgtgctcatattcgttgaacacaaatacctattttctatgtcctccttactcaagtgtaaaccatgagatcatctctatttagctctctttatttcgctttgcctattgaattcgtacttaattaaaggttacagaccaaccaatattgatattactgatgcagaaaatgacgatatcgacgagggaaacatagagatacaatcttctttgtttcaccaatctaccatatttaattctttttcttaaattgaactcattccatccttcacatgctcggttattccatatgaacatttcatacaacagataatactgtcacagttaaatacaaataaaaaatataacaccataatatcatttaataaattataatagaatccattcttgtgcttaatagtattgaaagtcgtctagagggaggtgaataggcaaatctgaaatttgtaaactttaagcacaactacaagtcggggttagctttagaaataaaaccaagtccgaaagagagggtgaaaacaaattaaccaagaaataaagcgagtgacacggtgatttattttaccgaggtttggttcttgcaaacctacttccgttgaggtggtcacaaagactgggtctctttcaaccctttccctctctcaaacggtcacttaaaccgagtgagtttttctcctcaatcaaatgggtcacttagaacccgcaagtaccaccacacaattggtgtctcttgctttgattacaaatgacttgagaacaagaatggggaagaagaaaagcgatccaagcgacaagaactcaaatgaacacgaaaatctctctctcactagtcactaagtgtttggagtgattttggacttgggagaggatttgatctcttgtttgtgttttggagtgaagtctagagcttttgtattgaatgcaatagctggaaaacttg

SEQ ID NO: 54407 - DNA, 1547 bp, Zea Mays
gcttgaccccggttcggggcggttttcacagggaagaaaaacacaccccggatggtcgggcacgtaagccccgtctcgtcctccagatatcggccgccaccttcacctccaccgccccggcgcacgtgcgcgtctccatcgtcgccgcctctcctccttcggacacgactgaccttccactggcgccgacgaagaagacacataggaagaagctcaccgccaaacctcatccagatccagtcgctaccctccgaaagccgcatacggaacgtctcgtctcttcctttggatccggcagccggtgctcctcctccggatccggtggtcaactccatcacccccagctccacctcccttagtccccctccatccgccctcacccaccgcttctatatcgccacctctctcgttgtagaagacactgaggatctggccatcatcatccgtcgcccctcactcgatttcccatctgccgctccctcctggtctctgagccgctgatcgggtctccgacgcagggaagtgaagccgttccgccgtgaagcagcgccaccccttgccatccgcccgaccgctgggaagcagggcccacgtctccaagcttcctacaggaagagcctgcgcccctcccaaaggacaaagatattaggatggatgaagtcacacaagctgttgaaaatctgaagaaagaatggagccaagctgtttcacagcttgaggagagcattgctgcaattgaatcatgtggaaaaacagggaaaggaacagaggaagcaacttctcttccaaggttgaatggttctgcacaggatgctctgcagttgctcaagtccctgcagttccggcttgatcttctagctcagcagctacctacttttgatgaagtgcagtctgggcaagcaaccttagggtcgtgggatgaacaatacaagaagttgcgtgctagcctgaggaatgctaacttacaagcgaaagagaacattagaaaagctgctcaggaggagagggagcttcttctagggggtggagaagagtcaacaatccgtaggcgtaatctccagacaaaggttgggatgacatctgctgctgaaagtatcaccgagagcctccgacggtctcgccagatgatggttcaggaagtggaaaggagtgcaagtaccttggcaacatttgatgaatcaacaagtgttctccggaaggctgaaggtgaatatcaaggacaccgctctttgctaatgcgtacccgtggtttgctctccacgatgcaacagcaagatgttcttgataggatcatcctgaccatcggctttatcattttctccttggcggttctttatgttgtctcaagacgtattggtctattgacgctgcaaaggaaactggccgatgccatcagatccggttcattatcagccgatgacatcgtagcgaatgcccaacgtggacctgccccagcaaatgttcctgctcccatctacgatgaactgtgattcgtttgtcctctgtattgttaagggccactcaaagggctgccgtctgcagcgctg

SEQ ID NO: 54408 - DNA, 276 bp, Zea Mays
atgaggaggggaggcggcagatcggatgcgacgccgctggagcaggaggcggtggcgctgatgagtttggaggagacgcgcgaggcaacggtgagccgcgaggcatgggaggcggcgagtcggaggcgacgccgctggatcaggaggcgacgacgctcctcgatggaggtgggctcgaagatctggatgtcatacgcggaggtgttggcgtctgttgctgctgcggcggcgtcagaggcgtcagacgggtgggaggaggaagggagagggaggtga

SEQ ID NO: 54409 - DNA, 1876 bp, Zea Mays
aaattatcaacaccccaggaaaggttcacgtacaccttgttggcatcacccctggtcctcgtggtgaggattgatccctggatggtggcgggctggaattgaccatcacacttctttcgtcagtacttatatatcgagagatcatatcagatgcataagtttgaaaaaatttctagacattctataacggaatatgctcaatccaggaaacagaatataaatgttctgtctgaatctctgaaaagtaaccaatagcgtagaacttgatttatgcaatgtgtgatctggtaggaagccatgaatggtgaacatcatagaaccctaatatataatgaagtgtttttattgttgttcctacaaactgtgtagttgtcaaaatcaccatccttttatgctaaccaaactgattgctcatgtcagacatttaacaaccaattgaaaatcaagaaactaatttgcatttgtggggacagactttatatttttttgtcagagataatactaagaagatccgatgaattatgaaggttgttgttttaccgcgtataaaataaggaatgtttttttgaatcttaaaaaatgcagagtgacacataagtaaaagatatagattcagtaaaaaatattgtaatgggtgactttggaggcgaaaattgtaggatttacatctaaaaagaacaagcatcacataacttaagtctgaacaacacagcgatggcgatgttatagcaaaacatcagataggaaataggtagtgaggtagcgatggaacaataaataacagatagttatagaacaataatctttttacagctacagatatcagagaagaatgcttttacgttcaaggaaaaagtagcaaaacatacaccaaatgaagcatgaatggtgtcgagggtttgaagtttttttggtgtataaataaagcataaatgcatagtaaaaaagttgtaatggcctaatgggtgactttatagtctaaattagaaggattcatatcctgaaaataattgcctgagcatgagtgggaatatcttttttctgatttatatattcactttatagtgttattgtggattttgttgtgtgcaaaaaatcaaatgggaaggtgttagcaatcaatttgcgaacttgttggaaaagaagagttgtaagacaaccagtgacgcttgaacaaaagactggtctaaccctgatgaggttttggctctcgtgaggagtgttggctttttctgctaatacaaccatctacttgacagagacgtggtggcacaagggcctgaatgatttgaaggaagaatttccaaacacctatatcaaggtaaggaaattactacaatttaatgagtgtaaattatattccatttttccaagcatttcttttattgatttttcttattatagaagctgtcaataggattctatgttcgctaactgacacaaaatgtagctttttataaatgatgtcaataatattgcataggaaaagaaacgtagagctcatgggatacattcgtttgtgcatcacactttattttgacttcatatacgatcgtgcattttagataaattaagtagtgctcagaaagttatatattggctagaaatttggcagcaggtcagtgtccatgggcactaaagcacacatctatattattgcaaacaattttttatgtgtcctttggaatctttttagatacatatgggctaataatctaacagacacaacaactacttggctacttggctggacaagaaaagaaacattgagtacttacattcaatggcttaccttggagtcttgaaacaaaggccaatatttatccagaacatgtttcttcccttatcaggtttgttgtccctggttgccttctta

SEQ ID NO: 54410 - DNA, 1703 bp, Zea Mays
cagccaccaagtgaaggaacaccgaaagatacacggtcgatcaagctcgactactcgatccatcacacaaacccttgttacacacggcagcagccaacccggcccggtccagaaccagcaggcggcagcagggagaagagagggagatcgagtccgtttgctgacgacatatcatgccgtggttcccagccgtgccgccggcgctggcggccgccgacgaggcgcggatcgtcaagaagcgcgcggggctgccgaggctgctgcacaagctcttcatcaaggtgctccgcctgaggccggcgttggcggcggaggagtactacggcgcctaccggatgggcatgggcgtgggcgccgcggacgaggactgctgctactactacagctacggcggcgcggggtcgtcgtcgtgggccggcgtgctctcctccatcccggaggaggactacgacgacagctccgacgagggcacgcccgacgtcgccatgcccggccccgccgtgctccgcaaggccaagtccgagcggttcgtcgtcggcccacccgacggcgccgccgtcctgcacgtcgaggtcctcctctagcgccagagcacacgcacgcaaaaggcgccgctccttgtccttggccgccgtacgtcgctcatctcatctcccgatggatcggatacagtgctactactggactttggagggagcaaaccaccagttgccttcattctctccaccgaatgcagctgctcccagggttctgcctgtgcagctcctgctcccacggcaattggctgcacgccattattgcttggcctctacaagactacaacactacagaaagatatgatggccgggatgccgaaaagttgcaaacacaatgttgatatatgctcttgtgatgagtgattatcaacaagggtaatatcttggatcgagttgtgtgggctaaccggaacatgagtgtgtccgtgcaacatgtttcttagcttgtgaagcgcaggtgtggagtccggagacgatggttgatggcaaaagtgaagatcatgcgagttcatatcaatagaccaagagcagcgaaagatgaatgttgggtcacaagggactagagaagccgcccatagtggctaatacccggggacactgagaggcgcaaggatacggaggcggatcgcgttgccagtgcagttacagactgacgagatgcgcgtgtcaaggatgtgggggacacgtatggcgtacgctaccgcgaggtgtttcatcggtcgagcttcaaaaccaccctgcgaaaatgtgctggtttcatcgtgtttgcacctcaaaacctgataacatggttctagagggaatcagagaagcaaagtggcgtcaacgcggagggtgcatcaaggcgaaacaattttgtgaaaagtgcatgtaacacccaaaaaccaattttgggaatatagggaaaaagtctccaaaataattaaattaaatcatcttttagtaggagcttcttgcttttgaaatgattctcctagaataattaaatggtaacgttaaaattctgagtacccaagttcagatttgaacttctaaccaataaaaaaactcagaaaagaataactagaagattgcgatttgtttaattcagtaaatcatttctttcgtggattattcattctgaagtgttcatgaataaataattaatattaaaataataaaaatata

SEQ ID NO: 54411 - DNA, 1668 bp, Zea Mays
taaaaacatgggctggctcatacacgagtataaaaacacggcctaacagaagacagccaccaagtgaaggaacaccgaaagatacacggtcgatcaagctcgactactcgatccatcacacaaacccttgttacacacggcagcagccaacccggcccggtccagaaccagcaggcggcagcagggagaagagagggagatcgagtccgtttgctgacgacatatcatgccgtggttcccagccgtgccgccggcgctggcggccgccgacgaggcgcggatcgtcaagaagcgcgcggggctgccgaggctgctgcacaagctcttcatcaaggtgctccgcctgaggccggcgttggcggcggaggagtactacggcgcctaccggatgggcatgggcgtgggcgccgcggacgaggactgctgctactactacagctacggcggcgcggggtcgtcgtcgtgggccggcgtgctctcctccatcccggaggaggactacgacgacagctccgacgagggcacgcccgacgtcgccatgcccggccccgccgtgctccgcaaggccaagtccgagcggttcgtcgtcggcccacccgacggcgccgccgtcctgcacgtcgaggtcctcctctagcgccagagcacacgcacgcaaaaggcgccgctccttgtccttggccgccgtacgtcgctcatctcatctcccgatggatcggatacagtgctactactggactttggagggagcaaacttgccttcattctctccaccgaatgcagctgctcccagggttctgcctgtgcagctcctgctcccacggcaattggctgcacgccattattgcttggcctctacaagactacaacactacagaaagatatgatggccgggatgccgaaaagttgcaaacacaatgttgatatatgctcttgtgatgagtgattatcaacaagggtgtggagtccggagacgatggttgatggcaaaagtgaagatcatgcgagttcatatcaatagaccaagagcagcgaaagatgaatgttgggtcacaagggactagagaagccgcccatagtggctaatacccggggacactgagaggcgcaaggatacggaggcggatcgcgttgccagtgcagttacagactgacgagatgcgcgtgtcaaggatgtgggggacacgtatggcgtacgctaccgcgaggtgtttcatcggtcgagcttcaaaaccaccctgcgaaaatgtgctggtttcatcgtgtttgcacctcaaaacctgataacatggttctagagggaatcagagaagcaaagtggcgtcaacgcggagggtgcatcaaggcgaaacaattttgtgaaaagtgcatgtaacacccaaaaaccaattttgggaatatagggaaaaagtctccaaaataattaaattaaatcatcttttagtaggagcttcttgcttttgaaatgattctcctagaataattaaatggtaacgttaaaattctgagtacccaagttcagatttgaacttctaaccaataaaaaaactcagaaaagaataactagaagattgcgatttgtttaattcagtaaatcatttctttcgtggattattcattctgaagtgttcatgaataaataattaatattaaaataataaaaatata

SEQ ID NO: 54412 - DNA, 1588 bp, Zea Mays
caacgacgacggtttattactctcgtgtctctctccgatcctctcactttttccgaggctgtgcataaaaggaacaagcaaaagagtcttctagctcactttttgcacgcttcctctcctcctactactactttctgcgatcagattcagagaggctacaccatcgaggcaagtacgacgcgcatagctaggtagctaccaccgcctgcttatatatatactattactttgccgtgcactgcactggcactgcacttccttccttctccctgcgcgcggcggccatcaatgggggacggccagtgcgagctcgtggtcgacaaccactgccagctccggcaccgccttgacctgtctggagccgaggacctcttcagcgtcatcgggacgtgggaggagcgcacggacgacggcggcgccggtgatggtggtggaggcggttcttctgcgcctgctatgcgagcttataggcagataagctgcagtgctggcgccgtggcggcgactaggctgactgggaagagccggcggcgcacgggcgaggaggaggaggagaaaggcagtggcggcagcgctcccgggcccgcgcataagaagcacaataaggcgggttcagcggtgacagacgacgacgagggggcgccgaagatttcacatgtggcggtggagcgcaaccggaggaagcagatgaacgagcacctcaccgtgctgcgctcgctcatgccctgcttctacgtcaagaggggagaccaagcgtccatcataggaggggtggtggactacatcaaggagcttcagcaggtgctgcgttcgctggaggctaagaagcaccgcaaggcgtatgcggagcaggtgctgagcccgcggccttcagcaggtggcgtgtcgacgtcggtatcggcggccagcccgcggcatctcgccgtcaagtccgtggcgccgctcagccctcgaatggcggttcccataagcccccggacgccgaccccgggcagcccttacaaggcagctgcatccggcgtggctggatgctgcaggctaccactactcccgccctacatgctgtcgtcgtcggcggcggcggctgcggcgtcctactcgcatgatcagcagcagcactactccacgcagacgacgacgtacctgccgaccctagacagccttgtgaccgaactcgccacgcagcaggcagcttgcaggccagcggcggcggcggccgggctcgccctccccgacgtgaaggtggagtttgcagggcccaacctcgtgctcaagacggtgtctcaccgcgcgccggggcaggcgctcaagatcatcgccgcactcgagagtctctcgctgcagatccttcacgtcagcgttagcgccgtggacgacaccatgctgcactccttcaccattaaggcactcacactgctgaatcaaggatgggccaggctggagagcaggcattcaattgggagcagtactagtatgtattaggatgtcctcatttcatgtgagctctctgagtctttgtgtagcatactattcaaactctccgggaaataaccatgaaaaaaaaatttaaaacatctgtcgtccaacc

SEQ ID NO: 54413 - DNA, 2112 bp, Zea Mays
caaaaagtcattcgtgtctcttcacctggcgctgcatgcatgctgccacgtatccgccatggctgccacctccgttcttgtattgtatcctcgccgtacgtccgggaaactccgcctagccaccaacaccacaataatatcacctgcactccatttcagtttcagtgaagctagccatcagtacgcgaacacgctcatcagggtcaggccacagccaccatggtgaagctggcgacggcgcgcgagtgccgcgcatacagcctcggcgccggcgcggggtccggcacggcgttgcgcaaccggtgggagtacatcaacgccggggtgtacatcttcgcggcggtcctcctggtcggcgggttcctcgcgcagctcctgccgtggggcgggcccagcagcccggggctcgtggtcgccgcgatcgggctcgccggcttgctggccgtcaacacgcacgacctcctcgcgcacgccgctggcgtcgattaccgcctcgggatggtggtcgggcttgacgcgcagatggggctcgtcgagctcggcgtccccgccgtgcagatcgtcggcaccgtgctcatgctcgtcgctgtcgtcttctttgtgattcaggtcaggtctcttcttgttccctggatttgggactcgggagtgctaagcgcagcctgtacaaaatccgttcaaattacgtgatgctgatcgtttgtatggttgcttattttgaatcatatacatggctcaaatgaagttcaagttctgtttatttactttctgaagcagagcatttctgaacctaatgctcttggtctgtgaatagaattcgcgaatgatattctcatgttctagataggcttactaaatgcattttgaacttattgatgtagaactggatgaatggctgcaaggaaggaatttgtttttactgtgatatgcgagtttcgcacatagaattcgtgctaccggctacccgatcatgctttgaccacgaccacgagtagcttgagttcactcagctgcaatttgattatacgatgcagatggagagaggctaccggcacagcctagccatgcacggcctgaacctgctcatagccgggccggcactgtggtgcctggggtctgtgcaaaacatctgccagttctacgagcgtgcgagcgggcacgtccagctcctgcagaagagcgtgcagatcccgctgctgctggggagcaccctcttcctcatcgccggcatcgtcaaccggcacgaccgccgcagccgccactccggcttcgtgctactggggaggagctgggcgtggttctgcctgttcgggagcctcctcttccttgccggcggcctgctgaacctgctcaaggtgttcaagacgcagcagatgggcggccggggcctggagaagctgcgcggcggcacgcaggagcggctggccttggagcgggagggcaaggtgccgctcatcctggagcacggacacggcggccggaggggccctgcgataccgccgccgccgcccgggtcttacaaggacgcgctcgtcagtagcgccagctaggaacagaaatggccttgtagatgctcagcattttacgttgaactgcatcctctgtttttaatcatcaatcacgttcacgcctgcttgaataagcttttactagccgtttgctacacctccacttgattagtcttattaaaaacgaattataatttattttgttataatttgttttatcacttagcatgacttgaaattgtcatatatataggaacggatggagtagattgctttggatccacttgacaaagggcaagtataagataataagagactttcaagaggttaaataaaaagagaatacaagagacaagagtatttttacatgactttttatactccgtagtgaagggcaagtataagataataagagaagtcttaaagaggttaaatgaaaaaaatataaaaaaagacaagggataataaaagaagtcttaaagaggttaaatgaaaagagttttaagagtccatttttacataactttttatacatactccgttctaaaatagtagtttagctcttaatttttatgtctaaataatagtcgttttagctctaagg

SEQ ID NO: 54414 - DNA, 904 bp, Zea Mays
cgccatcgacgcagctgtctttggtctctcgtgcttccctttgagagatcgggctctcatcattttgtttgttgctacctgaggacacatcgttttgtttgttgctacctgctaacatatcaactagcacgattttgagcctatctaaatgcccttctgtttatggctgtcaaggtttatggctgttcaggttcttattgattttggtctgagtttcacattgacaattcctgaggacaaagcagtggacctatatgttctagagagagctttgatttccatgcattcgtcctgtggggaagtggctcgactgatctgtgcaaacatttacgactccgcatcacagattagtccagttgcaattggatttatgccttttccttttgttcgtggcatcttgtttcctatggtttttatgcagatggagaaaatccttgcggtgtatagaaaggcttcaaagcaatggtgttccacccagaacaagctggctcaagtgaggcaacgggtcaggaagcgcaccatggtcggatgaacgaagaagaaaaaattgtggcatggaatggatgtatgttattagattaaaataacaaaatttatgtatggatagaatcacagatggattctgaaacattttctcataacaatataacacacatatgtatataagttatcgtgttattatatggttccgttgcaacgcacgggcactcacctagtatatatatatagacttattgtcatccatttgaatatgaaaaaaatagaaaggaaagaccaatagtattttagaacatagggagtatttgattatctccaaaatccttgatccgcatttcagatgttagcatgcttaggttgggtccaacgctggcccttatcgattgttgttgtggctcgtctggca

SEQ ID NO: 54415 - DNA, 2414 bp, Zea Mays
catgcaggaattttaatagtataatttggagagcttgggcgccaccaaagtgcaaattcttcagttggcttgctgttcaaaatagagtttggacagcagacaggttggcaagaaggggatggcctcataatccgcgttgtgtcctatgcgcctcatgcccagaatctggactacatctttttgctgaatgttgcttcaccagacatatttgggctgatttgagtatttgggctgcaattacggagatccatcattcttcttggcaacctgtagattcggtgcaccaatggtggtcgaatcttgcaacatccgcagtgagaagcgtgaagggattgcgaaccctcatcatcctcgtgtcttggacaatttggtgtgagagaaactcgcgaatctttgagcacaaagagaagaccgtgacacagactatagcgatgattaaggagcaaatccgcctgtggattctaggaggagcaaaacacttagcaaggctggtgtaggttttggggaaggggaggggttggttttgggacatttgtgtcaccatacttaatgtctccttccctagtgtgatgtacttgtatattttagccctcgctggctctcaccctctttttaatataacaggcaattctcttgccagttttcaaaaaaatgtaggcgtccacaaaagcttttggtgcacggttctgccgaggatccccgtcataaacgcccgccatcggatcggacccatacgcgatatcagcaccgtccgtcatgcaaggttgccgaggccgccatcaacgtcatcctcccgcaatccccgccgactgccttgcctgcccttccatcctcctccccacccctccttccatcctcgcccgcgcgctccgcacgcattccatccatgctagcctacagcaacagacgcccatccctgtcgtcgcgctcgcctccctcctctttgttgcctccgcgtcggcctccaccccgctcttcgacgcgtttgccgccgactcagatttctggtgcactctcttctctacggcgcgagcaagggcggcgcttgccatggcatcgacgggaaccaggcgttcctaccgctcttcttcctcccgtgtcgtcagaggaagccgcgaacagcacgcaggaatcaggcggtcttgaggacgaggagctataggtgcaggatgcagttgccagtggttccaagaggagcaaagactccgccgccgccgccacacgcagagccaatgttagctcaccctctgtggttcactcacaccctgccatcctccttgctcccgcgcagcagattctagaggttaagcaagcaggatgggcccgcgacccctgtgtggccttctctactccaagtgtctcgacgtcgagcgactctggatctatcgtcaacgaccttgagagcatcggggtaacacaaatggaggatagaatgtgattgatcattattctttctggaatgacttacctcatcaagcacggtagcaagtcttccacccgcaaaccctcacgccatcgacgcagctgtctttggtctctcgtgcttccctttgagagatcgggctctcatcattttgtttgttgctacctgaggacacatcgttttgtttgttgctacctgctaacatatcaactagcacgattttgagcctatctaaatgcccttctgtttatggctgtcaaggtttatggctgttcaggttcttattgattttggtctgagtttcacattgacaattcctgaggacaaagcagtggacctatatgttctagagagagctttgatttccatgcattcgtcctgtggggaagtggctcgactgatctgtgcaaacatttacgactccgcatcacagattagtccagttgcaattggatttatgccttttccttttgttcgtggcatcttgtttcctatggtttttatgcagatggagaaaatccttgcggtgtatagaaaggcttcaaagcaatggtgttccacccagaacaagctggctcaagtgaggcaacgggtcaggaagcgcaccatggtcggatgaacgaagaagaaaaaattgtggcatggaatggatgtatgttattagattaaaataacaaaatttatgtatggatagaatcacagatggattctgaaacattttctcataacaatataacacacatatgtatataagttatcgtgttattatatggttccgttgcaacgcacgggcactcacctagtatatatatatagacttattgtcatccatttgaatatgaaaaaaatagaaaggaaagaccaatagtattttagaacatagggagtatttgattatctccaaaatccttgatccgcatttcagatgttagcatgcttaggttgggtccaacgctggcccttatcgattgttgttgtggctcgtctggca

SEQ ID NO: 54416 - DNA, 2297 bp, Zea Mays
catgcaggaattttaatagtataatttggagagcttgggcgccaccaaagtgcaaattcttcagttggcttgctgttcaaaatagagtttggacagcagacaggttggcaagaaggggatggcctcataatccgcgttgtgtcctatgcgcctcatgcccagaatctggactacatctttttgctgaatgttgcttcaccagacatatttgggctgatttgagtatttgggctgcaattacggagatccatcattcttcttggcaacctgtagattcggtgcaccaatggtggtcgaatcttgcaacatccgcagtgagaagcgtgaagggattgcgaaccctcatcatcctcgtgtcttggacaatttggtgtgagagaaactcgcgaatctttgagcacaaagagaagaccgtgacacagactatagcgatgattaaggagcaaatccgcctgtggattctaggaggagcaaaacacttagcaaggctggtgtaggttttggggaaggggaggggttggttttgggacatttgtgtcaccatacttaatgtctccttccctagtgtgatgtacttgtatattttagccctcgctggctctcaccctctttttaatataacaggcaattctcttgccagttttcaaaaaaatgtaggcgtccacaaaagcttttggtgcacggttctgccgaggatccccgtcataaacgcccgccatcggatcggacccatacgcgatatcagcaccgtccgtcatgcaaggttgccgaggccgccatcaacgtcatcctcccgcaatccccgccgactgccttgcctgcccttccatcctcctccccacccctccttccatcctcgcccgcgcgctccgcacgcattccatccatgctagcctacagcaacagacgcccatccctgtcgtcgcgctcgcctccctcctctttgttgcctccgcgtcggcctccaccccgctcttcgacgcgtttgccgccgactcagatttctggtgcactctcttctctacggcgcgagcaagggcggcgcttgccatggcatcgacgggaaccaggcgttcctaccgctcttcttcctcccgtgtcgtcagaggaagccgcgaacagcacgcaggaatcaggcggtcttgaggacgaggagctataggtgcaggatgcagttgccagtggttccaagaggagcaaagactccgccgccgccgccacacgcagagccaatgttagctcaccctctgtggttcactcacaccctgccatcctccttgctcccgcgcagcagattctagaggttaagcaagcaggatgggcccgcgacccctgtgtggccttctctactccaagtgtctcgacgtcgagcgactctggatctatcgtcaacgaccttgagagcatcggggtaacacaaatggaggatagaatgtgattgatcattattctttctggaatgacttacctcatcaagcacggtagcaagtcttccacccgcaaaccctcacgccatcgacgcagctgtctttggtctctcgtgcttccctttgagagatcgggctctcatcattttgtttgttgctacctgaggacacatcgttttgtttgttgctacctgctaacatatcaactagcacgattttgagcctatctaaatgcccttctgtttatggctgtcaaggtttatggctgttcaggttcttattgattttggtctgagtttcacattgacaattcctgaggacaaagcagtggacctatatgttctagagagagctttgatttccatgcattcgtcctgtggggaagtgatggagaaaatccttgcggtgtatagaaaggcttcaaagcaatggtgttccacccagaacaagctggctcaagtgaggcaacgggtcaggaagcgcaccatggtcggatgaacgaagaagaaaaaattgtggcatggaatggatgtatgttattagattaaaataacaaaatttatgtatggatagaatcacagatggattctgaaacattttctcataacaatataacacacatatgtatataagttatcgtgttattatatggttccgttgcaacgcacgggcactcacctagtatatatatatagacttattgtcatccatttgaatatgaaaaaaatagaaaggaaagaccaatagtattttagaacatagggagtatttgattatctccaaaatccttgatccgcatttcagatgttagcatgcttaggttgggtccaacgctggcccttatcgattgttgttgtggctcgtctggca

SEQ ID NO: 54417 - DNA, 2145 bp, Zea Mays
catgcaggaattttaatagtataatttggagagcttgggcgccaccaaagtgcaaattcttcagttggcttgctgttcaaaatagagtttggacagcagacaggttggcaagaaggggatggcctcataatccgcgttgtgtcctatgcgcctcatgcccagaatctggactacatctttttgctgaatgttgcttcaccagacatatttgggctgatttgagtatttgggctgcaattacggagatccatcattcttcttggcaacctgtagattcggtgcaccaatggtggtcgaatcttgcaacatccgcagtgagaagcgtgaagggattgcgaaccctcatcatcctcgtgtcttggacaatttggtgtgagagaaactcgcgaatctttgagcacaaagagaagaccgtgacacagactatagcgatgattaaggagcaaatccgcctgtggattctaggaggagcaaaacacttagcaaggctggtgtaggttttggggaaggggaggggttggttttgggacatttgtgtcaccatacttaatgtctccttccctagtgtgatgtacttgtatattttagccctcgctggctctcaccctctttttaatataacaggcaattctcttgccagttttcaaaaaaatgtaggcgtccacaaaagcttttggtgcacggttctgccgaggatccccgtcataaacgcccgccatcggatcggacccatacgcgatatcagcaccgtccgtcatgcaaggttgccgaggccgccatcaacgtcatcctcccgcaatccccgccgactgccttgcctgcccttccatcctcctccccacccctccttccatcctcgcccgcgcgctccgcacgcattccatccatgctagcctacagcaacagacgcccatccctgtcgtcgcgctcgcctccctcctctttgttgcctccgcgtcggcctccaccccgctcttcgacgcgtttgccgccgactcagatttctggtgcactctcttctctacggcgcgagcaagggcggcgcttgccatggcatcgacgggaaccaggatgggcccgcgacccctgtgtggccttctctactccaagtgtctcgacgtcgagcgactctggatctatcgtcaacgaccttgagagcatcggggtaacacaaatggaggatagaatgtgattgatcattattctttctggaatgacttacctcatcaagcacggtagcaagtcttccacccgcaaaccctcacgccatcgacgcagctgtctttggtctctcgtgcttccctttgagagatcggtgtgtgtcctctcctccaagcagtctccatccctaggcagtcattgacctgttgcttatgcatcctcgcgcatgtgcctgtttattcggctagggctctcatcattttgtttgttgctacctgaggacacatcgttttgtttgttgctacctgctaacatatcaactagcacgattttgagcctatctaaatgcccttctgtttatggctgtcaaggtttatggctgttcaggttcttattgattttggtctgagtttcacattgacaattcctgaggacaaagcagtggacctatatgttctagagagagctttgatttccatgcattcgtcctgtggggaagtgatggagaaaatccttgcggtgtatagaaaggcttcaaagcaatggtgttccacccagaacaagctggctcaagtgaggcaacgggtcaggaagcgcaccatggtcggatgaacgaagaagaaaaaattgtggcatggaatggatgtatgttattagattaaaataacaaaatttatgtatggatagaatcacagatggattctgaaacattttctcataacaatataacacacatatgtatataagttatcgtgttattatatggttccgttgcaacgcacgggcactcacctagtatatatatatagacttattgtcatccatttgaatatgaaaaaaatagaaaggaaagaccaatagtattttagaacatagggagtatttgattatctccaaaatccttgatccgcatttcagatgttagcatgcttaggttgggtccaacgctggcccttatcgattgttgttgtggctcgtctggca

SEQ ID NO: 54418 - DNA, 2320 bp, Zea Mays
catgcaggaattttaatagtataatttggagagcttgggcgccaccaaagtgcaaattcttcagttggcttgctgttcaaaatagagtttggacagcagacaggttggcaagaaggggatggcctcataatccgcgttgtgtcctatgcgcctcatgcccagaatctggactacatctttttgctgaatgttgcttcaccagacatatttgggctgatttgagtatttgggctgcaattacggagatccatcattcttcttggcaacctgtagattcggtgcaccaatggtggtcgaatcttgcaacatccgcagtgagaagcgtgaagggattgcgaaccctcatcatcctcgtgtcttggacaatttggtgtgagagaaactcgcgaatctttgagcacaaagagaagaccgtgacacagactatagcgatgattaaggagcaaatccgcctgtggattctaggaggagcaaaacacttagcaaggctggtgtaggttttggggaaggggaggggttggttttgggacatttgtgtcaccatacttaatgtctccttccctagtgtgatgtacttgtatattttagccctcgctggctctcaccctctttttaatataacaggcaattctcttgccagttttcaaaaaaatgtaggcgtccacaaaagcttttggtgcacggttctgccgaggatccccgtcataaacgcccgccatcggatcggacccatacgcgatatcagcaccgtccgtcatgcaaggttgccgaggccgccatcaacgtcatcctcccgcaatccccgccgactgccttgcctgcccttccatcctcctccccacccctccttccatcctcgcccgcgcgctccgcacgcattccatccatgctagcctacagcaacagacgcccatccctgtcgtcgcgctcgcctccctcctctttgttgcctccgcgtcggcctccaccccgctcttcgacgcgtttgccgccgactcagatttctggtgcactctcttctctacggcgcgagcaagggcggcgcttgccatggcatcgacgggaaccaggcatcactcttcctatctctctggcgttcctaccgctcttcttcctcccgtgtcgtcagaggaagccgcgaacagcacgcaggaatcaggcggtcttgaggacgaggagctataggtgcaggatgcagttgccagtggttccaagaggagcaaagactccgccgccgccgccacacgcagagccaatgttagctcaccctctgtggttcactcacaccctgccatcctccttgctcccgcgcagcagattctagaggttaagcaagcaggatgggcccgcgacccctgtgtggccttctctactccaagtgtctcgacgtcgagcgactctggatctatcgtcaacgaccttgagagcatcggggtaacacaaatggaggatagaatgtgattgatcattattctttctggaatgacttacctcatcaagcacggtagcaagtcttccacccgcaaaccctcacgccatcgacgcagctgtctttggtctctcgtgcttccctttgagagatcgggctctcatcattttgtttgttgctacctgaggacacatcgttttgtttgttgctacctgctaacatatcaactagcacgattttgagcctatctaaatgcccttctgtttatggctgtcaaggtttatggctgttcaggttcttattgattttggtctgagtttcacattgacaattcctgaggacaaagcagtggacctatatgttctagagagagctttgatttccatgcattcgtcctgtggggaagtgatggagaaaatccttgcggtgtatagaaaggcttcaaagcaatggtgttccacccagaacaagctggctcaagtgaggcaacgggtcaggaagcgcaccatggtcggatgaacgaagaagaaaaaattgtggcatggaatggatgtatgttattagattaaaataacaaaatttatgtatggatagaatcacagatggattctgaaacattttctcataacaatataacacacatatgtatataagttatcgtgttattatatggttccgttgcaacgcacgggcactcacctagtatatatatatagacttattgtcatccatttgaatatgaaaaaaatagaaaggaaagaccaatagtattttagaacatagggagtatttgattatctccaaaatccttgatccgcatttcagatgttagcatgcttaggttgggtccaacgctggcccttatcgattgttgttgtggctcgtctggca

SEQ ID NO: 54419 - DNA, 2104 bp, Zea Mays
catgcaggaattttaatagtataatttggagagcttgggcgccaccaaagtgcaaattcttcagttggcttgctgttcaaaatagagtttggacagcagacaggttggcaagaaggggatggcctcataatccgcgttgtgtcctatgcgcctcatgcccagaatctggactacatctttttgctgaatgttgcttcaccagacatatttgggctgatttgagtatttgggctgcaattacggagatccatcattcttcttggcaacctgtagattcggtgcaccaatggtggtcgaatcttgcaacatccgcagtgagaagcgtgaagggattgcgaaccctcatcatcctcgtgtcttggacaatttggtgtgagagaaactcgcgaatctttgagcacaaagagaagaccgtgacacagactatagcgatgattaaggagcaaatccgcctgtggattctaggaggagcaaaacacttagcaaggctggtgtaggttttggggaaggggaggggttggttttgggacatttgtgtcaccatacttaatgtctccttccctagtgtgatgtacttgtatattttagccctcgctggctctcaccctctttttaatataacaggcaattctcttgccagttttcaaaaaaatgtaggcgtccacaaaagcttttggtgcacggttctgccgaggatccccgtcataaacgcccgccatcggatcggacccatacgcgatatcagcaccgtccgtcatgcaaggttgccgaggccgccatcaacgtcatcctcccgcaatccccgccgactgccttgcctgcccttccatcctcctccccacccctccttccatcctcgcccgcgcgctccgcacgcattccatccatgctagcctacagcaacagacgcccatccctgtcgtcgcgctcgcctccctcctctttgttgcctccgcgtcggcctccaccccgctcttcgacgcgtttgccgccgactcagatttctggtgcactctcttctctacggcgcgagcaagggcggcgcttgccatggcatcgacgggaaccaggatgggcccgcgacccctgtgtggccttctctactccaagtgtctcgacgtcgagcgactctggatctatcgtcaacgaccttgagagcatcgggttctggaatgacttacctcatcaagcacggtagcaagtcttccacccgcaaaccctcacgccatcgacgcagctgtctttggtctctcgtgcttccctttgagagatcggtgtgtgtcctctcctccaagcagtctccatccctaggcagtcattgacctgttgcttatgcatcctcgcgcatgtgcctgtttattcggctagggctctcatcattttgtttgttgctacctgaggacacatcgttttgtttgttgctacctgctaacatatcaactagcacgattttgagcctatctaaatgcccttctgtttatggctgtcaaggtttatggctgttcaggttcttattgattttggtctgagtttcacattgacaattcctgaggacaaagcagtggacctatatgttctagagagagctttgatttccatgcattcgtcctgtggggaagtgatggagaaaatccttgcggtgtatagaaaggcttcaaagcaatggtgttccacccagaacaagctggctcaagtgaggcaacgggtcaggaagcgcaccatggtcggatgaacgaagaagaaaaaattgtggcatggaatggatgtatgttattagattaaaataacaaaatttatgtatggatagaatcacagatggattctgaaacattttctcataacaatataacacacatatgtatataagttatcgtgttattatatggttccgttgcaacgcacgggcactcacctagtatatatatatagacttattgtcatccatttgaatatgaaaaaaatagaaaggaaagaccaatagtattttagaacatagggagtatttgattatctccaaaatccttgatccgcatttcagatgttagcatgcttaggttgggtccaacgctggcccttatcgattgttgttgtggctcgtctggca

SEQ ID NO: 54420 - DNA, 1231 bp, Zea Mays
cttcacttcaactccactcctttggatgtgggttcagcacagcacttgccaggagattagatgcagactagtattcttacccccaaaaaaatatcagcttttgcagaagtattggatgcacggagttgattatttcaaaggaaatcatcatttttgtccgactttccagcacaagtctggtctctagtgaggcggtttgatcaaccacagcttttcaagccctttgtgagccggtgtgaaatgaagggcaacattgagattggcagtgtcagggaggttaatgtaaagtctgggctgccagccacaagaagcacggagaggctggaactgttagatgacaatgagcacatactcagcgtcagatttgttggaggtgatcacaggctgcagaactactcgtccatcctcaccgtccaccccgaggtcatcgacggccgaccggggacgctcgtgatcgagtccttcgtggtggacgtccccgacggcaacaccaaggacgagacctgctacttcgtggaggccctgctcaagtgcaacctcaagtcgctcgcggaggtgtccgagcgacaggtcgtcaaggatcaaacggagccccttgaccggtgatgggggagatacatacatacatgtcgaacgatatgttcggatcactgcattgcattgcttacgatgtgcagagctaatcttcaacggagcccctaggttcctggagaaaagagctttgagggactgctactgctactgctatgccgcgtcgttcaaagttaagtttcctccttgcgattgtgtttgctgtccttttctccggcgttgtacgtcgcacaaggagaaggacaggcagaatatgatgtgctattgtagtattgaaaaatgaaaggaaaaaaagaactgtgaggctctgaacatcttcattcccatggtcaatgtgtggacttgagggtttctctgtaattagattcgctctagattgccaaccccccccttcccccttcctgttttctttttttattgtgtgtgttgtgtaaatacatgttcctagtgtataattaattctctatgggtttgtttggctactctagtattcaccccaatacacatgggttgagggagattgtggtgtaaattaaactaatttacatcacaatcctcttcaacccatgtgtattgagataaattactagaatattcaaacatagcctagagggttgtccatgagcattgttattaaagc

SEQ ID NO: 54421 - DNA, 1101 bp, Zea Mays
gctgaatctgctttttgccagattattttggggtttcaatctaggtctggtctctagtgaggcggtttgatcaaccacagcttttcaagccctttgtgagccggtgtgaaatgaagggcaacattgagattggcagtgtcagggaggttaatgtaaagtctgggctgccagccacaagaagcacggagaggctggaactgttagatgacaatgagcacatactcagcgtcagatttgttggaggtgatcacaggctgcagaactactcgtccatcctcaccgtccaccccgaggtcatcgacggccgaccggggacgctcgtgatcgagtccttcgtggtggacgtccccgacggcaacaccaaggacgagacctgctacttcgtggaggccctgctcaagtgcaacctcaagtcgctcgcggaggtgtccgagcgacaggtcgtcaaggatcaaacggagccccttgaccggtgatgggggagatacatacatacatgtcgaacgatatgttcggatcactgcattgcattgcttacgatgtgcagagctaatcttcaacggagcccctaggttcctggagaaaagagctttgagggactgctactgctactgctatgccgcgtcgttcaaagttaagtttcctccttgcgattgtgtttgctgtccttttctccggcgttgtacgtcgcacaaggagaaggacaggcagaatatgatgtgctattgtagtattgaaaaatgaaaggaaaaaaagaactgtgaggctctgaacatcttcattcccatggtcaatgtgtggacttgagggtttctctgtaattagattcgctctagattgccaaccccccccttcccccttcctgttttctttttttattgtgtgtgttgtgtaaatacatgttcctagtgtataattaattctctatgggtttgtttggctactctagtattcaccccaatacacatgggttgagggagattgtggtgtaaattaaactaatttacatcacaatcctcttcaacccatgtgtattgagataaattactagaatattcaaacatagcctagagggttgtccatgagcattgttattaaagc

SEQ ID NO: 54422 - DNA, 669 bp, Zea Mays
gaaaaacttggtacttggagggtaggtggtgtattggcgatgtctcgtgcatttggcaatcgtttactgaagccatatgtggtggcggaacctgaaattcaggaagaacagttcagtgatgagctggaatgcctggttctcgctagtgacgggctttgggatgttgtggaaaatgaggaagccgtttcccttggcaaatcagaggacacgccagagtctgcagctcggaaattgacagagatcgcttattctcgtggcagcgctgacaatatcacgtgtatcgtggttcaatttcaccatgacaaaaccggatgagccatgtggcggccaatttcagttgtaccctgcttcaggctattattatcctgcaagccgggtggtggggcttctctcagatttatcgctcttgtagcaacttccaagaactcgtccattgattcttttgttgtcttgtaggaaacatttgttccaacaggtgtaatagatattttcaatgggttaatttctaataaaactatgtttacaattactgtttagtggaaattggttatcctcttgcctttgatactagatgataagatgatttgcaaccagtatgcaatgggccgttaccgtgtatccctattctcgaacggagcaatcgactcagccctgtttgtctggatctag

SEQ ID NO: 54423 - DNA, 714 bp, Zea Mays
caaaaggcttctgctattcatctgtagccatatgtgttcctgggagcttgaacatgtacttggagggtaggtggtgtattggcgatgtctcgtgcatttggcaatcgtttactgaagccatatgtggtggcggaacctgaaattcaggaagaacagttcagtgatgagctggaatgcctggttctcgctagtgacgggctttgggatgttgtggaaaatgaggaagccgtttcccttggcaaatcagaggacacgccagagtctgcagctcggaaattgacagagatcgcttattctcgtggcagcgctgacaatatcacgtgtatcgtggttcaatttcaccatgacaaaaccggatgagccatgtggcggccaatttcagttgtaccctgcttcaggctattattatcctgcaagccgggtggtggggcttctctcagatttatcgctcttgtagcaacttccaagaactcgtccattgattcttttgttgtcttgtaggaaacatttgttccaacaggtgtaatagatattttcaatgggttaatttctaataaaactatgtttacaattactgtttagtggaaattggttatcctcttgcctttgatactagatgataagatgatttgcaaccagtatgcaatgggccgttaccgtgtatccctattctcgaacggagcaatcgactcagccctgtttgtctggatctag

SEQ ID NO: 54424 - DNA, 1949 bp, Zea Mays
gataatagttccttgaaaaccggtgcctttttctagcggcgaggaggcaggcggtagcggaatctggcaccggccatcacgtcccctcccgccgcttcctcctccctgccctacctttccccagatccgaatccattaaaccagcggatcttgcatcggggcgcgtccacggcatccgggcaagcgagtggtggagccagcagccatgagatggtatgcatcggtagcctcctgagggcgctggtgctgcgtgcggcgtcgtctgcgggcaggcgccgggggcccaggattctgtgtggccgcgcgacggatgtgcgcgtgacgccacggcacggacacggctggcgcgggttccgggcggtcacgggaaggatgatgctggactcctctgagtctgcctcttccgccgccgccgccgccgcggaggcgggagctggggcggtggcaggccaggcgcagccgcagcgccgcgcggtgggggccgtgccccaggcgcacgatggtggctacgccagcggcggatgggagagatggtaaactgagttgtggatactcaagttttagagggaagagagctacaatggaggatttctatgatgtaaaactaactgaaattgatggacaagctattagcctgttcggtgtttttgacggtcatggtggatcacgtgctgctgagtatttgagggagcacttgtttgagaaccttctcaagcaccctgatttcttgacggatacaaagcttgctataagcgaaacatatcagaaaaccgatacagatttcttggaatcggaagcaagtgctttcagagatgatggttcaacagcttcaactgcaattttggtgggtgaccgtctgtatgttgcaaatgttggtgattctcgtgctgttatttcaaaagctggcaaaggtattgcatactggaagtaggtatcttaagtagtgtatttgtgtttcatttccatgtcacatttgtcagttgatgtatggtctctggtctgttgaatctaaatcacaaagcaaaatcttggcatcgctctgtttctcataccaatatataatccataaacctttgttgtagttaatacagaaccatccatgacagtttggttcgtagggtttctcattgaatctgtgtaattttgattctgtgccaccctgtgacaaaatgcctgacagttcatctgtttgtttttttatagctatggcactttcagaagatcacaaacctaacaggattgatgagcgaaagagaatagaaaatgctggtggtattgtcatttgggctggtacttggagggtaggtggtgtattggcgatgtctcgtgcatttggcaatcgtttactgaagccatatgtggtggcggaacctgaaattcaggaagaacagttcagtgatgagctggaatgcctggttctcgctagtgacgggctttgggatgttgtggaaaatgaggaagccgtttcccttggcaaatcagaggacacgccagagtctgcagctcggaaattgacagagatcgcttattctcgtggcagcgctgacaatatcacgtgtatcgtggttcaatttcaccatgacaaaaccggatgagccatgtggcggccaatttcagttgtaccctgcttcaggctattattatcctgcaagccgggtggtggggcttctctcagatttatcgctcttgtagcaacttccaagaactcgtccattgattcttttgttgtcttgtaggaaacatttgttccaacaggtgtaatagatattttcaatgggttaatttctaataaaactatgtttacaattactgtttagtggaaattggttatcctcttgcctttgatactagatgataagatgatttgcaaccagtatgcaatgggccgttaccgtgtatccctattctcgaacggagcaatcgactcagccctgtttgtctggatctag

SEQ ID NO: 54425 - DNA, 1595 bp, Zea Mays
gataatagttccttgaaaaccggtgcctttttctagcggcgaggaggcaggcggtagcggaatctggcaccggccatcacgtcccctcccgccgcttcctcctccctgccctacctttccccagatccgaatccattaaaccagcggatcttgcatcggggcgcgtccacggcatccgggcaagcgagtggtggagccagcagccatgagatggtatgcatcggtagcctcctgagggcgctggtgctgcgtgcggcgtcgtctgcgggcaggcgccgggggcccaggattctgtgtggccgcgcgacggatgtgcgcgtgacgccacggcacggacacggctggcgcgggttccgggcggtcacgggaaggatgatgctggactcctctgagtctgcctcttccgccgccgccgccgccgcggaggcgggagctggggcggtggcaggccaggcgcagccgcagcgccgcgcggtgggggccgtgccccaggcgcacgatggtggctacgccagcggcggatgggagagagaagatggtaaactgagttgtggatactcaagttttagagggaagagagctacaatggaggatttctatgatgtaaaactaactgaaattgatggacaagctattagcctgttcggtgtttttgacggtcatggtggatcacgtgctgctgagtatttgagggagcacttgtttgagaaccttctcaagcaccctgatttcttgacggatacaaagcttgctataagcgaaacatatcagaaaaccgatacagatttcttggaatcggaagcaagtgctttcagagatgatggttcaacagcttcaactgcaattttgctatggcactttcagaagatcacaaacctaacaggattgatgagcgaaagagaatagaaaatgctggtggtattgtcatttgggctggtacttggagggtaggtggtgtattggcgatgtctcgtgcatttggcaatcgtttactgaagccatatgtggtggcggaacctgaaattcaggaagaacagttcagtgatgagctggaatgcctggttctcgctagtgacgggctttgggatgttgtggaaaatgaggaagccgtttcccttggcaaatcagaggacacgccagagtctgcagctcggaaattgacagagatcgcttattctcgtggcagcgctgacaatatcacgtgtatcgtggttcaatttcaccatgacaaaaccggatgagccatgtggcggccaatttcagttgtaccctgcttcaggctattattatcctgcaagccgggtggtggggcttctctcagatttatcgctcttgtagcaacttccaagaactcgtccattgattcttttgttgtcttgtaggaaacatttgttccaacaggtgtaatagatattttcaatgggttaatttctaataaaactatgtttacaattactgtttagtggaaattggttatcctcttgcctttgatactagatgataagatgatttgcaaccagtatgcaatgggccgttaccgtgtatccctattctcgaacggagcaatcgactcagccctgtttgtctggatctag

SEQ ID NO: 54426 - DNA, 2054 bp, Zea Mays
gtcaagctcaaccccgaaaggtgggtccttggggtgccccagggcatggtcttggggttcatcatctcgaagcggggcatcgaagccaacccggagaaagaccgcgaccatcgcacagcaccccgagcccttgctgggggcacccgggggctacacgcacccccgggaaaggccgcttgtcatcgccaaagttctggagcccggaacgtacaagctggccggcggtcagggcgaggtctatggcaacacttggaacatccgacggctacgtcgcttctacccttaagatgttttcaagctgttcgtatacctcgctcccacaaaagtctcagtcgtcaaggaagggtcagcctcgcctcggcagagcccgaccctccctcgggggctaaaaaggggggaacccctctgcgtcaagattgggcgtacctctccgcgtccaaaattttcggtcaaaaaggcttttgcgttctcccggctatgtcagtgacagggccccaaggaccgaacgtgggtgcatgtaagtggcaaggccgactgagccgaggaattcctatgcctccgggttagggacaccttcactcatcacccgccacgaaaaatgacccctactcgggaagccaccctgttattgacaggcaaagccggacacgcaatgtggcagaacctcccaagttattgggcccacatgcacctgtccttgtctcaaagacctcagacgactatgcatgtgcaccaaataacttaacaggatccgtccgattgccccaaggacatcggataaaccacttacaaccagaaccgcgggattaagtaacacaaatcacacacacaacatttttgcggcggaaatcttaataccaaattttacaggttacaaaaattttacattattttatcggagtgattacaaaagtataagtttgaaatatatgctagctcaagtgatcatcctcaataagaagataaagacggggtatacttatataagaaggccgagcccaccggcacttaacaccatcacaatagcacaaggttagaacctgaaaaacatcagggaataaaaccctaagtatggaattactcagcaagtcttacccgactaaggaaaagactctcaagggtatgctggataaataggagtcaagaagaggctttagcaaaaatcaacttatagttttgtagaagtagcttactaaagtgagtccttactttcaatcttttaacgccatattaagtcttaatagactctatttgcatctagtctaatttcaatatctcatcaatacaacatcatttttatccatagtgttcacatcctgactttaggttgtagaaaagtgaccaagtcttcataaccgcgaaggtacggcgatctgaatcgattatactcagttgaggatctccaatcacacgacatatgtagcacctaacccttgcatatgtcaacccgccaccggggttcttaagactagatcaggttcacgcaaaccgagagcacagatacaccaccgaccggcctcttgccacggagggtacacgctactctcgccaccgctccacgcccatttcgtgttatcttattctggccttagtctgatcgaggcaaggcttacccatgacgaggcatgtgaccagttaaagggtcctcggtcagcacgcctacatacgcattaatccttaaccaacttgggtagaacatcacctgttcctaacccaagtctcaatttaagtatttccatccttagggttgtgtctgttcctttaggatgaaagagcatcacagggaactttgcagtaagatcccactattgctccaaatgaaaatattcttgcaggtagaagccatcctctcccgggttagactgaggacaacctctatccacaagatctaagcaaggctaagcatttttgtaaatcatattttgatacttcatagaagtatctataaaggtatggatatcaaggaaagcaatgcatcaaagggttccaagcaactcctatgaacctaatgcacatttcactagactcaaagtgtgcgaaaagtatttaaaaac

SEQ ID NO: 54427 - DNA, 1822 bp, Zea Mays
gtgcaggctctggtgctggatctggggctacctcctgagcagctccttgctccggcacgaggacgtactctccgtcagcaaggttacagtctatcgaatgcaatgaacatgtatgtcatgattatgcaggatttactaacattatgttaaaagaaactaagtcaagaagtaacttagggtttcttagtcatgcggggcttccagtgggttatgcttattacgttttaggcttaggttttcattgaggataacatagtggatttgtattgtctttatacatttcagtggacaaattacaagggttttaggatgacactaattaccattattcattttcctttctttaatttctacttatggtttctagtgtaggtttgaactacgacactggtttaatattttctaaaaattctgtaaaaattacagtgggttgccattggttactatagtcccttctaggaagttgaggttcaaaaataaaaggctatgccttggacaaaaataataaaggttgggtaaatgggtcactttgtactacaactcttaattagaggtggggtctgtcttaaaggttatttttgttggcatctaacagtaataataggcttctgtgccaaaaaccacagaaggctaaggggtggttatttagttatgattttctaaagtttaatgtcaaaaaggcactttctactacattgttatttgaaaaatgtcaaacagcagatttcatattttttctaagttcttaataacaaatcattaactatcccaagggtgggggtgttttcaccttggggttatttttgtagggtttttctaagttttccttgttttattcaaataaaaggtatcccacttattttatactaaaccagggtatgatagattttttccagtgaactacattgaataagtaccctaacaaaaataggggtgccctctggttcattatttaaatcaccttttctatttttcttaaccttaagcatattatagaataaggggtaaaaactaacttaatggagtggacagagaggtttaacatttttaaacaagtcagtaggtagatataaacttctccaaatttttctaaccctagtcaaatagtacaactatttttctttctattattgagcttttggttaaaactataattaaatcagaaccttaaagttttctatagtacctagggggttttatttttttcttaagtaggtcacattaattagagtctggcaaaattggtttgaccaaatttggttgaattaaacagaagttatgagttttttaaagtttctgttcaaattaaaaacagatttaataagagtttcctggaaaaacagtttacaccgaggtccctgggtttaaactaaatcaatcctcgtagttctacccttgcgccactattcccctgagtcgctgacagttcaaaaagccccctgaccttttcttcctctcacccgcagtccttcccccaatgtaaacagtacccgcgggaaagaaaagggtggcgcggcttaccggcggcgagataggtccggcgaagggcagggttggctcggggaggttctggcggtcacagcgaggtgcggcttgacggcggggatggcccgaatcgcccggtccacgtgcgcaggcgggtgttctcgtcggcggcgagtgtaccggccaaaccatggcgatctggttcaatccaagggcacggtgagcttcacggggtaacgtattgaccgtgtgcacaaggaatcggaaaatggtcgagtggattacccggtccacgtactccggcggggttgagagctccggcgaccgtggactggct

SEQ ID NO: 54428 - DNA, 1434 bp, Zea Mays
cagtctagggctctagcatccccaatcccatcggtcagcctcatccatccgcagggcgccggcggcgggagtcttgccggccacatcgtcgccgatttcaccgatccgagctccggcctcttagccatggaatctccacgaactctggaagccctcaccaacgacctcgtggtggagatattcctccggatcggctcccctgccgacctcgttcgcgcctccgccgcctgcgtcgccttctgccgtctcatcgccaacccctccttcttgcgccggagatgaagaagatgtcacttcttttagagtgatcgtcatgatgagatctacacagatgctagtcgcttttatcttctcttcaaccactggtgattggagtgctggttcacctttcagcctgggttctctgagaataccatacgacaacattccgagttatgcttatggctgcttctactggaaagtcgagtctgagaacaggttgctcacgctcaacatgagcagtatggagttctcagtcgttgacctcccacctgggcccgataggagtttcgtcatcatggtggaggcaggcgaaagcaggcttgggatgtttagtctaattaaccatggtaccactctctgttatgccattaggcaaattgggagcgagaagtccaatcagttggagatggacagtgtgatccctttacctgagggttatatttactttcgcattcacggttcatatgaaggacacattctcatatttggatacgcgtttagtgaagacgcatgcttcgcacttgagatcaagactatgaagattgagagagtctgtcggaagtggcgtggtttctgtccttattttgtgttcctgccatccatgtcacaaaggaggatataatgtggactgaattcacatccaggtttggggcttcttccaatccattctgctggtgtggagttgagctaggtgatggcacaggccctcatgtagatgtagcacatctgcaacactgtcccatgttatcctcctagtctgtcgtattgtctagcttacattagtagctactgaaactttagttatatctatatttttaagttctcccgactgtaatttaagatgtgacaaaggcgtctttagtgtatcaagagccaacttttataagccggctctgtgtgctgcgaaatcacgtgtttgctagtcttgtgtagaattatcatgccagcatcatcagacatggtacggtcagcatgtttctcacttgagactcagagagaggtgtccaaaagctattggacaaggaggaatagttaagcttggcttaacattcatctccgtgatccttccacctggactcttttctgtgcttctctcttgaaaacctcatctgaggttgggttaatggatcaggtggaggtcctccgcgtgctcagcctgacaattggtcaata

SEQ ID NO: 54429 - DNA, 1670 bp, Zea Mays
cagtctagggctctagcatccccaatcccatcggtcagcctcatccatccgcagggcgccggcggcgggagtcttgccggccacatcgtcgccgatttcaccgatccgagctccggcctcttagccatggaatctccacgaactctggaagccctcaccaacgacctcgtggtggagatattcctccggatcggctcccctgccgacctcgttcgcgcctccgccgcctgcgtcgccttctgccgtctcatcgccaacccctccttcttgcgccgcaagttatccggctattgtgtctctgacgtccgagacggtcatgtcctcctcaccatcacgccctaccttgaggacgacgaggatgagaagttggtgccagacctcgcggtgtgcgaccccctggcccgtgtatgcctgcgactgccccccataccagacgaccttctcgcctccgtccaggttcagcagcaagatctcgtacattatagttgcgatacattccttgtcccttcaggagatgaagaagatgtcacttcttttagagtgatcgtcatgatgagatctacacagatgctagtcgcttttatcttctcttcaaccactggtgattggagtgctggttcacctttcagcctgggttctctgagaataccatacgacaacattccgagttatgcttatggctgcttctactggaaagtcgagtctgagaacaggttgctcacgctcaacatgagcagtatggagttctcagtcgttgacctcccacctgggcccgataggagtttcgtcatcatggtggaggcaggcgaaagcaggcttgggatgtttagtctaattaaccatggtaccactctctgttatgccattaggcaaattgggagcgagaagtccaatcagttggagatggacagtgtgatccctttacctgagggttatatttactttcgcattcacggttcatatgaaggacacattctcatatttggatacgcgtttagtgaagacgcatgcttcgcacttgagatcaagactatgaagattgagagagtctgtcggaagtggcgtggtttctgtccttattttgtgttcctgccatccatgtcacaaaggaggatataatgtggactgaattcacatccaggtttggggcttcttccaatccattctgctggtgtggagttgagctaggtgatggcacaggccctcatgtagatgtagcacatctgcaacactgtcccatgttatcctcctagtctgtcgtattgtctagcttacattagtagctactgaaactttagttatatctatatttttaagttctcccgactgtaatttaagatgtgacaaaggcgtctttagtgtatcaagagccaacttttataagccggctctgtgtgctgcgaaatcacgtgtttgctagtcttgtgtagaattatcatgccagcatcatcagacatggtacggtcagcatgtttctcacttgagactcagagagaggtgtccaaaagctattggacaaggaggaatagttaagcttggcttaacattcatctccgtgatccttccacctggactcttttctgtgcttctctcttgaaaacctcatctgaggttgggttaatggatcaggtggaggtcctccgcgtgctcagcctgacaattggtcaata

SEQ ID NO: 54430 - DNA, 822 bp, Zea Mays
cagtctagggctctagcatccccaatcccatcggtcagcctcatccatccgcagggcgccggcggcgggagtcttgccggccacatcgtcgccgatttcaccgatccgagctccggcctcttagccatggaatctccacgaactctggaagccctcaccaacgacctcgtggtggagatattcctccggatcggctcccctgccgacctcgttcgcgcctccgccgcctgcgtcgccttctgccgtctcatcgccaacccctccttcttgcgccggactgaattcacatccaggtttggggcttcttccaatccattctgctggtgtggagttgagctaggtgatggcacaggccctcatgtagatgtagcacatctgcaacactgtcccatgttatcctcctagtctgtcgtattgtctagcttacattagtagctactgaaactttagttatatctatatttttaagttctcccgactgtaatttaagatgtgacaaaggcgtctttagtgtatcaagagccaacttttataagccggctctgtgtgctgcgaaatcacgtgtttgctagtcttgtgtagaattatcatgccagcatcatcagacatggtacggtcagcatgtttctcacttgagactcagagagaggtgtccaaaagctattggacaaggaggaatagttaagcttggcttaacattcatctccgtgatccttccacctggactcttttctgtgcttctctcttgaaaacctcatctgaggttgggttaatggatcaggtggaggtcctccgcgtgctcagcctgacaattggtcaata

SEQ ID NO: 54431 - DNA, 2676 bp, Zea Mays
aatttagcggccgcgaattcgcccttcgcggcggaatcgatggaggcggcagccaaggggaggtaccacgcgctcttcaactttggggactcgctagccgacgctggcaacctcatccagaacggcaccccggagatcctggccaccgcgcgcctgccctacggccagacctacttcggaaagcccaccggccgctgctccgatggacgtctcgtcatcgaccacctcgcgcaagagttcggcctgccgctgctgccgccgtccaaggccaagaacgccagcttcgcgcacggcgccaacttcgccatcaccggcgccaccgcgctcgacacgccctacttcgaggccaaggggctcggtgccgtcatctggaactccggagcgctcatgacccaaatccagtggttccgtgatctcaagcctttcttctgcaacaccacggaggcatgcaagaaattctttgcgaaggcgctgtttgtggtgggtgagtttggaggcaacgactacaatgctcccctctttgcgggcatgggcatccctgaggcctacaaattcatgcccgatgtcatacagggcatctctgacggtattgaggcactgattgctgagggggctgttgagatgattgtgcctggtgtcatgcccacgggctgcttcccagtttacttgaacatgcttgatgagcccaaagaaggatacggcccccacagtggttgtgtccgccggtacaacacattctcctgggtgcacaatgcacatcttaaggccatgcttgagaagctccgggctaagcaccccaatgtgaggatcatatatggcgattactacactccagtcgtccagttcatgcttcagcctgagaagtttggtgagctcttgcattcttgatcttttatgtgataaagtttgcttagatgcttagatgtttgagtcaactactactcggagtcaacactgctcttgaaagacacaacatattacaattagatggtttagatctcggttgagatgccttaaccttctctactagcgcattgcagaatataaaaatcatgttttgaatggcgagtaccaaacttatgatttcaaaatcagttgggctagcttaatagtcagagtatcttcaaagcaaaggtgcttacccttgctcatttgcaacctgctatgagtctgtaaacggccttttagctatcactgctattagtacatttcatttgagtgattcccgttaatggctgtctacttgggaggaggcctttcaattgaaaatgatatcccattagaacaataatggtttgattctcttcatccaatctaatgatgtattaggactttaaaaaataatggttctgttaacaggttaaaattcaaggtcagggttatagtagccattttcccatggtagttttaccattagatccttctatggcattgtagaatgacctgcatacctaattttaaaatctatgaacagtagacatttttttggggggaaacaatctcactttactctatgttgttaaggtgaacctttcaagacatcaaaacttcaaaagtatatacgtactgttgcaattaattaaataatcaacggtttgctacccaaccttcttacttttgctgctccagtttctaagcatcgctgagtaaaaaaaattgaacaagtccttgttgcggcaagtacaaacatctaggaattgcgcagttagctgaaccatcgttttggggaatcacttctttttctatcttttactatctttcattgctgaccataatgtttttttaatagaaaaaaaataaaataacagaaaaaggcgcacaacaaccatctgcatctagaacgatgccatccatgtctttgccatctctagatcacatgtacctgatttctagaatttccatcttatcgttgccctgtagtagcaagtaacctgtacttcatttggcttcaatttgctgatggagacagtttccctgtctcaactgctagagaaaaagtaggcagatattgttgttaattaaaacagaaggcacctttgcttcaggcattagtcctttgattttaatgcacgtctatgcagggacctaacaacttgtgttttcttgttcaggttttgccagacaactgcccagggcatgttgtggggcgccatcgactcctgagagagcagcttacaacttcaatgtcacggccaaatgcggtgagcctggtgcaactgcctgtgctgatccgacaacccattggagctgggacggcattcacctgacggaggctgcctaccgccatatcgccaaaggctggctatacgggcctttcgcggaccaaccgatcatccaatcctcatgatcatgccgttcctgcggtagagtttatcaaagtagcattgagagtgagagaaaaaaaatggagcggggaaagtaggtcttccatacagttccaatgcttgcatacttgtacatctccatttgattgtattcatttgccatgggggtacaaaggtgggatagtaggtcgcacaaaggcctgatttcttgatttgtcaggttggggggtataaatatgaaagttgttacgcacagataatcatgtatattgtgtcccggaaatgtgttacagattctgctcgagcagcttctgattctctgattaaaggtgtgccttttttcgcgattctt

SEQ ID NO: 54432 - DNA, 2693 bp, Zea Mays
gcagagacgcgtccgacctccgacgctgccaccaacctcttcccccagccacgctccaccgcgccatagccgcaggaaaatatcaaatcggagccgcgatgcaccacagaaaaaaattccctagggtttccaagcaaaagccctcctgaattctccaattccgcgccttcccccgcttcgtgggcctcggatttagggtttatgcatggcttccgaccctcccggcgacggcgccggcggggaagagccgacgccgggccctgcccccgccgtggaggtgcttgctgctcccgccgttccgctcaggccgcgctgggccacggagatcaaggtctacacccgtaagcacccccgcaaaacccctaaacctcctccagaaccagctcccgcccccgcctccgtccctgcccctgcccttgctcctgccccggccccgaatcccctttccgaaaccttatcctcgattcgtcgctccatccgccgcgcggacacggttggcgctgcggcgcggcccgatccggcagcgccggcctcggttcccgcccgggggccacctggggaacgcggtgccgcctcgggggacccctcatctgaggtgaaccgtgtcggcggcggtatttctaacggccacggcgacgaccgggcggcggccgcggctgagaagtctgagaaagcacggaaacgcagggtgaggagtgagttgcggcgccgactggcgggggagctcgaccaggtccgcgtgctctccaagcggctgaaggaggctgccgaggccctggcgcagcaggaggcttctgagcctgcgcctttgcccatggtggtgctgccaacacagcagcaggtggtggatgctgggtatgtgcaactgcagttctcagctggtgatatggcggtgcccatgtctgctcagattgcagctgctgttactcctgcccgttccatgctgcagcgcagaccactaaccgtgtcggttgttcataatgaagcctttgagaaggtgaagcggacgccaaaggccaatcaattgtaccaaaattcggagttcttgcttgccaaggataggatccctccctcagattcacatgtgcgcaagaaatctaagcaccacaagaagaagcataggtccctagaatctcgtggcgcagactttgatgctgagcggcggctgtactctcatgcgttcaagaagtcctcgtcacttctaagccgtttaatgaagcacaagtttgggtgggtgtttaataagcctgttgatccagttgcacttggtttgcatgattattttactattatcaagcacccaatggatcttggcacgataaggggacggcttagccgcggacagtacaggaacccgaaggagtttgctgaggatgtccggctcactttccataatgcgatgacatataatcccaagggtcaggatgtgcattttatggcagagcagttgtcaggaatcttcgaggcacagtggcctgagattgaggctgaggttaactaccttgcatcgtgtcctccattgccgaagaagtttccacctccaccaattgacctgcacttcctagagaggtcagattcgatgagacaccacatggcattggacaccaattcaagaccgatcagtcatactcccacttacacccggactccatcaatgaagaaaccaagggcaaaggatccaaataagagggacatgacaatagacgagaagcgtaagcttagtgagaacctgcagaatttgccacctgagaagcttgatgctgttgtgcaagtcattaagaacaagaacctatcagttatgcagcatgatgatgagattgaggttgaaattgatagtatggatgctgagacactttgggagcttgaccggtttgtggccaactacaagaagaacctgagtaagcaaaagaggaaggccgagcgagcgatgcttgccagacaagatgcagagttgcgtgcgcagcgccttatacaacaaccgcaaccaaccccagtcccccaagaacctgttggtgaaaaatctctaaagcaagttgcaaaagattcactggcaggtgagcaactaccaacatctgcatcagagaaaaacgacgagaatagacagaacgtgagtggttcaagcaattcaagcagctccagcagtgactcaggatcatcgtctagtgactcagacagtgatagctcctcttcagatggatctgatgctgccaattcatcttgagatatagtatgtaggaaggcgattgccgtaagcattgtttcttccatctgttaactgactgatgaaagcattgacaaagccccgttggtgttcagtttgccaccatctttctgtggactacctgtaaccgctgtgggttcatcgccatgtgccaagtctttttgatgttgtaaattaaagtttgttgatgcatctgatgtttagcatcacgactattgacggtccgttcttatgttctgatttgaggaatgtttgcttggaagatggcttgttgacttaactgtctgtgtagcagcagttcggacctttgggtaggtagcaggtagccttccctccgctggtgactggtgtggtgagatggtttgtatgttgctggctgtgattgtaatatgctgttgtgccttgtcctttgaggtctgcaaaggaaaagtgaattctataggaaattttctatgtggtcttttggaacaaa

SEQ ID NO: 54433 - DNA, 2681 bp, Zea Mays
gcagagacgcgtccgacctccgacgctgccaccaacctcttcccccagccacgctccaccgcgccatagccgcaggaaaatatcaaatcggagccgcgatgcaccacagaaaaaaattccctagggtttccaagcaaaagccctcctgaattctccaattccgcgccttcccccgcttcgtgggcctcggatttagggtttatgcatggcttccgaccctcccggcgacggcgccggcggggaagagccgacgccgggccctgcccccgccgtggaggtgcttgctgctcccgccgttccgctcaggccgcgctgggccacggagatcaaggtctacacccgtaagcacccccgcaaaacccctaaacctcctccagaaccagctcccgcccccgcctccgtccctgcccctgcccttgctcctgccccggccccgaatcccctttccgaaaccttatcctcgattcgtcgctccatccgccgcgcggacacggttggcgctgcggcgcggcccgatccggcagcgccggcctcggttcccgcccgggggccacctggggaacgcggtgccgcctcgggggacccctcatctgaggtgaaccgtgtcggcggcggtatttctaacggccacggcgacgaccgggcggcggccgcggctgagaagtctgagaaagcacggaaacgcagggtgaggagtgagttgcggcgccgactggcgggggagctcgaccaggtccgcgtgctctccaagcggctgaaggaggctgccgaggccctggcgcagcaggaggcttctgagcctgcgcctttgcccatggtggtgctgccaacacagcagcaggtggtggatgctgggtatgtgcaactgcagttctcagctggtgatatggcggtgcccatgtctgctcagattgcagctgctgttactcctgcccgttccatgctgcagcgcagaccactaaccgtgtcggttgttcataatgaagcctttgagaaggtgaagcggacgccaaaggccaatcaattgtaccaaaattcggagttcttgcttgccaaggataggatccctccctcagattcacatgtgcgcaagaaatctaagcaccacaagaagaagcataggtccctagaatctcgtggcgcagactttgatgctgagcggcggctgtactctcatgcgttcaagaagtcctcgtcacttctaagccgtttaatgaagcacaagtttgggtgggtgtttaataagcctgttgatccagttgcacttggtttgcatgattattttactattatcaagcacccaatggatcttggcacgataaggggacggcttagccgcggacagtacaggaacccgaaggagtttgctgaggatgtccggctcactttccataatgcgatgacatataatcccaagggtcaggatgtgcattttatggcagagcagttgtcaggaatcttcgaggcacagtggcctgagattgaggctgaggttaactaccttgcatcgtgtcctccattgccgaagaagtttccacctccaccaattgacctgcacttcctagagaggtcagattcgatgagacaccacatggcattggacaccaattcaagaccgatcagtcatactcccacttacacccggactccatcaatgaagaaaccaagggcaaaggatccaaataagagggacatgacaatagacgagaagcgtaagcttagtgagaacctgcagaatttgccacctgagaagcttgatgctgttgtgcaagtcattaagaacaagaacctatcagttatgcagcatgatgatgagattgaggttgaaattgatagtatggatgctgagacactttgggagcttgaccggtttgtggccaactacaagaagaacctgagtaagcaaaagaggaaggccgagcgagcgatgcttgccagacaagatgcagagttgcgtgcgcagcgccttatacaacaaccgcaaccaaccccagtcccccaagaacctgttggtgaaaaatctctaaagcaagttgcaaaaggtgagcaactaccaacatctgcatcagagaaaaacgacgagaatagacagaacgtgagtggttcaagcaattcaagcagctccagcagtgactcaggatcatcgtctagtgactcagacagtgatagctcctcttcagatggatctgatgctgccaattcatcttgagatatagtatgtaggaaggcgattgccgtaagcattgtttcttccatctgttaactgactgatgaaagcattgacaaagccccgttggtgttcagtttgccaccatctttctgtggactacctgtaaccgctgtgggttcatcgccatgtgccaagtctttttgatgttgtaaattaaagtttgttgatgcatctgatgtttagcatcacgactattgacggtccgttcttatgttctgatttgaggaatgtttgcttggaagatggcttgttgacttaactgtctgtgtagcagcagttcggacctttgggtaggtagcaggtagccttccctccgctggtgactggtgtggtgagatggtttgtatgttgctggctgtgattgtaatatgctgttgtgccttgtcctttgaggtctgcaaaggaaaagtgaattctataggaaattttctatgtggtcttttggaacaaa

SEQ ID NO: 54434 - DNA, 2979 bp, Zea Mays
gcagagacgcgtccgacctccgacgctgccaccaacctcttcccccagccacgctccaccgcgccatagccgcaggaaaatatcaaatcggagccgcgatgcaccacagaaaaaaattccctagggtttccaagcaaaagccctcctgaattctccaattccgcgccttcccccgcttcgtgggcctcggatttagggtttatgcatggcttccgaccctcccggcgacggcgccggcggggaagagccgacgccgggccctgcccccgccgtggaggtgcttgctgctcccgccgttccgctcaggccgcgctgggccacggagatcaaggtctacacccgtaagcacccccgcaaaacccctaaacctcctccagaaccagctcccgcccccgcctccgtccctgcccctgcccttgctcctgccccggccccgaatcccctttccgaaaccttatcctcgattcgtcgctccatccgccgcgcggacacggttggcgctgcggcgcggcccgatccggcagcgccggcctcggttcccgcccgggggccacctggggaacgcggtgccgcctcgggggacccctcatctgaggtgaaccgtgtcggcggcggtatttctaacggccacggcgacgaccgggcggcggccgcggctgagaagtctgagaaagcacggaaacgcagggtgaggagtgagttgcggcgccgactggcgggggagctcgaccaggtccgcgtgctctccaagcggctgaaggaggctgccgaggccctggcgcagcaggaggcttctgagcctgcgcctttgcccatggtggtgctgccaacacagcagcaggtggtggatgctgggtatgtgcaactgcagttctcagctggtgatatggcggtgcccatgtctgctcagattgcagctgctgttactcctgcccgttccatgctgcagcgcagaccactaaccgtgtcggttgttcataatgaagcctttgagaaggtgaagcggacgccaaaggccaatcaattgtaccaaaattcggagttcttgcttgccaaggataggatccctccctcagattcacatgtgcgcaagaaatctaagcaccacaagaagaagcataggtccctagaatctcgtggcgcagactttgatgctgagcggcggctgtactctcatgcgttcaagaagtcctcgtcacttctaagccgtttaatgaagcacaagtttgggtgggtgtttaataagcctgttgatccagttgcacttggtttgcatgattattttactattatcaagcacccaatggatcttggcacgataaggggacggcttagccgcggacagtacaggaacccgaaggagtttgctgaggatgtccggctcactttccataatgcgatgacatataatcccaagggtcaggatgtgcattttatggcagagcagttgtcaggaatcttcgaggcacagtggcctgagattgaggctgaggttaactaccttgcatcgtgtcctccattgccgaagaagtttccacctccaccaattgacctgcacttcctagagaggtcagattcgatgagacaccacatggcattggacaccaattcaagaccgatcagtcatactcccacttacacccggactccatcaatgaagaaaccaagggcaaaggatccaaataagagggacatgacaatagacgagaagcgtaagcttagtgagaacctgcagaatttgccacctgagaagcttgatgctgttgtgcaagtcattaagaacaagaacctatcagttatgcagcatgatgatgagattgaggttgaaattgatagtatggatgctgagacactttgggagcttgaccggtttgtggccaactacaagaagaacctgagtaagcaaaagaggaaggccgagcgagcgatgcttgccagacaagatgcagagttgcgtgcgcagcgccttatacaacaaccgcaaccaaccccagtcccccaagaacctgttggtgaaaaatctctaaagcaagttgcaaaaggtgagcaactaccaacatctgcatcagagaaaaacgacgagaatagacagaacgtgagtggttcaagcaattcaagcagctccagcagtgactcaggatcatcgtctagtgacagtgatagctcctcttcagatggatctgatgctgccaattcatcttgagatataggttcacaagttctgtcgagtagacaataactgtctatttgacatgacattggcaccataagactgtacatgcttaccttgtctggcttaggaaaccccctgtattttaagtagctttgtatgtggattcaccagctggaggcagtaacttaggtttcatggtgtacccgcctaataagactaggcttgttgctgacaccgtgtctttgtacaccgcactgttgctaggagctctcggttggctcagtagcctgtacattagcggcagcttgcacattgattctgtttagctgtgttgattgcagtatgtaggaaggcgattgccgtaagcattgtttcttccatctgttaactgactgatgaaagcattgacaaagccccgttggtgttcagtttgccaccatctttctgtggactacctgtaaccgctgtgggttcatcgccatgtgccaagtctttttgatgttgtaaattaaagtttgttgatgcatctgatgtttagcatcacgactattgacggtccgttcttatgttctgatttgaggaatgtttgcttggaagatggcttgttgacttaactgtctgtgtagcagcagttcggacctttgggtaggtagcaggtagccttccctccgctggtgactggtgtggtgagatggtttgtatgttgctggctgtgattgtaatatgctgttgtgccttgtcctttgaggtctgcaaaggaaaagtgaattctataggaaattttctatgtggtcttttggaacaaa

SEQ ID NO: 54435 - DNA, 3087 bp, Zea Mays
ctcagctgcagtcctccccagaaaagcagagacgcgtccgacctccgacgctgccaccaacctcttcccccagccacgctccaccgcgccatagccgcaggaaaatatcaaatcggagccgcgatgcaccacagaaaaaaattccctagggtttccaagcaaaagccctcctgaattctccaattccgcgccttcccccgcttcgtgggcctcggatttagggtttatgcatggcttccgaccctcccggcgacggcgccggcggggaagagccgacgccgggccctgcccccgccgtggaggtgcttgctgctcccgccgttccgctcaggccgcgctgggccacggagatcaaggtctacacccgtaagcacccccgcaaaacccctaaacctcctccagaaccagctcccgcccccgcctccgtccctgcccctgcccttgctcctgccccggccccgaatcccctttccgaaaccttatcctcgattcgtcgctccatccgccgcgcggacacggttggcgctgcggcgcggcccgatccggcagcgccggcctcggttcccgcccgggggccacctggggaacgcggtgccgcctcgggggacccctcatctgaggtgaaccgtgtcggcggcggtatttctaacggccacggcgacgaccgggcggcggccgcggctgagaagtctgagaaagcacggaaacgcagggtgaggagtgagttgcggcgccgactggcgggggagctcgaccaggtccgcgtgctctccaagcggctgaaggaggctgccgaggccctggcgcagcaggaggcttctgagcctgcgcctttgcccatggtggtgctgccaacacagcagcaggtggtggatgctgggtatgtgcaactgcagttctcagctggtgatatggcggtgcccatgtctgctcagattgcagctgctgttactcctgcccgttccatgctgcagcgcagaccactaaccgtgtcggttgttcataatgaagcctttgagaaggtgaagcggacgccaaaggccaatcaattgtaccaaaattcggagttcttgcttgccaaggataggatccctccctcagattcacatgtgcgcaagaaatctaagcaccacaagaagaagcataggtccctagaatctcgtggcgcagactttgatgctgagcggcggctgtactctcatgcgttcaagaagtcctcgtcacttctaagccgtttaatgaagcacaagtttgggtgggtgtttaataagcctgttgatccagttgcacttggtttgcatgattattttactattatcaagcacccaatggatcttggcacgataaggggacggcttagccgcggacagtacaggaacccgaaggagtttgctgaggatgtccggctcactttccataatgcgatgacatataatcccaagggtcaggatgtgcattttatggcagagcagttgtcaggaatcttcgaggcacagtggcctgagattgaggctgaggttaactaccttgcatcgtgtcctccattgccgaagaagtttccacctccaccaattgacctgcacttcctagagaggtcagattcgatgagacaccacatggcattggacaccaattcaagaccgatcagtcatactcccacttacacccggactccatcaatgaagaaaccaagggcaaaggatccaaataagagggacatgacaatagacgagaagcgtaagcttagtgagaacctgcagaatttgccacctgagaagcttgatgctgttgtgcaagtcattaagaacaagaacctatcagttatgcagcatgatgatgagattgaggttgaaattgatagtatggatgctgagacactttgggagcttgaccggtttgtggccaactacaagaagaacctgagtaagcaaaagaggaaggccgagcgagcgatgcttgccagacaagatgcagagttgcgtgcgcagcgccttatacaacaaccgcaaccaaccccagtcccccaagaacctgttggtgaaaaatctctaaagcaagttgcaaaaggtgagcaactaccaacatctgcatcagagaaaaacgacgagaatagacagaacgtgagtggttcaagcaattcaagcagctccagcagtgactcaggatcatcgtctagtgactcagacagtgatagctcctcttcagatggatctgatgctgccaattcatcttgagatatagattaacttggagctggctgcctggctgattccttctaaggccaaataagatatttgtagaccttccagtgatgttgggttcacaagttctgtcgagtagacaataactgtctatttgacatgacattggcaccataagactgtacatgcttaccttgtctggcttaggaaaccccctgtattttaagtagctttgtatgtggattcaccagctggaggcagtaacttaggtttcatggtgtacccgcctaataagactaggcttgttgctgacaccgtgtctttgtacaccgcactgttgctaggagctctcggttggctcagtagcctgtacattagcggcagcttgcacattgattctgtttagctgtgttgattgcagtatgtaggaaggcgattgccgtaagcattgtttcttccatctgttaactgactgatgaaagcattgacaaagccccgttggtgttcagtttgccaccatctttctgtggactacctgtaaccgctgtgggttcatcgccatgtgccaagtctttttgatgttgtaaattaaagtttgttgatgcatctgatgtttagcatcacgactattgacggtccgttcttatgttctgatttgaggaatgtttgcttggaagatggcttgttgacttaactgtctgtgtagcagcagttcggacctttgggtaggtagcaggtagccttccctccgctggtgactggtgtggtgagatggtttgtatgttgctggctgtgattgtaatatgctgttgtgccttgtcctttgaggtctgcaaaggaaaagtgaattctataggaaattttctatgtggtcttttggaacaaa

SEQ ID NO: 54436 - DNA, 2322 bp, Zea Mays
gtcggctcagctgcagtcctccccagaaaagcagagacgcgtccgacctccgacgctgccaccaacctcttcccccagccacgctccaccgcgccatagccgcaggaaaatatcaaatcggagccgcgatgcaccacagaaaaaaattccctagggtttccaagcaaaagccctcctgaattctccaattccgcgccttcccccgcttcgtgggcctcggatttagggtttatgcatggcttccgaccctcccggcgacggcgccggcggggaagagccgacgccgggccctgcccccgccgtggaggtgcttgctgctcccgccgttccgctcaggccgcgctgggccacggagatcaaggtctacacccgtaagcacccccgcaaaacccctaaacctcctccagaaccagctcccgcccccgcctccgtccctgcccctgcccttgctcctgccccggccccgaatcccctttccgaaaccttatcctcgattcgtcgctccatccgccgcgcggacacggttggcgctgcggcgcggcccgatccggcagcgccggcctcggttcccgcccgggggccacctggggaacgcggtgccgcctcgggggacccctcatctgaggtgaaccgtgtcggcggcggtatttctaacggccacggcgacgaccgggcggcggccgcggctgagaagtctgagaaagcacggaaacgcagggtgaggagtgagttgcggcgccgactggcgggggagctcgaccaggtccgcgtgctctccaagcggctgaaggaggctgccgaggccctggcgcagcaggaggcttctgagcctgcgcctttgcccatggtggtgctgccaacacagcagcaggtggtggatgctgggtatgtgcaactgcagttctcagctggtgatatggcggtgcccatgtctgctcagattgcagctgctgttactcctgcccgttccatgctgcagcgcagaccactaaccgtgtcggttgttcataatgaagcctttgagaaggtgaagcggacgccaaaggccaatcaattgtaccaaaattcggagttcttgcttgccaaggataggatccctccctcagattcacatgtgcgcaagaaatctaagcaccacaagaagaagcataggtccctagaatctcgtggcgcagactttgatgctgagcggcggctgtactctcatgcgttcaagaagtcctcgtcacttctaagccgtttaatgaagcacaagtttgggtgggtgtttaataagcctgttgatccagttgcacttggtttgcatgattattttactattatcaagcacccaatggatcttggcacgataaggggacggcttagccgcggacagtacaggaacccgaaggagtttgctgaggatgtccggctcactttccataatgcgatgacatataatcccaagggtcaggatgtgcattttatggcagagcagttgtcaggaatcttcgaggcacagtggcctgagattgaggctgaggttaactaccttgcatcgtgtcctccattgccgaagaagtttccacctccaccaattgacctgcacttcctagagaggtcagattcgatgagacaccacatggcattggacaccaattcaagaccgatcagtcatactcccacttacacccggactccatcaatgaagaaaccaagggcaaaggatccaaataagagggacatgacaatagacgagaagcgtaagcttagtgagaacctgcagaatttgccacctgagaagcttgatgctgttgtgcaagtcattaagaacaagaacctatcagttatgcagcatgatgatgagattgaggttgaaattgatagtatggatgctgagacactttgggagcttgaccggtttgtggccaactacaagaagaacctgagtaagcaaaagaggaaggccgagcgagcgatgcttgccagacaagatgcagagttgcgtgcgcagcgccttatacaacaaccgcaaccaaccccagtcccccaagaacctgttggtgaaaaatctctaaagcaagttgcaaaagattcactggcaggtgagcaactaccaacatctgcatcagagaaaaacgacgagaatagacagaacgtgagtggttcaagcaattcaagcagctccagcagtgactcaggatcatcgtctagtgactcagacagtgatagctcctcttcagatggatctgatgctgccaattcatcttgagatatagattaacttggagctggctgcctggctgattccttctaaggccaaataagatatttgtagacctt

SEQ ID NO: 54437 - DNA, 760 bp, Zea Mays
gttgattccaccaaaattgatagaatgaacttatgatgcatcacctcatgaagcatagagtgactccataaaccaaacacaccatgaagtaatgaagttgcttaaagagttgtaagcttttggatgagatctaagatggattagttctctagtttgcctaagtaaattcaatttggtcacttttatcaagtgttaagttaggtagaagtatgtgtatacttgtcatgtattttattttgtggtgtttatgttctccacctctccttgtgagagtttgtatttcatatcattacataagcattcatttatttgtaattgacttttaaaacacctagaagaagttgtgttggaaggaggagtctactccagtgtatgctaatcaagtggaggagccatctaactgggtatttgataaagggatctagaacctcttcactgcaataaggtgatcaggagtattcttggtgtccctgtggctagaagatgcttctagttttgaaggatgattagttaggtgtgtttgtgagccttggaagggttctgccttcctggttttgtaattaagttatgcatttcaagttctatcaggacttgtaataattctttctatgtaataaaacttgagctttggaaatgtgaagaatgtttgtaaagtcttccgctctatctccgaagtatgtgtgtatcgaatgggattactgtaatatacatgttttgtgggagatccttggtatgatgagtttaagttgatgaaatcgat

SEQ ID NO: 54438 - DNA, 1865 bp, Zea Mays
ctgtctaccctcaagttctagctaaaggagtatggattccttgtgctactgctgatgtaaccctcttctctgtcccaagatcgagttgctccagagcctggcacaccatcaccagtgtggtgaccaagtccacccgaatgctcatctcaccttggccagggttgcatgcccaggcgacacttgttatgtggtctctagtggtcagtgaagctcacgcattgacgcaaatcagcttttgaactctaccattgtcaggtgatcggaacagggttgtgccgccgcagatgggcgccacagacagcttcaccgccgaccgggtgactcacgctttctccggccgattcctcgcgagcaccgaagtttagaagttgtgttggaaggaggagtctactccagtgtatgctaatcaagtggaggagccatctaactgggtatttgataaagggatctagaacctcttcactgcaataaggcaagcccggtgaatttgcccattccttgtatttttaaaatacttttatacactttaagtctagtgaaatgtgcactaagtttataggagtttcttggaaactatttgatgcatagactaccttgatatccattccttttataaatacttctttagaagtatcaaatattgtttacaaaattgcttagccctgtctagaggtaaatcttgtagatagagtttgtcctttgcactaatgcctagctcaggatttatcctgaggaaggatggctctacctacaagaatattttcacctagatcatggggagatgtaatacaaggttccatgtgatgttttcatcatcctaaggtacacaaataagtccgaaggatgaaagtacttaaatcgagacttgggctaggaacaggtgatgttttgcccaagttgattaaagaatacagggaatgtaggcttgctgatcgaggcatatattaactggccacctgccctggtatgggacagggtaagcctaatctccgctggaccaatatcagaacagctcgcccgcactgggcatgggagatggtgagagtagtgtctaccctccgtggcaagaggccggacggtggagtaactatgctctcgggtagcgggaacccattctagtcttgagaaacacaggtgcaggttggcgtatacaagggttaagtgttacatatgtcgtgtggttagaggtccctagctgggtaaatcgattcaaatcaccattatatcctcaaacaatagagacttgatcactgccctgcaatctaagtcatggatggaatcacaatgagtaaaaataatgttgtgttgatgagatgatgagattagactagatacaaacaaggtctattaatactcaatctagcattaaaatgttgaaagtaaggactccttttagtaagcttttctgcaaactattaaagttgattcttgctaaaagcctttccttgattcccaaatccagcatatccttgagagtctttttccttagtcaggtaagacttgcgaaagtacactccgtactcagggtttccgaacccatgatgttgcaggtgatcaggagtattcttggtgtccctgtggctagaagatgcttctagttttgaaggatgattagttaggtgtgtttgtgagccttggaagggttctgccttcctggttttgtaattaagttatgcatttcaagttctatcaggacttgtaataattctttctatgtaataaaacttgagctttggaaatgtgaagaatgtttgtaaagtcttccgctctatctccgaagtatgtgtgtatcgaatgggattactgtaatatacatgttttgtgggagatccttggtatgatgagtttaagttgatgaaatcgat

SEQ ID NO: 54439 - DNA, 829 bp, Zea Mays
cctatatattcagtgactgcaaacttgattcagtgaaacctcctgtctaccctcaagttctagctaaaggagtatggattccttgtgctactgctgatgtaaccctcttctctgtcccaagatcgagttgctccagagcctggcacaccatcaccagtgtggtgaccaagtccacccgaatgctcatctcaccttggccagggttgcatgcccaggcgacacttgttatgtggtctctagtggtcagtgaagctcacgcattgacgcaaatcagcttttgaactctaccattgtcaggtgatcggaacagggttgtgccgccgcagatgggcgccacagacagcttcaccgccgaccgggtgactcacgctttctccggccgattcctcgcgagcaccgaagtttagaagttgtgttggaaggaggagtctactccagtgtatgctaatcaagtggaggagccatctaactgggtatttgataaagggatctagaacctcttcactgcaataaggtgatcaggagtattcttggtgtccctgtggctagaagatgcttctagttttgaaggatgattagttaggtgtgtttgtgagccttggaagggttctgccttcctggttttgtaattaagttatgcatttcaagttctatcaggacttgtaataattctttctatgtaataaaacttgagctttggaaatgtgaagaatgtttgtaaagtcttccgctctatctccgaagtatgtgtgtatcgaatgggattactgtaatatacatgttttgtgggagatccttggtatgatgagtttaagttgatgaaatcgat

SEQ ID NO: 54440 - DNA, 946 bp, Zea Mays
gtgaagaccattattgtcagtcttgtcttgtgccccattgctataatcatctttttcattgggatcaatctcaatagttggtgacacttttgttactgaggacactacaaatgtgatgtttcctcgggaagtaacagttccaggctatacacacccattggttgcagttggcacaggttacagagaaaagttttttgtcaaagtatatgctgccgcgttctatgtagattactcacttcgccttgatactgagcaatggaaagcaaagactggtattgagagctttgacagttcctctgttttcgactccatttttaaggcaccggttgtgaaatcattgagtataattcttgttagagccgttgatggcaagacctttgtgaatgctctaaatgatgtcattgcccgccaaataaaaaacccaaacgccgaggaagaatcttccctgtcaaccttgcagaatacctttcttgggcgcaatctcaaacagggaacaagcatatacttaacttggcttgaacccaaaagaatgctgatctccatttcggaagatgaagatccacgtcaagttgatgcagagatcaaatctgctactgttaattatgctctatatgatggcttctttggtaaatccacagtgtgcccttctttaagatcatctacagcccagttgctggacgcgcttctgcttgcgaagtgacaaaccagtcgtggttccatatcaatggttacgagtggttattcccttctcccttgttttcccgagggaacacaggacgggctaggtgtccataatcataagtcccataaaggaaattaatttaattattatagagttcatatgtaacatttttgtcgtccctgatgaaatatggtgaatttgtcacgcccctatgctgatattatgattggcagattgctttaggtagtgtttggttgaggagcc

SEQ ID NO: 54441 - DNA, 1495 bp, Zea Mays
ctgcaagtgcagttataaggaaaggtgttactgctatgcattggtgctggacctcatgatgaagcattgtgctcattctgtttaggttctgaacttttgtgtttctttcacaggcagtgaagaccattattgtcagtcttgtcttgtgccccattgctataatcatctttttcattgggatcaatctcaataggtgggatggcttgtataaattcgtcaacctctaaagtgaaagttatgtcataacccaccttgatcagtggtacacgggaattgttccatattcaacactgtgcatgtcaacatcttgggctgcaccaaccacaattcccactacccaaaaagctaggtgctggcgccaagcaaagagcttgcctgaaatatggatctggatgaccaagtgcaatagaaatagttttagggtggagaaatgattgggactgatacctgatctatatttttcccttttgtgtgcacacatcttagctagcaatgcatgtattttatataacttctgttgctccttaatatcaggttggtcgtaccacagtcaaatctacagaagacctgattcttggcgttcccttgataactgtcaatctgttggacttgtacttaagtctcatttggtgacacttttgttactgaggacactacaaatgtgatgtttcctcgggaagtaacagttccaggctatacacacccattggttgcagttggcacaggttacagagaaaagttttttgtcaaagtatatgctgccgcgttctatgtagattactcacttcgccttgatactgagcaatggaaagcaaagactggtattgagagctttgacagttcctctgttttcgactccatttttaaggcaccggttgtgaaatcattgagtataattcttgttagagccgttgatggcaagacctttgtgaatgctctaaatgatgtcattgcccgccaaataaaaaacccaaacgccgaggaagaatcttccctgtcaaccttgcagaatacctttcttgggcgcaatctcaaacagggaacaagcatatacttaacttggcttgaacccaaaagaatgctgatctccatttcggaagatgaagatccacgtcaagttgatgcagagatcaaatctgctactgttaattatgctctatatgatggcttctttggtaaatccacagtgtgcccttctttaagatcatctacagcccagttgctggacgcgcttctgcttgcgaagtgacaaaccagtcgtggttccatatcaatggttacgagtggttattcccttctcccttgttttcccgagggaacacaggacgggctaggtgtccataatcataagtcccataaaggaaattaatttaattattatagagttcatatgtaacatttttgtcgtccctgatgaaatatggtgaatttgtcacgcccctatgctgatattatgattggcagattgctttaggtagtgtttggttgaggagcc

SEQ ID NO: 54442 - DNA, 1750 bp, Zea Mays
ctgcaagtgcagttataaggaaaggtgttactgctatgcattggtgctggacctcatgatgaagcattgtgctcattctgtttaggttctgaacttttgtgtttctttcacaggcagtgaagaccattattgtcagtcttgtcttgtgccccattgctataatcatctttttcattgggatcaatctcaataggtgggatggcttgtataaattcgtcaacctctaaagtgaaagttatgtcataacccaccttgatcagtggtacacgggaattgttccatattcaacactgtgcatgtcaacatcttgggctgcaccaaccacaattcccactacccaaaaagctaggtgctggcgccaagcaaagagcttgcctgaaatatggatctggatgaccaagtgcaatagaaatagttttagggtggagaaatgattgggactgatacctgatctatatttttcccttttgtgtgcacacatcttagctagcaatgcatgtattttatataacttctgttgctccttaatatcaggttggtcgtaccacagtcaaatctacagaagacctgattcttggcgttcccttgataactgtcaatctgttggacttgtacttaagtctcatgtatacacaattatacatatgaatatgttgtaagttgtgattagtcgattaggagtcttacattgaaaattttacatccagtcatctagctgcaaagcttgctatcttagcttttgaagctttagaaaaaagattgttagataaactgtctgtcccaagttcgcttgtcatgatatatttttttcttcaaatgtgtttgagttttttctctagaatatttactattacaatgactcaacccatctttctctgtagttggtgacacttttgttactgaggacactacaaatgtgatgtttcctcgggaagtaacagttccaggctatacacacccattggttgcagttggcacaggttacagagaaaagttttttgtcaaagtatatgctgccgcgttctatgtagattactcacttcgccttgatactgagcaatggaaagcaaagactggtattgagagctttgacagttcctctgttttcgactccatttttaaggcaccggttgtgaaatcattgagtataattcttgttagagccgttgatggcaagacctttgtgaatgctctaaatgatgtcattgcccgccaaataaaaaacccaaacgccgaggaagaatcttccctgtcaaccttgcagaatacctttcttgggcgcaatctcaaacagggaacaagcatatacttaacttggcttgaacccaaaagaatgctgatctccatttcggaagatgaagatccacgtcaagttgatgcagagatcaaatctgctactgttaattatgctctatatgatggcttctttggtaaatccacagtgtgcccttctttaagatcatctacagcccagttgctggacgcgcttctgcttgcgaagtgacaaaccagtcgtggttccatatcaatggttacgagtggttattcccttctcccttgttttcccgagggaacacaggacgggctaggtgtccataatcataagtcccataaaggaaattaatttaattattatagagttcatatgtaacatttttgtcgtccctgatgaaatatggtgaatttgtcacgcccctatgctgatattatgattggcagattgctttaggtagtgtttggttgaggagcc

SEQ ID NO: 54443 - DNA, 1524 bp, Zea Mays
ctgcaagtgcagttataaggaaaggtgttactgctatgcattggtgctggacctcatgatgaagcattgtgctcattctgtttaggttctgaacttttgtgtttctttcacaggcagtgaagaccattattgtcagtcttgtcttgtgccccattgctataatcatctttttcattgggatcaatctcaataggtgggatggcttgtataaattcgtcaacctctaaagtgaaagttatgtcataacccaccttgatcagtggtacacgggaattgttccatattcaacactgtgcatgtcaacatcttgggctgcaccaaccacaattcccactacccaaaaagctaggtgctggcgccaagcaaagagcttgcctgaaatatggatctggatgaccaagtgcaatagaaatagttttagggtggagaaatgattgggactgatacctgatctatatttttcccttttgtgtgcacacatcttagctagcaatgcatgtattttatataacttctgttgctccttaatatcaggttggtcgtaccacagtcaaatctacagaagacctgattcttggcgttcccttgataactgtcaatctgttggacttgtacttaagtctcatgtatacacaattatacatatgaatatgttttggtgacacttttgttactgaggacactacaaatgtgatgtttcctcgggaagtaacagttccaggctatacacacccattggttgcagttggcacaggttacagagaaaagttttttgtcaaagtatatgctgccgcgttctatgtagattactcacttcgccttgatactgagcaatggaaagcaaagactggtattgagagctttgacagttcctctgttttcgactccatttttaaggcaccggttgtgaaatcattgagtataattcttgttagagccgttgatggcaagacctttgtgaatgctctaaatgatgtcattgcccgccaaataaaaaacccaaacgccgaggaagaatcttccctgtcaaccttgcagaatacctttcttgggcgcaatctcaaacagggaacaagcatatacttaacttggcttgaacccaaaagaatgctgatctccatttcggaagatgaagatccacgtcaagttgatgcagagatcaaatctgctactgttaattatgctctatatgatggcttctttggtaaatccacagtgtgcccttctttaagatcatctacagcccagttgctggacgcgcttctgcttgcgaagtgacaaaccagtcgtggttccatatcaatggttacgagtggttattcccttctcccttgttttcccgagggaacacaggacgggctaggtgtccataatcataagtcccataaaggaaattaatttaattattatagagttcatatgtaacatttttgtcgtccctgatgaaatatggtgaatttgtcacgcccctatgctgatattatgattggcagattgctttaggtagtgtttggttgaggagcc

SEQ ID NO: 54444 - DNA, 1265 bp, Zea Mays
ggagtactcttgggggagataggcgttcgcttcatgcttatccaacagagttggtcgtaccacagtcaaatctacagaagacctgattcttggcgttcccttgataactgtcaatctgttggacttgtacttaagtctcatgtatacacaattatacatatgaatatgttgtaagttgtgattagtcgattaggagtcttacattgaaaattttacatccagtcatctagctgcaaagcttgctatcttagcttttgaagctttagaaaaaagattgttagataaactgtctgtcccaagttcgcttgtcatgatatatttttttcttcaaatgtgtttgagttttttctctagaatatttactattacaatgactcaacccatctttctctgtagttggtgacacttttgttactgaggacactacaaatgtgatgtttcctcgggaagtaacagttccaggctatacacacccattggttgcagttggcacaggttacagagaaaagttttttgtcaaagtatatgctgccgcgttctatgtagattactcacttcgccttgatactgagcaatggaaagcaaagactggtattgagagctttgacagttcctctgttttcgactccatttttaaggcaccggttgtgaaatcattgagtataattcttgttagagccgttgatggcaagacctttgtgaatgctctaaatgatgtcattgcccgccaaataaaaaacccaaacgccgaggaagaatcttccctgtcaaccttgcagaatacctttcttgggcgcaatctcaaacagggaacaagcatatacttaacttggcttgaacccaaaagaatgctgatctccatttcggaagatgaagatccacgtcaagttgatgcagagatcaaatctgctactgttaattatgctctatatgatggcttctttggtaaatccacagtgtgcccttctttaagatcatctacagcccagttgctggacgcgcttctgcttgcgaagtgacaaaccagtcgtggttccatatcaatggttacgagtggttattcccttctcccttgttttcccgagggaacacaggacgggctaggtgtccataatcataagtcccataaaggaaattaatttaattattatagagttcatatgtaacatttttgtcgtccctgatgaaatatggtgaatttgtcacgcccctatgctgatattatgattggcagattgctttaggtagtgtttggttgaggagcc

SEQ ID NO: 54445 - DNA, 546 bp, Zea Mays
tttgcttggtgaggggcttggagtactcttgggggagataggcgttcgcttcatgcttatccaacagattggtgacacttttgttactgaggacactacaaatgtgatgtttcctcgggaagtaacagttccaggctatacacacccattggttgcagttggcacaggttacagagaaaagttttttgtcaaagtatatgctgccgcgttctatgtagattactcacttcgccttgatactgagcaatggaaagcaaagactggtattgagagctttgacagttcctctgttttcgactccatttttaaggcaccggttgtgaaatcattgagtataattcttgttagagccgttgatggcaagacctttgtgaatgctctaaatgatgtcattgcccgccaaataaaaaacccaaacgccgaggaagaatcttccctgtcaaccttgcagaatacctttcttgggcgcaatctcaaacagggaacaagcatatacttaacttggcttgaacccaaaagaatgctgaccttaaagctttagttgag

SEQ ID NO: 54446 - DNA, 445 bp, Zea Mays
caatcacagctctcgtcacgacagataaggccatgtgcatccttcgccactcaccagcgctctccagtccacttcacttcatccctgatcggcgatcgcgtcgagcgagcagcgctataacgcacgatgaacttggcgtccgtcgttccctgcgcgcaggcattcctcgcgttaatgactcccgccgctggctcccaccgtcgggtccacacgcatgcggcggcctccaagagcggattggcctgccgcgtcgcgcgcagcgggggcacccggtggctgccggtctcctgtgcagccgggggcggtgcagttggtgacacttttgttactgaggacactacaaatgtgatgtttcctcgggaagtaacagttccaggctatacacacccattggttgcagttggcacaggttcgtcatgatggctatggtgatatatttagctat

SEQ ID NO: 54447 - DNA, 1340 bp, Zea Mays
aaaccctgggccacagaccggatggcccggcgtgtagatccacccctggctccgtaccatccaaatccgactaggtctttcagccatgggtccagagaaggaggttagaatatgcaggactaaagcacgtcatgtctggacttctacgacatgctcagacacacatttttggtcgtcttcttcgcgaagatggaaccccgaatatacctgtgatcgagaagttgttttgtaagattgatctggacaacgatggaaaacttgaacgtggcgaactacaggctttcatccttggtgtcaagttcgaagacgttgatttggatagtgacctagctgtagatcaagtcatggcagactttgatacatctcataattctgtcattgaaaagggggagttcatcgatggcatcttgagatggctagaagaagctaaacgctcggttgctacctccggttctgactcgagaaagtttctgcaggattttcacacgagaactagggatgagcgtagtcagctccttgggaaggacgacgaggacggtgaggctattgaaaacccaacctggaccagcttcaaggccattctgcttttgctcctgggaactgcaatggcagcagcgtttgcagacccacttgttgacgccgtgcacggtttctcaaacgctacgagcatcccttcgtttttcatctctttcattgcaatgcccctggctaccaattccagtgaggctgtctcagcaatcatatttgctagccggaagaagcagcggaccctgtcacttacattctctgaggtctacggtgcggtgaccatgaacaacacgctctgcctggccgtgttcttgggcctcgtctacgtgcggggtttgacgtgggatttcagctcagaggtcctcatcatcttcagtgtctgcaccataatgggcctcttcaccagcttccggacagatttccccctctggacgtgtgtcgtggcctacctgctgtatccgctgtccctcgtcgtcgtctacgtccttgacttcaagttcggctggtcatagacctgcatgatcgtctgaggccggcttagcttcaacacattacatatacgttgatatatataccatgcgaaatagtacggctttgttacgtatactagtaaagtatactccggttgtgtatgggcttttttgaagaaaaaaaacttaagtatttttctcagatcaaagttttttttttgaaacgaacatgccagtagagctgctgtcgattatattgacaaagaggaaggtaccttcagaagagaactataacaaaattacagcaaaaactactgtaacactaccaacaaaagcaacacc

SEQ ID NO: 54448 - DNA, 2435 bp, Zea Mays
caaagctgcactgtcgctcgccagcgattcctggacgcttttggcgtgcctcctgctgctgccttcctcgtgtagtcgtgtcgcggtggtcggtggtcgggtggtggcgggcgacacaccctagacgcgtggcaaggagcaagattatgttcgtgcattcgcggcatcgaagtttttttttggggcctccctgttgctgcggcgcgtcggtcctccccattcacggcatcgacagaaaatagattcatcaatcatcccgtttcgcggagacagagccatcccgctccatctccctcccagccaaaccctacctgaaacaacgacgcactcttgcattggccgttggcgtcccgctcgctcgctctctcttccactcgctgcacccgtgcgtgacaatgcccacgcgtctcccactccgtctcctcctcctcgtcctcgccatcgccggcgccgcacatggccgccgcggcatctctttctccgacgatgaccgctctctcctcctcgccggcagcagtgatgaggttgccgccgcgacgtcggtcctacggctcccgtcggcggcgggggaggatccggcgcctgaggcctgcgagatgacgtacggcttcctgccctgcaccgacaccgcgcccggcaacctcttcctcgtcctcgcctacggcctcctcatgttcaaggccgccacctacctctccgccggcagcgagctgctgctcgaggtcctcggccctggcgtcgtcggcggcctcttcctgcccatcctcggcgcgctacccgacgcaatgctcatccttgtctctgggctcgccggaactaaagaggttgcgcaaagccaggttttgatcggaatgggcctgcttgcaggttcaacagtcatgctcttgacccttctctggggatcttgtgttgttgttggcaaatgtgatatgtcagaaaactcaactgcaactgattctcaagatacaaaaggcttcagtctttttggatctggtgtttctactgatgtgcagaccagctatgctgcaagaatcatggcaatatctgtgcttccctttatcattgttcagataccccaaatttttaggctccattctggccatcgtttgacagtcctgcttggacttattgctgcagctctacttgtgctcgcttattgcctgtatcaggtctttcagccatgggtccagagaaggaggttagaatatgcaggactaaagcacgtcatgtctggacttctacgacatgctcagacacacatttttggtcgtcttcttcgcgaagatggaaccccgaatatacctgtgatcgagaagttgttttgtaagattgatctggacaacgatggaaaacttgaacgtggcgaactacaggctttcatccttggtgtcaagttcgaagacgttgatttggatagtgacctagctgtagatcaagtcatggcagactttgatacatctcataattctgtcattgaaaagggggagttcatcgatggcatcttgagatggctagaagaagctaaacgctcggttgctacctccggttctgactcgagaaagtttctgcaggattttcacacgagaactagggatgagcgtagtcagctccttgggaaggacgacgaggacggtgaggctattgaaaacccaacctggaccagcttcaaggccattctgcttttgctcctgggaactgcaatggcagcagcgtttgcagacccacttgttgacgccgtgcacggtttctcaaacgctacgagcatcccttcgtttttcatctctttcattgcaatgcccctggctaccaattccagtgaggctgtctcagcaatcatatttgctagccggaagaagcagcggaccctgtcacttacattctctgaggtctacggtgcggtgaccatgaacaacacgctctgcctggccgtgttcttgggcctcgtctacgtgcggggtttgacgtgggatttcagctcagaggtcctcatcatcttcagtgtctgcaccataatgggcctcttcaccagcttccggacagatttccccctctggacgtgtgtcgtggcctacctgctgtatccgctgtccctcgtcgtcgtctacgtccttgacttcaagttcggctggtcatagacctgcatgatcgtctgaggccggcttagcttcaacacattacatatacgttgatatatataccatgcgaaatagtacggctttgttacgtatactagtaaagtatactccggttgtgtatgggcttttttgaagaaaaaaaacttaagtatttttctcagatcaaagttttttttttgaaacgaacatgccagtagagctgctgtcgattatattgacaaagaggaaggtaccttcagaagagaactataacaaaattacagcaaaaactactgtaacactaccaacaaaagcaacacc

SEQ ID NO: 54449 - DNA, 2490 bp, Zea Mays
gttccttaccttttttttttctcatgtccatgcggcagttcccggatttgcaaagctgcactgtcgctcgccagcgattcctggacgcttttggcgtgcctcctgctgctgccttcctcgtgtagtcgtgtcgcggtggtcggtggtcgggtggtggcgggcgacacaccctagacgcgtggcaaggagcaagattagattatgttcgtgcattcgcggcatcgaagtttttttttggggcctccctgttgctgcggcgcgtcggtcctccccattcacggcatcgacagaaaatagattcatcaatcatcccgtttcgcggagacagagccatcccgctccatctccctcccagccaaaccctacctgaaacaacgacgcactcttgcattggccgttggcgtcccgctcgctcgctctctcttccactcgctgcacccgtgcgtgacaatgcccacgcgtctcccactccgtctcctcctcctcgtcctcgccatcgccggcgccgcacatggccgccgcggcatctctttctccgacgatgaccgctctctcctcctcgccggcagcagtgatgaggttgccgccgcgacgtcggtcctacggctcccgtcggcggcgggggaggatccggcgcctgaggcctgcgagatgacgtacggcttcctgccctgcaccgacaccgcgcccggcaacctcttcctcgtcctcgcctacggcctcctcatgttcaaggccgccacctacctctccgccggcagcgagctgctgctcgaggtcctcggccctggcgtcgtcggcggcctcttcctgcccatcctcggcgcgctacccgacgcaatgctcatccttgtctctgggctcgccggaactaaagaggttgcgcaaagccaggttttgatcggaatgggcctgcttgcaggttcaacagtcatgctcttgacccttctctggggatcttgtgttgttgttggcaaatgtgatatgtcagaaaactcaactgcaactgattctcaagatacaaaaggcttcagtctttttggatctggtgtttctactgatgtgcagaccagctatgctgcaagaatcatggcaatatctgtgcttccctttatcattgttcagataccccaaatttttaggctccattctggccatcgtttgacagtcctgcttggacttattgctgcagctctacttgtgctcgcttattgcctgtatcaggtctttcagccatgggtccagagaaggaggttagaatatgcaggactaaagcacgtcatgtctggacttctacgacatgctcagacacacatttttggtcgtcttcttcgcgaagatggaaccccgaatatacctgtgatcgagaagttgttttgtaagattgatctggacaacgatggaaaacttgaacgtggcgaactacaggctttcatccttggtgtcaagttcgaagacgttgatttggatagtgacctagctgtagatcaagtcatggcagactttgatacatctcataattctgtcattgaaaagggggagttcatcgatggcatcttgagatggctagaagaagctaaacgctcggttgctacctccggttctgactcgagaaagtttctgcaggattttcacacgagaactagggatgagcgtagtcagctccttgggaaggacgacgaggacggtgaggctattgaaaacccaacctggaccagcttcaaggccattctgcttttgctcctgggaactgcaatggcagcagcgtttgcagacccacttgttgacgccgtgcacggtttctcaaacgctacgagcatcccttcgtttttcatctctttcattgcaatgcccctggctaccaattccagtgaggctgtctcagcaatcatatttgctagccggaagaagcagcggaccctgtcacttacattctctgaggtctacggtgcggtgaccatgaacaacacgctctgcctggccgtgttcttgggcctcgtctacgtgcggggtttgacgtgggatttcagctcagaggtcctcatcatcttcagtgtctgcaccataatgggcctcttcaccagcttccggacagatttccccctctggacgtgtgtcgtggcctacctgctgtatccgctgtccctcgtcgtcgtctacgtccttgacttcaagttcggctggtcatagacctgcatgatcgtctgaggccggcttagcttcaacacattacatatacgttgatatatataccatgcgaaatagtacggctttgttacgtatactagtaaagtatactccggttgtgtatgggcttttttgaagaaaaaaaacttaagtatttttctcagatcaaagttttttttttgaaacgaacatgccagtagagctgctgtcgattatattgacaaagaggaaggtaccttcagaagagaactataacaaaattacagcaaaaactactgtaacactaccaacaaaagcaacacc

SEQ ID NO: 54450 - DNA, 1307 bp, Zea Mays
accatatatctctccacctacaccctgcctgcctgcttgcaattgcaattgcaaccaataaccatatacacacagctagctagcttcacatatcgcaagcacccagatcggcaggaccagcggcagcggcaacggtgccggcaagaagcaggccgcgcgctccactctccgaccccggccgaaacaaaggtgatggcgcagctgccgccgagggcgccggggggcgccgcgccgcaggaccactggtcggcggcgggggagttcctggggttcgccgcggccagacgcggcgcgcaccgccgctcggcgagcgactcggccgcgttcctcgaggccctgcccatggaagacgtcatcggcggcgacggcttcgaccgcctcgacgacgaccagctcatgtccatgttctccgacgtcgacgcgccggccgtctccgccggggacgcggcgcagctcatggacgtggcggacgccgacgcggacgcggacgacgacgggtcggccgcctcgtcgcgcgccgccgcggacggcgtcgccgctgaccccaaaagggtcaagaggatattagcaaacaggcagtcagcgcaaaggtcacgagtcaggaagctacagtacatctccgagctcgaacggagtgtcaccggtctccagatggaggtgtcagcgctgtcccctcgcgtggccttcctcgaccaccagcgatcgctgctcaccgtcggcaacagccacctcaagcaacgaatcgcggcgctcgcccaagacaagatcttcaaggatggtatctcatcaagaggcgctgaagaaggagatcgagcggctacgccatgtgtaccagcagcagcagcagcagcagcagatcaaggtggccaccaccggcggcgccgacatcgccgcggccgcctccatgcaggccaggcaagagctgctcgcgtgcgagggcgctgccattcgatagcagatcgagggcggaggcgttcaattggcagtgccacaacaaccagcaccgaactttgtgccgggttcctccttttctcagacaagttgttcgtcgtgcgtgcaaatacacgcgcctgttattagcctattgattttatttctgtgcagtcttaattaattcgtatatgtgatgtattcctcctcttcgtccctagcaaaaaagaaaaagaaacggcagtcgtgctgggatggggactttgttgtgaatgaatgaatgtatttggttatttggacgggcttaccgtttgtgttggtaaagattttttttctcccctccaaaaggtgatcggattcttcaggtgttcaagtca

SEQ ID NO: 54451 - DNA, 1722 bp, Zea Mays
tagccctagaccacatgcagcatgatcgatgcaatgcaagcagtctctctcatctcatgcaatattgcaaacgcagtgccccacctcacaaggccatccccccatgcatgtgcactcacacacacacacaccatatatctctccacctacaccctgcctgcctgcttgcaattgcaattgcaaccaataaccatatacacacagctagctagcttcacatatcgcaagcacccagatcggcaggaccagcggcagcggcaacggtgccggcaagaagcaggccgcgcgctccactctccgaccccggccgaaacaaaggtgatggcgcagctgccgccgagggcgccggggggcgccgcgccgcaggaccactggtcggcggcgggggagttcctggggttcgccgcggccagacgcggcgcgcaccgccgctcggcgagcgactcggccgcgttcctcgaggccctgcccatggaagacgtcatcggcggcgacggcttcgaccgcctcgacgacgaccagctcatgtccatgttctccgacgtcgacgcgccggccgtctccgccggggacgcggcgcagctcatggacgtggcggacgccgacgcggacgcggacgacgacgggtcggccgcctcgtcgcgcgccgccgcggacggcgtcgccgctgaccccaaaagggtcaagaggttagtggcaactctgctagctagtacattttttaactagtagtggtcgtcttttccattcgtctacggatctaccatggcggccaaacagtagtttttttataaaaaaaaaagaaaaagaaaaattgaagatgtaatttgtgagttgtgactgcccggtctcagaagtcagaactcaggatcggagtgcctttaatttgtcgtttttgctgttcatctcttagattaacatatttcaaatcagaatggccaagcaatagtttcgatttctctgttcccttgggtttcaggatattagcaaacaggcagtcagcgcaaaggtcacgagtcaggaagctacagtacatctccgagctcgaacggagtgtcaccggtctccagatggaggtgtcagcgctgtcccctcgcgtggccttcctcgaccaccagcgatcgctgctcaccgtcggcaacagccacctcaagcaacgaatcgcggcgctcgcccaagacaagatcttcaaggatgctcatcaagaggcgctgaagaaggagatcgagcggctacgccatgtgtaccagcagcagcagcagcagcagcagatcaaggtggccaccaccggcggcgccgacatcgccgcggccgcctccatgcaggccaggcaagagctgctcgcgtgcgagggcgctgccattcgatagcagatcgagggcggaggcgttcaattggcagtgccacaacaaccagcaccgaactttgtgccgggttcctccttttctcagacaagttgttcgtcgtgcgtgcaaatacacgcgcctgttattagcctattgattttatttctgtgcagtcttaattaattcgtatatgtgatgtattcctcctcttcgtccctagcaaaaaagaaaaagaaacggcagtcgtgctgggatggggactttgttgtgaatgaatgaatgtatttggttatttggacgggcttaccgtttgtgttggtaaagattttttttctcccctccaaaaggtgatcggattcttcaggtgttcaagtca

SEQ ID NO: 54452 - DNA, 3622 bp, Zea Mays
gttcgagtgccccttcagctcgaactactggcaacacgtgggcatccagtggaactttgagcttgacattcttcagattgttcgaagatgcgaagaaagcttttggcaggcaattcttcatggaaattgtggctgtggtggcttggaccatctggaaacaacgaaatgactgcatctttagaaatgtcatcccttccttccattcttgcaggatttgtttcaacgacacgttgaagttgcagatgtttagatttagctctacccttaagcttcatgtatccctctggtttataaacgaacaaaaacatcggcatgaggtgacaattctgctccaagatattgttgatattgtagtccaggacatgattgtggatcctcaaagtatactgaatgtggttaactcttcaaagagattgatctctgatgatgatggagcattcagctattatgaaccagagctgtttgcatcagtcagctcaagaacaagcatccgatatccatattttgatcagcaaaaagaacaggttaaacgcttctatcttttgcttagtacaaaagaaaaggctgcggaaataccatcaaatttagaggctcggcgacgcatttcatttttcgccacatctctgtttatgcatatgcctgctgctcccaaagttcgcagtatgttgtcatttagtgtaataactccatatttcatggaagaagtgaagttttcagatgaagagcttcattcaaatcaagatgaagcatccaccctttcgtacatgcaaaagatatatccagatcaatggaaaaactttctggaacgcgttgatacaaaggtaactaatgatgaaattagatattgggcttcctaccgtggccaaacactgagccgaactgtacggggaatgatgtactacagaaaagcattgaagctacaggctctcttagacatgacaaatgatcaagatttatatgaagcacttctagcaattgagcaaggaaaaaataaaagaaatatccaccaagcattagcagctgaactagaagcacttgcagatatgaaattttcatatgtcatttcatgtcagaagtttggggaacaaaaaatcaaaggtgatccccatgctcaagacatcatagatctgatgatgaggtgccctgctctgagggttgcttatattgaagagaaggaagtcatagtaaataactgttctcatatggttgaagggaaggaagtcatagtaaataactgtccccataaggtttattcatctgtgttaataaaagcagagaataatttggaccaggagatttaccgtataaagctgcctggtccacctatcattggagaagggaagcctgaaaatcagaaccatgcgattatcttcactcgtggagatgctctacaaacaattgatatgaatcaagacaactatctggaagaagcttacaaaatgaggaatgtccttcaagagtttgtaaggcatcctagggacaaagctccaactatccttgggttaagagagcatatcttcactggaagtgtttcatctcttgctggcttcatgtcatatcaagagacaagctttgttacaattggacaaagatttcttgctgaaccccttagggtacggtttcactatggtcatccagacatttttgatcggatatttcatttaacaaggggcggcataagtaaagcgtctaaaactataaacttaagtgaggatgtgtttgctgggtataattccatattgcgtcgtgggaatataatttacagtgaatacattcaagttggcaaagggcgtgatgttggtcttaaccagatatccaaatttgaagctaaagtggcaaatggcaatagtgagcaaacaatcagtcgtgatattcaccggctaggtcggcgatttgatttcttcaggatgctctcatgttattttacaacagtgggattttactttaatagcctaatatcagttgttggtgtttatgttttcctctatggccagttgtacttggttctcagtggcctgcagagggctctgctacttgaagctcagactcagaatataaagtccttagaaacagcccttgcatctcagtcttttctccagctgggactgcttacaggattgcctatggtgatggagctaggtttggaaaagggtttccgtgcagctctgagtgattttatcctcatgcaattgcagttagcatcagttttcttcacattctcacttggaacaaaagcacactactacggccgtactattctccatgggggtgctaaataccggcctacagggcgtaaatttgttgttttccatgcaagctttactgagaattatcagttgtattccagaagtcattttgtcaaaggatttgagttgatcttccttttgatagtctaccacatctttaggagatcttatgttagcaatgtcgtgcatgtgatgatcacatactcaacatggtttatggcagtggcttggctgtttactccttttctttttaacccagctggttttgcttggcaaaaaattgttgacgactgggctgactggaataggtggatgaagaatcaaggaggcataggagtgcaaccagagaaaagctgggagtcatggtggaatagtgagaatgcacatctacgttactcagtattgagttctagaattcttgaagtgttgctctcactacgcttcttcatatatcaatatggacttgtttatcacctgaatatctctcaagacaacaagaatttccttgtctacctgctttcatgggtcgtaattattgccattattggttttgttaagcttgtcaattgtgctagccgtcgtttgagcacaaagcaccaactcgtcttcaggctcataaaacttttgacattcctctcagtggttacttccttggtccttctctattgtctctgtcgattatctatcatggatttgatcatctgttgtctcgcattcataccaactggctggggtctcctccttattgttcaagttttgagacccaaaatagagtactacgcagtatgggagcctattcaggtcatagctcacgcttacgactatggaatgggatctctgcttttcttcccgatcgctgtgcttgcatggatgcctgttatctcggccattcaaacccgggttcttttcaacagagcattttcccggcaactacagatccagccttttattgcaggcaaaactaaacggagatagcataaccgatggttttacatcgcatattggggatttgtgaatatgatctattggttggtcatcagagcaataagtttctgtactctggtagcataaatgtcgtgtgcagtgtgatccattattctttggcctaagcctgttccacatctaacatagtaataccttggtttcggtttttattgccgtgtaactttacatatcatttctgtaaaaaagaaacagctctagcattgctcttagatgagttgagactgatgaatctcatgatacctacacagttacaaaggtactaccttattttcatgtgaaatacgacacttattgtactactgtattattatgctttaacgtgcagtaccaaatcatttgccactgttagattcttgtgtttgattattttt

SEQ ID NO: 54453 - DNA, 3743 bp, Zea Mays
atagatcaaatgatggcgtccagggaggagatggacaggtggatttacccttggggaaatagcaagttcagttcctcgaagttttacaacctcagctttgcatccatcgaaccaccacccccatttctgtggatttggcagtccaaagtctgcaaaaagatcaaaatctttgtcgggcttgtcttcagagacagaatggactttctgaatgcggctagtaatctgcactgtgtgctttgtgattccaactgcgaagagacaaccttccacatgttgttcgagtgccccttcagctcgaactactggcaacacgtgggcatccagtggaactttgagcttgacattcttcagattgttcgaagatgcgaagaaagcttttggcaggcaattcttcatggaaattgtggctgtggtggcttggaccatctggaaacaacgaaatgactgcatctttagaaatgtcatcccttccttccattcttgcaggatttgtttcaacgacacgttgaagttgcagatgtttagatttagctctacccttaagcttcatgtatccctctggtttataaacgaacaaaaacatcggcatgaggtgacaattctgctccaagatattgttgatattgtagtccaggacatgattgtggatcctcaaagtatactgaatgtggttaactcttcaaagagattgatctctgatgatgatggagcattcagctattatgaaccagagctgtttgcatcagtcagctcaagaacaagcatccgatatccatattttgatcagcaaaaagaacaggttaaacgcttctatcttttgcttagtacaaaagaaaaggctgcggaaataccatcaaatttagaggctcggcgacgcatttcatttttcgccacatctctgtttatgcatatgcctgctgctcccaaagttcgcagtatgttgtcatttagtgtaataactccatatttcatggaagaagtgaagttttcagatgaagagcttcattcaaatcaagatgaagcatccaccctttcgtacatgcaaaagatatatccagatcaatggaaaaactttctggaacgcgttgatacaaaggtaactaatgatgaaattagatattgggcttcctaccgtggccaaacactgagccgaactgtacggggaatgatgtactacagaaaagcattgaagctacaggctctcttagacatgacaaatgatcaagatttatatgaagcacttctagcaattgagcaaggaaaaaataaaagaaatatccaccaagcattagcagctgaactagaagcacttgcagatatgaaattttcatatgtcatttcatgtcagaagtttggggaacaaaaaatcaaaggtgatccccatgctcaagacatcatagatctgatgatgaggagatttaccgtataaagctgcctggtccacctatcattggagaagggaagcctgaaaatcagaaccatgcgattatcttcactcgtggagatgctctacaaacaattgatatgaatcaagacaactatctggaagaagcttacaaaatgaggaatgtccttcaagagtttgtaaggcatcctagggacaaagctccaactatccttgggttaagagagcatatcttcactggaagtgtttcatctcttgctggcttcatgtcatatcaagagacaagctttgttacaattggacaaagatttcttgctgaaccccttagggtacggtttcactatggtcatccagacatttttgatcggatatttcatttaacaaggggcggcataagtaaagcgtctaaaactataaacttaagtgaggatgtgtttgctgggtataattccatattgcgtcgtgggaatataatttacagtgaatacattcaagttggcaaagggcgtgatgttggtcttaaccagatatccaaatttgaagctaaagtggcaaatggcaatagtgagcaaacaatcagtcgtgatattcaccggctaggtcggcgatttgatttcttcaggatgctctcatgttattttacaacagtgggattttactttaatagcctaatatcagttgttggtgtttatgttttcctctatggccagttgtacttggttctcagtggcctgcagagggctctgctacttgaagctcagactcagaatataaagtccttagaaacagcccttgcatctcagtcttttctccagctgggactgcttacaggattgcctatggtgatggagctaggtttggaaaagggtttccgtgcagctctgagtgattttatcctcatgcaattgcagttagcatcagttttcttcacattctcacttggaacaaaagcacactactacggccgtactattctccatgggggtgctaaataccggcctacagggcgtaaatttgttgttttccatgcaagctttactgagaattatcagttgtattccagaagtcattttgtcaaaggatttgagttgatcttccttttgatagtctaccacatctttaggagatcttatgttagcaatgtcgtgcatgtgatgatcacatactcaacatggtttatggcagtggcttggctgtttactccttttctttttaacccagctggttttgcttggcaaaaaattgttgacgactgggctgactggaataggtggatgaagaatcaaggaggcataggagtgcaaccagagaaaagctgggagtcatggtggaatagtgagaatgcacatctacgttactcagtattgagttctagaattcttgaagtgttgctctcactacgcttcttcatatatcaatatggacttgtttatcacctgaatatctctcaagacaacaagaatttccttgtctacctgctttcatgggtcgtaattattgccattattggttttgttaagcttgtcaattgtgctagccgtcgtttgagcacaaagcaccaactcgtcttcaggctcataaaacttttgacattcctctcagtggttacttccttggtccttctctattgtctctgtcgattatctatcatggatttgatcatctgttgtctcgcattcataccaactggctggggtctcctccttattgttcaagttttgagacccaaaatagagtactacgcagtatgggagcctattcaggtcatagctcacgcttacgactatggaatgggatctctgcttttcttcccgatcgctgtgcttgcatggatgcctgttatctcggccattcaaacccgggttcttttcaacagagcattttcccggcaactacagatccagccttttattgcaggcaaaactaaacggagatagcataaccgatggttttacatcgcatattggggatttgtgaatatgatctattggttggtcatcagagcaataagtttctgtactctggtagcataaatgtcgtgtgcagtgtgatccattattctttggcctaagcctgttccacatctaacatagtaataccttggtttcggtttttattgccgtgtaactttacatatcatttctgtaaaaaagaaacagctctagcattgctcttagatgagttgagactgatgaatctcatgatacctacacagttacaaaggtactaccttattttcatgtgaaatacgacacttattgtactactgtattattatgctttaacgtgcagtaccaaatcatttgccactgttagattcttgtgtttgattattttt

SEQ ID NO: 54454 - DNA, 3357 bp, Zea Mays
cccacctctccaaatactacagtttataaacgaacaaaaacatcggcatgaggtgacaattctgctccaagatattgttgatattgtagtccaggacatgattgtggatcctcaaagtatactgaatgtggttaactcttcaaagagattgatctctgatgatgatggagcattcagctattatgaaccagagctgtttgcatcagtcagctcaagaacaagcatccgatatccatattttgatcagcaaaaagaacaggttaaacgcttctatcttttgcttagtacaaaagaaaaggctgcggaaataccatcaaatttagaggctcggcgacgcatttcatttttcgccacatctctgtttatgcatatgcctgctgctcccaaagttcgcagtatgttgtcatttagtgtaataactccatatttcatggaagaagtgaagttttcagatgaagagcttcattcaaatcaagatgaagcatccaccctttcgtacatgcaaaagatatatccagatcaatggaaaaactttctggaacgcgttgatacaaaggtaactaatgatgaaattagatattgggcttcctaccgtggccaaacactgagccgaactgtacggggaatgatgtactacagaaaagcattgaagctacaggctctcttagacatgacaaatgatcaagatttatatgaagcacttctagcaattgagcaaggaaaaaataaaagaaatatccaccaagcattagcagctgaactagaagcacttgcagatatgaaattttcatatgtcatttcatgtcagaagtttggggaacaaaaaatcaaaggtgatccccatgctcaagacatcatagatctgatgatgaggtgccctgctctgagggttgcttatattgaagagaaggaagtcatagtaaataactgttctcatatggttgaagggaaggaagtcatagtaaataactgtccccataaggtttattcatctgtgttaataaaagcagagaataatttggaccaggagatttaccgtataaagctgcctggtccacctatcattggagaagggaagcctgaaaatcagaaccatgcgattatcttcactcgtggagatgctctacaaacaattgatatgaatcaagacaactatctggaagaagcttacaaaatgaggaatgtccttcaagagtttgtaaggcatcctagggacaaagctccaactatccttgggttaagagagcatatcttcactggaagtgtttcatctcttgctggcttcatgtcatatcaagagacaagctttgttacaattggacaaagatttcttgctgaaccccttagggtacggtttcactatggtcatccagacatttttgatcggatatttcatttaacaaggggcggcataagtaaagcgtctaaaactataaacttaagtgaggatgtgtttgctgggtataattccatattgcgtcgtgggaatataatttacagtgaatacattcaagttggcaaagggcgtgatgttggtcttaaccagatatccaaatttgaagctaaagtggcaaatggcaatagtgagcaaacaatcagtcgtgatattcaccggctaggtcggcgatttgatttcttcaggatgctctcatgttattttacaacagtgggattttactttaatagcctaatatcagttgttggtgtttatgttttcctctatggccagttgtacttggttctcagtggcctgcagagggctctgctacttgaagctcagactcagaatataaagtccttagaaacagcccttgcatctcagtcttttctccagctgggactgcttacaggattgcctatggtgatggagctaggtttggaaaagggtttccgtgcagctctgagtgattttatcctcatgcaattgcagttagcatcagttttcttcacattctcacttggaacaaaagcacactactacggccgtactattctccatgggggtgctaaataccggcctacagggcgtaaatttgttgttttccatgcaagctttactgagaattatcagttgtattccagaagtcattttgtcaaaggatttgagttgatcttccttttgatagtctaccacatctttaggagatcttatgttagcaatgtcgtgcatgtgatgatcacatactcaacatggtttatggcagtggcttggctgtttactccttttctttttaacccagctggttttgcttggcaaaaaattgttgacgactgggctgactggaataggtggatgaagaatcaaggaggcataggagtgcaaccagagaaaagctgggagtcatggtggaatagtgagaatgcacatctacgttactcagtattgagttctagaattcttgaagtgttgctctcactacgcttcttcatatatcaatatggacttgtttatcacctgaatatctctcaagacaacaagaatttccttgtctacctgctttcatgggtcgtaattattgccattattggttttgttaagcttgtcaattgtgctagccgtcgtttgagcacaaagcaccaactcgtcttcaggctcataaaacttttgacattcctctcagtggttacttccttggtccttctctattgtctctgtcgattatctatcatggatttgatcatctgttgtctcgcattcataccaactggctggggtctcctccttattgttcaagttttgagacccaaaatagagtactacgcagtatgggagcctattcaggtcatagctcacgcttacgactatggaatgggatctctgcttttcttcccgatcgctgtgcttgcatggatgcctgttatctcggccattcaaacccgggttcttttcaacagagcattttcccggcaactacagatccagccttttattgcaggcaaaactaaacggagatagcataaccgatggttttacatcgcatattggggatttgtgaatatgatctattggttggtcatcagagcaataagtttctgtactctggtagcataaatgtcgtgtgcagtgtgatccattattctttggcctaagcctgttccacatctaacatagtaataccttggtttcggtttttattgccgtgtaactttacatatcatttctgtaaaaaagaaacagctctagcattgctcttagatgagttgagactgatgaatctcatgatacctacacagttacaaaggtactaccttattttcatgtgaaatacgacacttattgtactactgtattattatgctttaacgtgcagtaccaaatcatttgccactgttagattcttgtgtttgattattttt

SEQ ID NO: 54455 - DNA, 3268 bp, Zea Mays
attcaaaattcaagcctggtgattgattttcggatgaatcatttgccttcactgttccaaaaatttgaccagctggctgaacttctgtttataaacgaacaaaaacatcggcatgaggtgacaattctgctccaagatattgttgatattgtagtccaggacatgattgtggatcctcaaagtatactgaatgtggttaactcttcaaagagattgatctctgatgatgatggagcattcagctattatgaaccagagctgtttgcatcagtcagctcaagaacaagcatccgatatccatattttgatcagcaaaaagaacaggttaaacgcttctatcttttgcttagtacaaaagaaaaggctgcggaaataccatcaaatttagaggctcggcgacgcatttcatttttcgccacatctctgtttatgcatatgcctgctgctcccaaagttcgcagtatgttgtcatttagtgtaataactccatatttcatggaagaagtgaagttttcagatgaagagcttcattcaaatcaagatgaagcatccaccctttcgtacatgcaaaagatatatccagatcaatggaaaaactttctggaacgcgttgatacaaaggtaactaatgatgaaattagatattgggcttcctaccgtggccaaacactgagccgaactgtacggggaatgatgtactacagaaaagcattgaagctacaggctctcttagacatgacaaatgatcaagatttatatgaagcacttctagcaattgagcaaggaaaaaataaaagaaatatccaccaagcattagcagctgaactagaagcacttgcagatatgaaattttcatatgtcatttcatgtcagaagtttggggaacaaaaaatcaaaggtgatccccatgctcaagacatcatagatctgatgatgaggagatttaccgtataaagctgcctggtccacctatcattggagaagggaagcctgaaaatcagaaccatgcgattatcttcactcgtggagatgctctacaaacaattgatatgaatcaagacaactatctggaagaagcttacaaaatgaggaatgtccttcaagagtttgtaaggcatcctagggacaaagctccaactatccttgggttaagagagcatatcttcactggaagtgtttcatctcttgctggcttcatgtcatatcaagagacaagctttgttacaattggacaaagatttcttgctgaaccccttagggtacggtttcactatggtcatccagacatttttgatcggatatttcatttaacaaggggcggcataagtaaagcgtctaaaactataaacttaagtgaggatgtgtttgctgggtataattccatattgcgtcgtgggaatataatttacagtgaatacattcaagttggcaaagggcgtgatgttggtcttaaccagatatccaaatttgaagctaaagtggcaaatggcaatagtgagcaaacaatcagtcgtgatattcaccggctaggtcggcgatttgatttcttcaggatgctctcatgttattttacaacagtgggattttactttaatagcctaatatcagttgttggtgtttatgttttcctctatggccagttgtacttggttctcagtggcctgcagagggctctgctacttgaagctcagactcagaatataaagtccttagaaacagcccttgcatctcagtcttttctccagctgggactgcttacaggattgcctatggtgatggagctaggtttggaaaagggtttccgtgcagctctgagtgattttatcctcatgcaattgcagttagcatcagttttcttcacattctcacttggaacaaaagcacactactacggccgtactattctccatgggggtgctaaataccggcctacagggcgtaaatttgttgttttccatgcaagctttactgagaattatcagttgtattccagaagtcattttgtcaaaggatttgagttgatcttccttttgatagtctaccacatctttaggagatcttatgttagcaatgtcgtgcatgtgatgatcacatactcaacatggtttatggcagtggcttggctgtttactccttttctttttaacccagctggttttgcttggcaaaaaattgttgacgactgggctgactggaataggtggatgaagaatcaaggaggcataggagtgcaaccagagaaaagctgggagtcatggtggaatagtgagaatgcacatctacgttactcagtattgagttctagaattcttgaagtgttgctctcactacgcttcttcatatatcaatatggacttgtttatcacctgaatatctctcaagacaacaagaatttccttgtctacctgctttcatgggtcgtaattattgccattattggttttgttaagcttgtcaattgtgctagccgtcgtttgagcacaaagcaccaactcgtcttcaggctcataaaacttttgacattcctctcagtggttacttccttggtccttctctattgtctctgtcgattatctatcatggatttgatcatctgttgtctcgcattcataccaactggctggggtctcctccttattgttcaagttttgagacccaaaatagagtactacgcagtatgggagcctattcaggtcatagctcacgcttacgactatggaatgggatctctgcttttcttcccgatcgctgtgcttgcatggatgcctgttatctcggccattcaaacccgggttcttttcaacagagcattttcccggcaactacagatccagccttttattgcaggcaaaactaaacggagatagcataaccgatggttttacatcgcatattggggatttgtgaatatgatctattggttggtcatcagagcaataagtttctgtactctggtagcataaatgtcgtgtgcagtgtgatccattattctttggcctaagcctgttccacatctaacatagtaataccttggtttcggtttttattgccgtgtaactttacatatcatttctgtaaaaaagaaacagctctagcattgctcttagatgagttgagactgatgaatctcatgatacctacacagttacaaaggtactaccttattttcatgtgaaatacgacacttattgtactactgtattattatgctttaacgtgcagtaccaaatcatttgccactgttagattcttgtgtttgattattttt

SEQ ID NO: 54456 - DNA, 5321 bp, Zea Mays
atgggtgtacctacccatccgtccctatggtgggaagaagcccatgcaaagatttcaaaaaatgatagaagtcgatttaatggggtgatgtcatatgagctatatggagtgctctctggggctgaatcacaaaagaacaagaacggggcatctgatcactcaacatggagaaactatgatgacctcaatgaattcttctggtctgctgattgctttaagcttggttggcccatgcgtcttaacaatgatttctttttcacatcaagtgcaactaaggactctcaggttctttgcggatcaagattatcaaaggtgccacatggccttgaaaactgtgctagctgtgttccactagtgtcactacacacatctcagcagaatgagcaactaaattcccaactgcctcctgaatcatcatcaacagaaaactatcttaattcagaagcagctgaacaaagacaacagcaagctatgagttccagttctcaacagagatggttgggaaaaacgaattttgttgaggtccgttctttttggcatctcttcagaagctttgataggatgtggacactccttgtgcttgggcttcaggttctgataataatggcatggcatggattagaaagccctactcagttacttgatccaataatttttgaggatattctaagtattttcatcacgaatgcagtacttcgagttattcaagtcatccttgacattgctttctcatggagaaccaagggaacaatgagagttgaccagatactgagatttactataaaactctctctggtggtggcatgggcgattattcttcctgtattttatgctaattctcaaaactataaggcttgctcaactaaacgctctaaaacctttttgggaatgttctgcttgtcaaaatatatggtggttgttgcattgtaccttgcaagcaatgtggttggtatggcattattttttgtcccagctgtcaccaactacatagagacatctacatggagaatttgcaatgtgttgtcatggtggtgtcagccacaattatacgttggacgaggaatgcaagaaggactcgtatctatactgaagtacacaactttttggactattctattgtcatgcaaatttttattcagctactactttgagattaagccacttgtgggaccaacgaaagaaattatgaagatcaatgtgaacagatatgagtggcatgaattttttccacaagtcaagagtaatgctggcgctattcttgctgtatgggctcctataattcttgtctattttatggacacacaaatatggtattcggtattctgtactattttcggtggtatgtgtggtattatccatcatcttggtgagattcgcacaatgggaatggtgagaagtcggttttattccttaccagaagccttcagtatgtctctttgtcctcctgcaacaccaatacagagaaagggaatgttttttagtttcttggagaagagaattttcaagaaattaggtaaagatgaaagatattacccaagaaagtttgcgctggtttggaacaatataataagtagcttccgttctgaggatttaataagtaatagagagatggaattgatgacaatgcccatgacaccaatgcataattctggttctatctgttggccattgtttttacttgctaaaaagttttcagaagcagtggatatggcagcaaattttactggaaaaagtgctcaactcttctggatgattaagaaggatcactacatgttttgttctataaatgaattctatgaactgacaaaaaatattttcagatttcttattatcggggagacagagaggagattgtattcagggtggtagctgccatatttgatgaaatagataagagtattcaaaattcaagcctggtgattgattttcggatgaatcatttgccttcactgttccaaaaatttgaccagctggctgaacttctggtttataaacgaacaaaaacatcggcatgaggtgacaattctgctccaagatattgttgatattgtagtccaggacatgattgtggatcctcaaagtatactgaatgtggttaactcttcaaagagattgatctctgatgatgatggagcattcagctattatgaaccagagctgtttgcatcagtcagctcaagaacaagcatccgatatccatattttgatcagcaaaaagaacaggttaaacgcttctatcttttgcttagtacaaaagaaaaggctgcggaaataccatcaaatttagaggctcggcgacgcatttcatttttcgccacatctctgtttatgcatatgcctgctgctcccaaagttcgcagtatgttgtcatttagtgtaataactccatatttcatggaagaagtgaagttttcagatgaagagcttcattcaaatcaagatgaagcatccaccctttcgtacatgcaaaagatatatccagatcaatggaaaaactttctggaacgcgttgatacaaaggtaactaatgatgaaattagatattgggcttcctaccgtggccaaacactgagccgaactgtacggggaatgatgtactacagaaaagcattgaagctacaggctctcttagacatgacaaatgatcaagatttatatgaagcacttctagcaattgagcaaggaaaaaataaaagaaatatccaccaagcattagcagctgaactagaagcacttgcagatatgaaattttcatatgtcatttcatgtcagaagtttggggaacaaaaaatcaaaggtgatccccatgctcaagacatcatagatctgatgatgaggtgccctgctctgagggttgcttatattgaagagaaggaagtcatagtaaataactgttctcatatggttgaagggaaggaagtcatagtaaataactgtccccataaggtttattcatctgtgttaataaaagcagagaataatttggaccaggagatttaccgtataaagctgcctggtccacctatcattggagaagggaagcctgaaaatcagaaccatgcgattatcttcactcgtggagatgctctacaaacaattgatatgaatcaagacaactatctggaagaagcttacaaaatgaggaatgtccttcaagagtttgtaaggcatcctagggacaaagctccaactatccttgggttaagagagcatatcttcactggaagtgtttcatctcttgctggcttcatgtcatatcaagagacaagctttgttacaattggacaaagatttcttgctgaaccccttagggtacggtttcactatggtcatccagacatttttgatcggatatttcatttaacaaggggcggcataagtaaagcgtctaaaactataaacttaagtgaggatgtgtttgctgggtataattccatattgcgtcgtgggaatataatttacagtgaatacattcaagttggcaaagggcgtgatgttggtcttaaccagatatccaaatttgaagctaaagtggcaaatggcaatagtgagcaaacaatcagtcgtgatattcaccggctaggtcggcgatttgatttcttcaggatgctctcatgttattttacaacagtgggattttactttaatagcctaatatcagttgttggtgtttatgttttcctctatggccagttgtacttggttctcagtggcctgcagagggctctgctacttgaagctcagactcagaatataaagtccttagaaacagcccttgcatctcagtcttttctccagctgggactgcttacaggattgcctatggtgatggagctaggtttggaaaagggtttccgtgcagctctgagtgattttatcctcatgcaattgcagttagcatcagttttcttcacattctcacttggaacaaaagcacactactacggccgtactattctccatgggggtgctaaataccggcctacagggcgtaaatttgttgttttccatgcaagctttactgagaattatcagttgtattccagaagtcattttgtcaaaggatttgagttgatcttccttttgatagtctaccacatctttaggagatcttatgttagcaatgtcgtgcatgtgatgatcacatactcaacatggtttatggcagtggcttggctgtttactccttttctttttaacccagctggttttgcttggcaaaaaattgttgacgactgggctgactggaataggtggatgaagaatcaaggaggcataggagtgcaaccagagaaaagctgggagtcatggtggaatagtgagaatgcacatctacgttactcagtattgagttctagaattcttgaagtgttgctctcactacgcttcttcatatatcaatatggacttgtttatcacctgaatatctctcaagacaacaagaatttccttgtctacctgctttcatgggtcgtaattattgccattattggttttgttaagcttgtcaattgtgctagccgtcgtttgagcacaaagcaccaactcgtcttcaggctcataaaacttttgacattcctctcagtggttacttccttggtccttctctattgtctctgtcgattatctatcatggatttgatcatctgttgtctcgcattcataccaactggctggggtctcctccttattgttcaagttttgagacccaaaatagagtactacgcagtatgggagcctattcaggtcatagctcacgcttacgactatggaatgggatctctgcttttcttcccgatcgctgtgcttgcatggatgcctgttatctcggccattcaaacccgggttcttttcaacagagcattttcccggcaactacagatccagccttttattgcaggcaaaactaaacggagatagcataaccgatggttttacatcgcatattggggatttgtgaatatgatctattggttggtcatcagagcaataagtttctgtactctggtagcataaatgtcgtgtgcagtgtgatccattattctttggcctaagcctgttccacatctaacatagtaataccttggtttcggtttttattgccgtgtaactttacatatcatttctgtaaaaaagaaacagctctagcattgctcttagatgagttgagactgatgaatctcatgatacctacacagttacaaaggtactaccttattttcatgtgaaatacgacacttattgtactactgtattattatgctttaacgtgcagtaccaaatcatttgccactgttagattcttgtgtttgattattttt

SEQ ID NO: 54457 - DNA, 6034 bp, Zea Mays
atggagctggagatcgtcgaggtgggcccgtccagccgcccgctgcaatacgtctctcgcccgccacttccacctccaccgccgccgccgccaccgccaccattgcagcagcagcagcaaggggaagcaggggacgccaatgcggcgccgcccctggtgcagcatttcgacagcgagaagctcccgcagacgctcgtctccgagatccgccccttcctgcgcgccgccaacgacatcgaggccgagaatccgcgcgtcgcgtacctgtatcaaagttgcagtcgctgctgtgtttagtgttcgcagtcttccatcagtcaacatgaaggatgaaaaaaatcatacagatattcttcggtggctgcaaagttggtttggattccagaaaggaaatgtcgccaaccaaagggagcatctaattctattgcttgcaaatatgcatgctagattgaatcccaagtcatcctccgctcaaatgcttgatgacagagcagtagatgaattgttggcaaagacatttgagaactatttgacctggtgcaaatttttggggagaagaagcaacatatggttgccctctgtgaagcaagaaattcagcagcataaacttctatacatagctctttatcttcttatatggggagaagcatcaaacttacggttaatgccagaatgcttatgctatatttttcatcatatgtcatatgagctatatggagtgctctctggggctgtaagtttaattactggggaaaaagtccgacctgcatatggaggagatgatgaatcatttcttaacaatgtagtgaagccaatatacaatgtcatatttcaggaatcacaaaagaacaagaacggggcatctgatcactcaacatggagaaactatgatgacctcaatgaattcttctggtctgctgattgctttaagcttggttggcccatgcgtcttaacaatgatttctttttcacatcaagtgcaactaaggactctcaggttctttgcggatcaagattatcaaaggtgccacatggccttgaaaactgtgctagctgtgttccactagtgtcactacacacatctcagcagaatgagcaactaaattcccaactgcctcctgaatcatcatcaacagaaaactatcttaattcagaagcagctgaacaaagacaacagcaagctatgagttccagttctcaacagagatggttgggaaaaacgaattttgttgaggtccgttctttttggcatctcttcagaagctttgataggatgtggacactccttgtgcttgggcttcaggttctgataataatggcatggcatggattagaaagccctactcagttacttgatccaataatttttgaggatattctaagtattttcatcacgaatgcagtacttcgagttattcaagtcatccttgacattgctttctcatggagaaccaagggaacaatgagagttgaccagatactgagatttactataaaactctctctggtggtggcatgggcgattattcttcctgtattttatgctaattctcaaaactataaggcttgctcaactaaacgctctaaaacctttttgggaatgttctgcttgtcaaaatatatggtggttgttgcattgtaccttgcaagcaatgtggttggtatggcattattttttgtcccagctgtcaccaactacatagagacatctacatggagaatttgcaatgtgttgtcatggtggtgtcagccacaattatacgttggacgaggaatgcaagaaggactcgtatctatactgaagtacacaactttttggactattctattgtcatgcaaatttttattcagctactactttgagagattaagccacttgtgggaccaacgaaagaaattatgaagatcaatgtgaacagatatgagtggcatgaattttttccacaagtcaagagtaatgctggcgctattcttgctgtatgggctcctataattcttgtctattttatggacacacaaatatggtattcggtattctgtactattttcggtggtatgtgtggtattatccatcatcttggtgagattcgcacaatgggaatggtgagaagtcggttttattccttaccagaagccttcagtatgtctctttgtcctcctgcaacaccaatacagagaaagggaatgttttttagtttcttggagaagagaattttcaagaaattaggtaaagatgaaagatattacccaagaaagtttgcgctggtttggaacaatataataagtagcttccgttctgaggatttaataagtaatagagagatggaattgatgacaatgcccatgacaccaatgcataattctggttctatctgttggccattgtttttacttgctaaaaagttttcagaagcagtggatatggcagcaaattttactggaaaaagtgctcaactcttctggatgattaagaaggatcactacatgttttgttctataaatgaattctatgaactgacaaaaaatattttcagatttcttattatcggggagacagagaggagattgtattcagggtggtagctgccatatttgatgaaatagataagagtattcaaaattcaagcctggtgattgattttcggatgaatcatttgccttcactgttccaaaaatttgaccagctggctgaacttctgtttataaacgaacaaaaacatcggcatgaggtgacaattctgctccaagatattgttgatattgtagtccaggacatgattgtggatcctcaaagtatactgaatgtggttaactcttcaaagagattgatctctgatgatgatggagcattcagctattatgaaccagagctgtttgcatcagtcagctcaagaacaagcatccgatatccatattttgatcagcaaaaagaacaggttaaacgcttctatcttttgcttagtacaaaagaaaaggctgcggaaataccatcaaatttagaggctcggcgacgcatttcatttttcgccacatctctgtttatgcatatgcctgctgctcccaaagttcgcagtatgttgtcatttagtgtaataactccatatttcatggaagaagtgaagttttcagatgaagagcttcattcaaatcaagatgaagcatccaccctttcgtacatgcaaaagatatatccagatcaatggaaaaactttctggaacgcgttgatacaaaggtaactaatgatgaaattagatattgggcttcctaccgtggccaaacactgagccgaactgtacggggaatgatgtactacagaaaagcattgaagctacaggctctcttagacatgacaaatgatcaagatttatatgaagcacttctagcaattgagcaaggaaaaaataaaagaaatatccaccaagcattagcagctgaactagaagcacttgcagatatgaaattttcatatgtcatttcatgtcagaagtttggggaacaaaaaatcaaaggtgatccccatgctcaagacatcatagatctgatgatgaggtgccctgctctgagggttgcttatattgaagagaaggaagtcatagtaaataactgttctcatatggttgaagggaaggaagtcatagtaaataactgtccccataaggtttattcatctgtgttaataaaagcagagaataatttggaccaggagatttaccgtataaagctgcctggtccacctatcattggagaagggaagcctgaaaatcagaaccatgcgattatcttcactcgtggagatgctctacaaacaattgatatgaatcaagacaactatctggaagaagcttacaaaatgaggaatgtccttcaagagtttgtaaggcatcctagggacaaagctccaactatccttgggttaagagagcatatcttcactggaagtgtttcatctcttgctggcttcatgtcatatcaagagacaagctttgttacaattggacaaagatttcttgctgaaccccttagggtacggtttcactatggtcatccagacatttttgatcggatatttcatttaacaaggggcggcataagtaaagcgtctaaaactataaacttaagtgaggatgtgtttgctgggtataattccatattgcgtcgtgggaatataatttacagtgaatacattcaagttggcaaagggcgtgatgttggtcttaaccagatatccaaatttgaagctaaagtggcaaatggcaatagtgagcaaacaatcagtcgtgatattcaccggctaggtcggcgatttgatttcttcaggatgctctcatgttattttacaacagtgggattttactttaatagcctaatatcagttgttggtgtttatgttttcctctatggccagttgtacttggttctcagtggcctgcagagggctctgctacttgaagctcagactcagaatataaagtccttagaaacagcccttgcatctcagtcttttctccagctgggactgcttacaggattgcctatggtgatggagctaggtttggaaaagggtttccgtgcagctctgagtgattttatcctcatgcaattgcagttagcatcagttttcttcacattctcacttggaacaaaagcacactactacggccgtactattctccatgggggtgctaaataccggcctacagggcgtaaatttgttgttttccatgcaagctttactgagaattatcagttgtattccagaagtcattttgtcaaaggatttgagttgatcttccttttgatagtctaccacatctttaggagatcttatgttagcaatgtcgtgcatgtgatgatcacatactcaacatggtttatggcagtggcttggctgtttactccttttctttttaacccagctggttttgcttggcaaaaaattgttgacgactgggctgactggaataggtggatgaagaatcaaggaggcataggagtgcaaccagagaaaagctgggagtcatggtggaatagtgagaatgcacatctacgttactcagtattgagttctagaattcttgaagtgttgctctcactacgcttcttcatatatcaatatggacttgtttatcacctgaatatctctcaagacaacaagaatttccttgtctacctgctttcatgggtcgtaattattgccattattggttttgttaagcttgtcaattgtgctagccgtcgtttgagcacaaagcaccaactcgtcttcaggctcataaaacttttgacattcctctcagtggttacttccttggtccttctctattgtctctgtcgattatctatcatggatttgatcatctgttgtctcgcattcataccaactggctggggtctcctccttattgttcaagttttgagacccaaaatagagtactacgcagtatgggagcctattcaggtcatagctcacgcttacgactatggaatgggatctctgcttttcttcccgatcgctgtgcttgcatggatgcctgttatctcggccattcaaacccgggttcttttcaacagagcattttcccggcaactacagatccagccttttattgcaggcaaaactaaacggagatagcataaccgatggttttacatcgcatattggggatttgtgaatatgatctattggttggtcatcagagcaataagtttctgtactctggtagcataaatgtcgtgtgcagtgtgatccattattctttggcctaagcctgttccacatctaacatagtaataccttggtttcggtttttattgccgtgtaactttacatatcatttctgtaaaaaagaaacagctctagcattgctcttagatgagttgagactgatgaatctcatgatacctacacagttacaaaggtactaccttattttcatgtgaaatacgacacttattgtactactgtattattatgctttaacgtgcagtaccaaatcatttgccactgttagattcttgtgtttgattattttt

SEQ ID NO: 54458 - DNA, 6682 bp, Zea Mays
ccgcctttcccgcactcgccttgcttcgcctcctgcgttccccgtcttcctctgctccatccccaccaatccccagcaccccaaacgcaggcgatcgatcgccaaaaggcaaaagccgcccgcctcgatctacgcccgctgcagaaaaaagcggtaaagcttagcggcgaaggcgatccccaaagccaaagcgaggagataaaaaccgagtgatcgcgattcgcgatggcgttgctgaatgctggccctgccgccgcattggcctcctcgtcctcctcctctcccgctccatgccgcgcggaacgatggagctggagatcgtcgaggtgggcccgtccagccgcccgctgcaatacgtctctcgcccgccacttccacctccaccgccgccgccgccaccgccaccattgcagcagcagcagcaaggggaagcaggggacgccaatgcggcgccgcccctggtgcagcatttcgacagcgagaagctcccgcagacgctcgtctccgagatccgccccttcctgcgcgccgccaacgacatcgaggccgagaatccgcgcgtcgcgtacctgtgtcggttccatgcattcgaaaaggctcatacaatggataaactttcagcagggaggggtgttcggcaatttaaaacagcacttctacggagacttgagcaggatgagagcagcactaaatcaaaaatgacacaaagaggtgatgcccgagagatgaagtcattctatgagaagaaaaagaaagccaatgcacatgaacacttgcctgtcctggcagaagtgctgaaggctcttctcagcggaactggcttggaggttggccttgttgctagtgaagattttgcagacttatttcgatataatatacttccactccatcctaggtcaagtcaaaaaccaattatgcttctcccagagatcaaagttgcagtcgctgctgtgtttagtgttcgcagtcttccatcagtcaacatgaaggatgaaaaaaatcatacagatattcttcggtggctgcaaagttggtttggattccagaaaggaaatgtcgccaaccaaagggagcatctaattctattgcttgcaaatatgcatgctagattgaatcccaagtcatcctccgctcaaatgcttgatgacagagcagtagatgaattgttggcaaagacatttgagaactatttgacctggtgcaaatttttggggagaagaagcaacatatggttgccctctgtgaagcaagaaattcagcagcataaacttctatacatagctctttatcttcttatatggggagaagcatcaaacttacggttaatgccagaatgcttatgctatatttttcatcatatgtcatatgagctatatggagtgctctctggggctgtaagtttaattactggggaaaaagtccgacctgcatatggaggagatgatgaatcatttcttaacaatgtagtgaagccaatatacaatgtcatatttcaggaatcacaaaagaacaagaacggggcatctgatcactcaacatggagaaactatgatgacctcaatgaattcttctggtctgctgattgctttaagcttggttggcccatgcgtcttaacaatgatttctttttcacatcaagtgcaactaaggactctcaggttctttgcggatcaagattatcaaaggtgccacatggccttgaaaactgtgctagctgtgttccactagtgtcactacacacatctcagcagaatgagcaactaaattcccaactgcctcctgaatcatcatcaacagaaaactatcttaattcagaagcagctgaacaaagacaacagcaagctatgagttccagttctcaacagagatggttgggaaaaacgaattttgttgaggtccgttctttttggcatctcttcagaagctttgataggatgtggacactccttgtgcttgggcttcaggttctgataataatggcatggcatggattagaaagccctactcagttacttgatccaataatttttgaggatattctaagtattttcatcacgaatgcagtacttcgagttattcaagtcatccttgacattgctttctcatggagaaccaagggaacaatgagagttgaccagatactgagatttactataaaactctctctggtggtggcatgggcgattattcttcctgtattttatgctaattctcaaaactataaggcttgctcaactaaacgctctaaaacctttttgggaatgttctgcttgtcaaaatatatggtggttgttgcattgtaccttgcaagcaatgtggttggtatggcattattttttgtcccagctgtcaccaactacatagagacatctacatggagaatttgcaatgtgttgtcatggtggtgtcagccacaattatacgttggacgaggaatgcaagaaggactcgtatctatactgaagtacacaactttttggactattctattgtcatgcaaatttttattcagctactactttgagattaagccacttgtgggaccaacgaaagaaattatgaagatcaatgtgaacagatatgagtggcatgaattttttccacaagtcaagagtaatgctggcgctattcttgctgtatgggctcctataattcttgtctattttatggacacacaaatatggtattcggtattctgtactattttcggtggtatgtgtggtattatccatcatcttggtgagattcgcacaatgggaatggtgagaagtcggttttattccttaccagaagccttcagtatgtctctttgtcctcctgcaacaccaatacagagaaagggaatgttttttagtttcttggagaagagaattttcaagaaattaggtaaagatgaaagatattacccaagaaagtttgcgctggtttggaacaatataataagtagcttccgttctgaggatttaataagtaatagagagatggaattgatgacaatgcccatgacaccaatgcataattctggttctatctgttggccattgtttttacttgctaaaaagttttcagaagcagtggatatggcagcaaattttactggaaaaagtgctcaactcttctggatgattaagaaggatcactacatgttttgttctataaatgaattctatgaactgacaaaaaatattttcagatttcttattatcggggagacagagaggagggtggtagctgccatatttgatgaaatagataagagtattcaaaattcaagcctggtgattgattttcggatgaatcatttgccttcactgttccaaaaatttgaccagctggctgaacttctgtttataaacgaacaaaaacatcggcatgaggtgacaattctgctccaagatattgttgatattgtagtccaggacatgattgtggatcctcaaagtatactgaatgtggttaactcttcaaagagattgatctctgatgatgatggagcattcagctattatgaaccagagctgtttgcatcagtcagctcaagaacaagcatccgatatccatattttgatcagcaaaaagaacaggttaaacgcttctatcttttgcttagtacaaaagaaaaggctgcggaaataccatcaaatttagaggctcggcgacgcatttcatttttcgccacatctctgtttatgcatatgcctgctgctcccaaagttcgcagtatgttgtcatttagtgtaataactccatatttcatggaagaagtgaagttttcagatgaagagcttcattcaaatcaagatgaagcatccaccctttcgtacatgcaaaagatatatccagatcaatggaaaaactttctggaacgcgttgatacaaaggtaactaatgatgaaattagatattgggcttcctaccgtggccaaacactgagccgaactgtacggggaatgatgtactacagaaaagcattgaagctacaggctctcttagacatgacaaatgatcaagatttatatgaagcacttctagcaattgagcaaggaaaaaataaaagaaatatccaccaagcattagcagctgaactagaagcacttgcagatatgaaattttcatatgtcatttcatgtcagaagtttggggaacaaaaaatcaaaggtgatccccatgctcaagacatcatagatctgatgatgaggtgccctgctctgagggttgcttatattgaagagaaggaagtcatagtaaataactgttctcatatggttgaagggaaggaagtcatagtaaataactgtccccataaggtttattcatctgtgttaataaaagcagagaataatttggaccaggagatttaccgtataaagctgcctggtccacctatcattggagaagggaagcctgaaaatcagaaccatgcgattatcttcactcgtggagatgctctacaaacaattgatatgaatcaagacaactatctggaagaagcttacaaaatgaggaatgtccttcaagagtttgtaaggcatcctagggacaaagctccaactatccttgggttaagagagcatatcttcactggaagtgtttcatctcttgctggcttcatgtcatatcaagagacaagctttgttacaattggacaaagatttcttgctgaaccccttagggtacggtttcactatggtcatccagacatttttgatcggatatttcatttaacaaggggcggcataagtaaagcgtctaaaactataaacttaagtgaggatgtgtttgctgggtataattccatattgcgtcgtgggaatataatttacagtgaatacattcaagttggcaaagggcgtgatgttggtcttaaccagatatccaaatttgaagctaaagtggcaaatggcaatagtgagcaaacaatcagtcgtgatattcaccggctaggtcggcgatttgatttcttcaggatgctctcatgttattttacaacagtgggattttactttaatagcctaatatcagttgttggtgtttatgttttcctctatggccagttgtacttggttctcagtggcctgcagagggctctgctacttgaagctcagactcagaatataaagtccttagaaacagcccttgcatctcagtcttttctccagctgggactgcttacaggattgcctatggtgatggagctaggtttggaaaagggtttccgtgcagctctgagtgattttatcctcatgcaattgcagttagcatcagttttcttcacattctcacttggaacaaaagcacactactacggccgtactattctccatgggggtgctaaataccggcctacagggcgtaaatttgttgttttccatgcaagctttactgagaattatcagttgtattccagaagtcattttgtcaaaggatttgagttgatcttccttttgatagtctaccacatctttaggagatcttatgttagcaatgtcgtgcatgtgatgatcacatactcaacatggtttatggcagtggcttggctgtttactccttttctttttaacccagctggttttgcttggcaaaaaattgttgacgactgggctgactggaataggtggatgaagaatcaaggaggcataggagtgcaaccagagaaaagctgggagtcatggtggaatagtgagaatgcacatctacgttactcagtattgagttctagaattcttgaagtgttgctctcactacgcttcttcatatatcaatatggacttgtttatcacctgaatatctctcaagacaacaagaatttccttgtctacctgctttcatgggtcgtaattattgccattattggttttgttaagcttgtcaattgtgctagccgtcgtttgagcacaaagcaccaactcgtcttcaggctcataaaacttttgacattcctctcagtggttacttccttggtccttctctattgtctctgtcgattatctatcatggatttgatcatctgttgtctcgcattcataccaactggctggggtctcctccttattgttcaagttttgagacccaaaatagagtactacgcagtatgggagcctattcaggtcatagctcacgcttacgactatggaatgggatctctgcttttcttcccgatcgctgtgcttgcatggatgcctgttatctcggccattcaaacccgggttcttttcaacagagcattttcccggcaactacagatccagccttttattgcaggcaaaactaaacggagatagcataaccgatggttttacatcgcatattggggatttgtgaatatgatctattggttggtcatcagagcaataagtttctgtactctggtagcataaatgtcgtgtgcagtgtgatccattattctttggcctaagcctgttccacatctaacatagtaataccttggtttcggtttttattgccgtgtaactttacatatcatttctgtaaaaaagaaacagctctagcattgctcttagatgagttgagactgatgaatctcatgatacctacacagttacaaaggtactaccttattttcatgtgaaatacgacacttattgtactactgtattattatgctttaacgtgcagtaccaaatcatttgccactgttagattcttgtgtttgattattttt

SEQ ID NO: 54459 - DNA, 3799 bp, Zea Mays
ccgcctttcccgcactcgccttgcttcgcctcctgcgttccccgtcttcctctgctccatccccaccaatccccagcaccccaaacgcaggcgatcgatcgccaaaaggcaaaagccgcccgcctcgatctacgcccgctgcagaaaaaagcggtaaagcttagcggcgaaggcgatccccaaagccaaagcgaggagataaaaaccgagtgatcgcgattcgcgatggcgttgctgaatgctggccctgccgccgcattggcctcctcgtcctcctcctctcccgctccatgccgcgcggaacgatggagctggagatcgtcgaggtgggcccgtccagccgcccgctgcaatacgtctctcgcccgccacttccacctccaccgccgccgccgccaccgccaccattgcagcagcagcagcaaggggaagcaggggacgccaatgcggcgccgcccctggtgcagcatttcgacagcgagaagctcccgcagacgctcgtctccgagatccgccccttcctgcgcgccgccaacgacatcgaggccgagaatccgcgcgtcgcgtacctgtgtcggttccatgcattcgaaaaggctcatacaatggataaactttcagcagggaggggtgttcggcaatttaaaacagcacttctacggagacttgagcaggatgagagcagcactaaatcaaaaatgacacaaagaggtgatgcccgagagatgaagtcattctatgagaagaaaaagaaagccaatgcacatgaacacttgcctgtcctggcagaagtgctgaaggctcttctcagcggaactggcttggaggttggccttgttgctagtgaagattttgcagacttatttcgatataatatacttccactccatcctaggtcaagtcaaaaaccaattatgcttctcccagagatcaaagttgcagtcgctgctgtgtttagtgttcgcagtcttccatcagtcaacatgaaggatgaaaaaaatcatacagatattcttcggtggctgcaaagttggtttggattccagaaaggaaatgtcgccaaccaaagggagcatctaattctattgcttgcaaatatgcatgctagattgaatcccaagtcatcctccgctcaaatgcttgatgacagagcagtagatgaattgttggcaaagacatttgagaactatttgacctggtgcaaatttttggggagaagaagcaacatatggttgccctctgtgaagcaagaaattcagcagcataaacttctatacatagctctttatcttcttatatggggagaagcatcaaacttacggttaatgccagaatgcttatgctatatttttcatcatatgtcatatgagctatatggagtgctctctggggctgtaagtttaattactggggaaaaagtccgacctgcatatggaggagatgatgaatcatttcttaacaatgtagtgaagccaatatacaatgtcatatttcaggaatcacaaaagaacaagaacggggcatctgatcactcaacatggagaaactatgatgacctcaatgaattcttctggtctgctgattgctttaagcttggttggcccatgcgtcttaacaatgatttctttttcacatcaagtgcaactaaggactctcaggttctttgcggatcaagattatcaaaggtgccacatggccttgaaaactgtgctagctgtgttccactagtgtcactacacacatctcagcagaatgagcaactaaattcccaactgcctcctgaatcatcatcaacagaaaactatcttaattcagaagcagctgaacaaagacaacagcaagctatgagttccagttctcaacagagatggttgggaaaaacgaattttgttgaggtccgttctttttggcatctcttcagaagctttgataggatgtggacactccttgtgcttgggcttcaggttctgataataatggcatggcatggattagaaagccctactcagttacttgatccaataatttttgaggatattctaagtattttcatcacgaatgcagtacttcgagttattcaagtcatccttgacattgctttctcatggagaaccaagggaacaatgagagttgaccagatactgagatttactataaaactctctctggtggtggcatgggcgattattcttcctgtattttatgctaattctcaaaactataaggcttgctcaactaaacgctctaaaacctttttgggaatgttctgcttgtcaaaatatatggtggttgttgcattgtaccttgcaagcaatgtggttggtatggcattattttttgtcccagctgtcaccaactacatagagacatctacatggagaatttgcaatgtgttgtcatggtggtgtcagccacaattatacgttggacgaggaatgcaagaaggactcgtatctatactgaagtacacaactttttggactattctattgtcatgcaaatttttattcagctactactttgagattaagccacttgtgggaccaacgaaagaaattatgaagatcaatgtgaacagatatgagtggcatgaattttttccacaagtcaagagtaatgctggcgctattcttgctgtatgggctcctataattcttgtctattttatggacacacaaatatggtattcggtattctgtactattttcggtggtatgtgtggtattatccatcatcttggtgagattcgcacaatgggaatggtgagaagtcggttttattccttaccagaagccttcagtatgtctctttgtcctcctgcaacaccaatacagagaaagggaatgttttttagtttcttggagaagagaattttcaagaaattaggtaaagatgaaagatattacccaagaaagtttgcgctggtttggaacaatataataagtagcttccgttctgaggatttaataagtaatagagagatggaattgatgacaatgcccatgacaccaatgcataattctggttctatctgttggccattgtttttacttgctaaaaagttttcagaagcagtggatatggcagcaaattttactggaaaaagtgctcaactcttctggatgattaagaaggatcactacatgttttgttctataaatgaattctatgaactgacaaaaaatattttcagatttcttattatcggggagacagagaggagattgtattcagggtggtagctgccatatttgatgaaatagataagagtattcaaaattcaagcctggtgattgattttcggatgaatcatttgccttcactgttccaaaaatttgaccagctggctgaacttctgatggcaccttaattattatgaaatctttccaaaggggtctgttttgcttaaaaggaatcattcactctttttcagcttctacagagcttaagattaactttgacaaatcatgtctcctgcccatcaattaggatcaacaaaaagcagttcacttgacgacagtcttcggttgtcagattggaacttgccctttcacttatctgggcctcccattaggaataacaaagccaagagttaaagcttatctcccactcatcaacaaaatcgaaagaagattgaattcaaccagcctctggctctctctggcaggaagagtgactctggtaaactccaccttctctgctatgccaatctttgtgatgtccactctcaagttgttggctgctgttattaatgccattgatcgaattaggagttgtctttggaaagggaacgatgatg

SEQ ID NO: 54460 - DNA, 9287 bp, Zea Mays
atgaaggccacgtgtgtgagccaggcactgctggctaccctagtatgttgagtttgttggttttgatgtggtgcacagccaaggtctagagacttcagctcttgctcaaaatatccaagctagggggagaggttcagaattatctgtggtggacccttacatgtttagtccctgctcctttcattggatcaagttcaatgtactgctgaattctattgtgtagtatgcagatagggatgaggtgcataacttgagtgctagaggcttctccccactgaattatccagtcttggctgttttgggagcggtgcgtatggagtacctgtttattttgtttattaattgcagcaagggacaagatgatatttgtgtgctgtgtgctgagccagcagggtgcttgtgacaacaagccacttacatgagcctaagttgtgctggcgccctgagaatccttaatctccaagtcttggctaagctccaagatccctgccccctgcccttttatctgcctgcttgaaagaaaggctgcagtgaagttcttctccctgtctgtgtgttttagctggttgctctagtatctctgcagtttgtgttgcaagtctgagttccctccccagccacctagttgatcggctccagtgccctatggtgctctcccttgtttggtgaccacgtccaccaaaaccccacctcactatgactaggattcctcgatggatttcttccgtgtgaacaaggttgtgccgctgcagattggcgctggggacagccttcgcattgacccgttcacacgtgccattctcggtcaaattcacgcacgcaccgtaggtttatgtgatcactgaagccctctgagtccttaggcggagctttatcgcacgggttcgcgggattggtcttgccgagctgagctcgccgccaccgccatcgaaagctcggttttaggatctccacgggacaaataagtacctacctgattcgccatagtttgagggttatgtttgtgtccttgctgtcgtcggagttacatcacggtggtcgatttggcgccggctcatcgtagatttgcgtggcggtgtcgtggccgagtttgtgcaaaagcaaagaagaggggggctatgtgcatacgtcagagagacagtaaaactgtggtcgggcctcgacttaattgttttgcgcatcggggttccttgtgcaagaatacacgcgcgggcacgtgctcccgtctgtgggccgactatgcctagaaatgggccgagtgggtcagtttcagcccggctttaatgattttcctttattcatttttctgagagcttgttaattatgtcacaaattgtagaaatatggtaaaatcgtgggacaaattttatgggatgtctaaattggtaagctctctggtaaatgtgtttttgggatctttagtgcagtttacaaattttaagtaatttaagtgtgctctaaaaaggatttcaccgacgaaatgaggacacctagtaatttagtgaagtgagggacttgcttaagaaattttaagctttggatgagatataagttggattggttccctggtttaccgaagtcaattcaaattggtcactttcatcaagtgctaggttgtgtagaagtatggtatacttgtcatgtgcttattcaggagtgtttatgttccccaactctccttgtgagagtttgcatttcatatcataacataagcatacatgtatttgtaattgacttgtagaacacctaaaagaagtggtgtttgaaggagtctacttcagtgcctgctcatcaagtggatggagctatctaactaaaggttgggtagaaggatctagaacctcctctctgcaacaaaggcaagccccggtgcatgcaaccccttccttgtgtttttaaattatttttacacactttaagtctagtgaatgtgcattaggtttataggagttgcttggaaaccctttgatgcattggctaccttgaaatccattccttttatagatacttctggcgaagtatcaaaatataatttacaaaaaatgcttagccctgcttataagcagatagagtttgtcctttgcacttatgcctagctcaggtttatcctgaggaaggatgacttctacctgcaagaatattttcattgggagcatggtgggatcttactgcaaagttccctataatgctcttttcctaaggatggaagtacttaaatcgggacttgggctaggaacaggtgatgttctacccaggttagttaaggattggatgcgtatgtaggcctgttgatcaaggactatcttaactagccacatgccctggaaatgggacagggtaagcttgaacccggctattccatacatgaaaagacaatcgcgcactgggagtggagagatggcgcgagtggcacgtaccctcctggcaaaggatcgcctaaaaggggtggtgtgctctcgggtggcgcggacctgttcatgcagtggaggatccgtgggaatggtagacatatgcaagagttacgagaaacatatgtcgtgtggttagagatcctcagctaagtaaatcgattcggatcgccgttatatccccggagagtggagacttgatcgctgccctgcaacctaagtcaggatataaacattatgagtaaaaaatgatgttgtattgatgagatggtgaaattagactaggtgcaaacagagtctattaatatttaatctggcattaaaatattgaaagtaaggactcactttagtaagctttttctgcaaaagtatctaagttgattcttgctaaaagcctctccttgatttctaaatccatcatatccttgagagtctttttccttagtcgggtaagacttgcgaaagtacactccgtactcagggttttcgaacccatgttgttgtaggtgatgaggagtactctaggtgttcctgtggctggagggtgtttcctgttctgaaggaggattagttaggcttgtgtataagctttggagggttcctaccttcctgctattgtaataggttatgcactttgagtatatcaggacttataataaatgtaactcttcctatgtaataaccttcagttttagaaatgaaaagaatgttttgtaaagtcttctgctcttatctccgaagtgtgtgtatcgaatgtgattactgtaatatgcatgtatggtgggagatccttgggatgatgagttcaagttattgaactcgtgattgccttgttaagttacctggttcacgtgcataaccatctgaggtcgttaatggcaaggattggtgcatatgggcccggtaacttgggagggctgccacaaatgcttgttgtccgtcgacaagcaaaccttcctttgagctagaatttgcaggaacaaaagatgatacagatcaaaagctcaaagaagaaaatgagaggctaaagatgagcttgacacaactaaaagggaagtgcattgctcaaccttctcaagataaccgtaatcacatggtgaagaagcttgagatgagaacaaccgtggcatgcactaaatcccttaaagaaaatgtcaaggacttgaggatttccaagaagaaggaacaaaagaagaaaatcaatacctctgccaaaagcctcaatcatgcctccatgcaaggtaacatctaaggtaatgatcaagccacacttcatactaagagaagtaagaagtgtagtgaatgctttgaaaagggacactcgattaggtcatgtccctatattaaaaatgacttgattattaacaagaatgataaactttgttttaaatgctcaaagaagggacacttaattaagtcttgtcccaatttgaaacaaaaaggcataatattagaaaagaaaatattaactaaccatgtagcaagcaagaaacaaggaaagaagaaatcttcaagacttgaagatcgcctttgctacatatgccaaaagaagggacatcaatgcaaggattgtcccattggtaactatcccactcctagcttgtcaattaattctcatgtaactaggcaacccaaaattgcaacttgtgctagaaaggtaatgagtttacctagtgctaacacaaaggacgtttgggttcctagatctttgttgactaatcttgatggactcatcaagtgatgggtaccaaaatatgcttgacaagctttgcaggagaaagagatgatatgaagctttggggtgcttgagagaatcaattcaattcttattaactcaagctatcaatcttgaatgatctatatatccaagattgaccctttcaaattattatgtccaaaactcatatcatctcgaggaagatattgatgttgtaggaattaaagaattatcctgtgcggaaagatcaaggcctacaacatggaggaaagccaaaggatggtaacacttatgttttaagtgcacgtatcttaaattaccatttctcatgtgtcttgtgtagtcacatagaaaaaagaagcacttcaaatgtctttaaaaaatatgtcaccattctttggagaaatttctctcatatggtagattgcatactcatcatttctatactatggcaatctacatgctttaaattgttgcaagtgcctcatgatatgtttttcactaattatcttattattgccatgattctagatatagagagatattccaagttcttaaaaaaataaggtgtcatgtaaggaattcaaatccttaggacacttataaaaggaaaattctctctataactagaatggtgagattaatgcttttatctaaataacccaagtagtctcacttgtagagaataagtttctctttggaagtgcgtaatctaacataaaaagaaaaatcaatccaatgacttatgttgttgtgcttcttgcctaaattggatatgattcttctacattcatcgctctccgtgattgaattagatttgttcccattatcttaaggaattaactaggcttgttttataagttaaaactaagcatatatcatggaataatctaattcatattataaagtttccatgctttagtaatccacttttcattccttgtcaaaatgattacaaaaagggaaactagtgcttgtgttactaacaacgtatctcttgagcttacttatggaaatctacaaaagagaaagtgcatgtttaagtcacaagcctctagggtcactcttcaccaaaaggaagaaaggtaaaagcaaaggtatgggaactctttttcccatcaatgttatttactctaaattatcttattctacctatgtgaagaatagattctttattggacttaatttttgctaagtgttcattcaatctcgttctcataagtgcactagtccattagaatctatttcatgcctttgctatatatgttctcatattgatttgcttctaagtaatgattaataaattcaatatgaagaagtaaatttcctaagattgatcaaaatgtttaaaaggtgcatattcctttttcctaataaatgtgcactaatgttaaggagtttacttcatgtctctgtgacttatggatgatgaattgtttttatttcctatctaaagaaatcatccttcatcacatactcccttgtgctattaacatctctcttgagtattttcaataagtttggaaggaaaaagagacaactacaaagggaggacactctcatgaaagagaaggacatcaagaacaacaaacacctacttggacagtaagatcttcaaaacaatcaatggtgtggttgtaagcattctaaatctttttcattgtgagaataccgggcttaagttgtttattgcaaattttttaagccttgatcaagatgtataatgcctctccctatttgtccttaaaagtgggtgcatctatccaactaattcaaattcttgatgcatatctttagggggagtctatttctatatcttgattatgttgagactatcgctttatcttagtaatctcatatagtctcttgcatgagaataagtttctcatgaagtatgctactatatatcaatccaatctggttaaaataatgtcacctctatcaaggattgtagctttcattgctaaagtagcatatttactggattctccttttctaagcttatctaatgcatatgttgttcttttgatcacatctgttatttgtttgatcattgaataatttcaattaacacttatgtttcttagtgccgcatatactatcaatcgatatctctcttgatatgcactaagttaaaaggagaattcatgatacatttatgcaatttgtgatccatttgatatatgctaaccatgacttggagaaggatcactagttgtaaaactctctcttgtgcaaaatatttccatacatcgtcttgaatataggtcttaagcaactaagactaaggacaaagcacaatgaagagagcatctctatgcgaaggtacaaaagggtaaaactacttcctctcattcaaacatgtacctagatcttccttttctatactttctttgcacatcttgtataaaaggaagagaaagcatgtccatgcattatccctgcttcatacctagtttaacctctcaaaaatttcattcttgcattaatgcatctttgttaaaactagatgaagtgattttattgtcaaagagcttaaagcttaaccttgtaacgaggataagctacctttgttccaaaggtggatggtccttaagcctctttgaaatccttaagggtaaatgcttaagatgtttataacatgctttcataagtgcatagtctgtcttgagcatcactcttttattatgtcacattgcacttcacagtttctataacgtatatatgttctcattaaaccaaattatgtgcacgtggtatttaaggccaaaatctatattcctctcaaggcacatatttagggggagcaatctatattatatagaactgtataagcttaattgatatatctttttaaccatgtctctttcctttgataaatttgcatatttcctatctctcttgtgccaaggctaagactaatatgcttccatgagtatcttgtgtattaagtcttagattgaaagggaaatggagtattcggcaaagacatcgcttcactcaactccatcgtattatctactctttgccggtattccgccatctctccattggtataatcttcactcatatttatttgtttgccattagggagaaagtaaaagggcttatatttcactcacaagtatccgtttttggcgattcatgccaaagggggagaaagtattagcccaaagcaaaaggaccacagcaccaccaacgaattttaaaaatgaacttttcaaattggtatcttaatgtgttttcaaaagggggagaaagttctagtatcttcaaaaacttgtaaaaccctattgaacactaagaggagaatttcattaagggggagttttgtttaagtcaaaggaaaagcatttgaaacagggggagaaaatttcaagttttgaaaatgcttctttcaatctttttcatatacctttgactatttgcaaaaaggtttttgaaaagaatttaccaaagaatttgcaaaaacaaaacttgtggtgcaaatgtggtccaaaattttaaataagaagaaaacaatccatgcatatctattgaaataattatattggtttcattccaagcaacctttgcacttaccttatgcaaactagttcaattctgcacttataaatttgctttggtttgtgttggcatcaatcaccaaaaagggggagattgaaagggaaatagggtcaaaccttttcctaaatgattttggtggttgaattgctcaacacaaacaattggactaactagtttgctctagagtatatgttccacaggtgccaaaggttcacaacaaaccaatacaaagttaaaagaaagggttcaaaacaaaggagcaaaggaaaccaaagtgtgtcctggtctggcgcaccggactgtctggtgcaccaccggacagtgtccggtgcaccagggagaatcgactgtaattcacactcttcaacttcgggtttcccaggcatagctccgctataattcaccggactgtccgatgtgccactggactgtccggtgcatcagcggagcaacggctatctgcgcgcaacggtcgactcttcaaagtgaacagtgtaattcagatgtcagagcagaaggtcagaggggcaccggactgtccggtgccgcatgaggacaaagcctccaatggtcgaccagctccaagccctaacggcaggatgacatggcggcgcaccggactgtccggtcgcccatcatcagcagccttctccaacggctacaatttggttggtggctataaataccaccccaaccggccacttcaatgtgtgggagcccaagcaacattccaagtcatatagttgacatattcaagccctcccaaccatctctattcattgatccatcctatacacaaaatttagaccactacaaccaacacaagtgccacaaaagagagagcaagcaagagagagctactcgtttgagtttagcactagtgccttgtgagattcattgagagaaagtgtgttctacatcttgtgttcatttgtgcgtggagttttgactcccattgaacttcctccaaagttttggaggcttgtaaagctagcaagagacaccaaagagtgtggtgatccttgcggggtcttaagtgatccttgagaagaagaagagctcgccggtctttggtgatcggtggagagagggaaagggttaaaagagacccgtccttagtggactcctcaatggggactaggccttcgagggctgaacctcggtaaaacaaatcacccgtgtctcttatgttcatttcttgtgatttgtttgttttccctcatactaagttttcttgcactattctttgctaacattatttggtattgcttcaaagtaaattctcatttagtgaagcaacaccttgcaagaaagaacttgtgttattgctcttcttatctaagccctcttgctttattctcatagacttattagttgtattgatttatcaattccgcattatttgaaagcaatactctttacaagcaaaggacttagtttttatactccgataattgtgtatcttgttctaatcactaatcaagggatctagttggggtgtaaagttataattttcaggtttcacctatccaccccccctctaggcgactttcaggcatcatacgactacacaggttcccgttgtctattgtcag

SEQ ID NO: 54461 - DNA, 8301 bp, Zea Mays
atgaaggccacgtgtgtgagccaggcactgctggctaccctagtatgttgagtttgttggttttgatgtggtgcacagccaaggtctagagacttcagctcttgctcaaaatatccaagctagggggagaggttcagaattatctgtggtggacccttacatgtttagtccctgctcctttcattggatcaagttcaatgtactgctgaattctattgtgtagtatgcagatagggatgaggtgcataacttgagtgctagaggcttctccccactgaattatccagtcttggctgttttgggagcggtgcgtatggagtacctgtttattttgtttattaattgcagcaagggacaagatgatatttgtgtgctgtgtgctgagccagcagggtgcttgtgacaacaagccacttacatgagcctaagttgtgctggcgccctgagaatccttaatctccaagtcttggctaagctccaagatccctgccccctgcccttttatctgcctgcttgaaagaaaggctgcagtgaagttcttctccctgtctgtgtgttttagctggttgctctagtatctctgcagtttgtgttgcaagtctgagttccctccccagccacctagttgatcggctccagtgccctatggtgctctcccttgtttggtgaccacgtccaccaaaaccccacctcactatgactaggattcctcgatggatttcttccgtgtggtatttgttccatgctcaaataagaacacctaaaagaagtggtgtttgaaggagtctacttcagtgcctgctcatcaagtggatggagctatctaactaaaggttgggtagaaggatctagaacctcctctctgcaacaaaggcaagccccggtgcatgcaaccccttccttgtgtttttaaattatttttacacactttaagtctagtgaatgtgcattaggtttataggagttgcttggaaaccctttgatgcattggctaccttgaaatccattccttttatagatacttctggcgaagtatcaaaatataatttacaaaaaatgcttagccctgcttataagcagatagagtttgtcctttgcacttatgcctagctcaggtttatcctgaggaaggatgacttctacctgcaagaatattttcattgggagcatggtgggatcttactgcaaagttccctataatgctcttttcctaaggatggaagtacttaaatcgggacttgggctaggaacaggtgatgttctacccaggttagttaaggattggatgcgtatgtaggcctgttgatcaaggactatcttaactagccacatgccctggaaatgggacagggtaagcttgaacccggctattccatacatgaaaagacaatcgcgcactgggagtggagagatggcgcgagtggcacgtaccctcctggcaaaggatcgcctaaaaggggtggtgtgctctcgggtggcgcggacctgttcatgcagtggaggatccgtgggaatggtagacatatgcaagagttacgagaaacatatgtcgtgtggttagagatcctcagctaagtaaatcgattcggatcgccgttatatccccggagagtggagacttgatcgctgccctgcaacctaagtcaggatataaacattatgagtaaaaaatgatgttgtattgatgagatggtgaaattagactaggtgcaaacagagtctattaatatttaatctggcattaaaatattgaaagtaaggactcactttagtaagctttttctgcaaaagtatctaagttgattcttgctaaaagcctctccttgatttctaaatccatcatatccttgagagtctttttccttagtcgggtaagacttgcgaaagtacactccgtactcagggttttcgaacccatgttgttgtaggtgatgaggagtactctaggtgttcctgtggctggagggtgtttcctgttctgaaggaggattagttaggcttgtgtataagctttggagggttcctaccttcctgctattgtaataggttatgcactttgagtatatcaggacttataataaatgtaactcttcctatgtaataaccttcagttttagaaatgaaaagaatgttttgtaaagtcttctgctcttatctccgaagtgtgtgtatcgaatgtgattactgtaatatgcatgtatggtgggagatccttgggatgatgagttcaagttattgaactcgtgattgccttgttaagttacctggttcacgtgcataaccatctgaggtcgttaatggcaaggattggtgcatatgggcccggtaacttgggagggctgccacaaatgcttgttgtccgtcgacaagcaaaccttcctttgagctagaatttgcaggaacaaaagatgatacagatcaaaagctcaaagaagaaaatgagaggctaaagatgagcttgacacaactaaaagggaagtgcattgctcaaccttctcaagataaccgtaatcacatggtgaagaagcttgagatgagaacaaccgtggcatgcactaaatcccttaaagaaaatgtcaaggacttgaggatttccaagaagaaggaacaaaagaagaaaatcaatacctctgccaaaagcctcaatcatgcctccatgcaaggtaacatctaaggtaatgatcaagccacacttcatactaagagaagtaagaagtgtagtgaatgctttgaaaagggacactcgattaggtcatgtccctatattaaaaatgacttgattattaacaagaatgataaactttgttttaaatgctcaaagaagggacacttaattaagtcttgtcccaatttgaaacaaaaaggcataatattagaaaagaaaatattaactaaccatgtagcaagcaagaaacaaggaaagaagaaatcttcaagacttgaagatcgcctttgctacatatgccaaaagaagggacatcaatgcaaggattgtcccattggtaactatcccactcctagcttgtcaattaattctcatgtaactaggcaacccaaaattgcaacttgtgctagaaaggtaatgagtttacctagtgctaacacaaaggacgtttgggttcctagatctttgttgactaatcttgatggactcatcaagtgatgggtaccaaaatatgcttgacaagctttgcaggagaaagagatgatatgaagctttggggtgcttgagagaatcaattcaattcttattaactcaagctatcaatcttgaatgatctatatatccaagattgaccctttcaaattattatgtccaaaactcatatcatctcgaggaagatattgatgttgtaggaattaaagaattatcctgtgcggaaagatcaaggcctacaacatggaggaaagccaaaggatggtaacacttatgttttaagtgcacgtatcttaaattaccatttctcatgtgtcttgtgtagtcacatagaaaaaagaagcacttcaaatgtctttaaaaaatatgtcaccattctttggagaaatttctctcatatggtagattgcatactcatcatttctatactatggcaatctacatgctttaaattgttgcaagtgcctcatgatatgtttttcactaattatcttattattgccatgattctagatatagagagatattccaagttcttaaaaaaataaggtgtcatgtaaggaattcaaatccttaggacacttataaaaggaaaattctctctataactagaatggtgagattaatgcttttatctaaataacccaagtagtctcacttgtagagaataagtttctctttggaagtgcgtaatctaacataaaaagaaaaatcaatccaatgacttatgttgttgtgcttcttgcctaaattggatatgattcttctacattcatcgctctccgtgattgaattagatttgttcccattatcttaaggaattaactaggcttgttttataagttaaaactaagcatatatcatggaataatctaattcatattataaagtttccatgctttagtaatccacttttcattccttgtcaaaatgattacaaaaagggaaactagtgcttgtgttactaacaacgtatctcttgagcttacttatggaaatctacaaaagagaaagtgcatgtttaagtcacaagcctctagggtcactcttcaccaaaaggaagaaaggtaaaagcaaaggtatgggaactctttttcccatcaatgttatttactctaaattatcttattctacctatgtgaagaatagattctttattggacttaatttttgctaagtgttcattcaatctcgttctcataagtgcactagtccattagaatctatttcatgcctttgctatatatgttctcatattgatttgcttctaagtaatgattaataaattcaatatgaagaagtaaatttcctaagattgatcaaaatgtttaaaaggtgcatattcctttttcctaataaatgtgcactaatgttaaggagtttacttcatgtctctgtgacttatggatgatgaattgtttttatttcctatctaaagaaatcatccttcatcacatactcccttgtgctattaacatctctcttgagtattttcaataagtttggaaggaaaaagagacaactacaaagggaggacactctcatgaaagagaaggacatcaagaacaacaaacacctacttggacagtaagatcttcaaaacaatcaatggtgtggttgtaagcattctaaatctttttcattgtgagaataccgggcttaagttgtttattgcaaattttttaagccttgatcaagatgtataatgcctctccctatttgtccttaaaagtgggtgcatctatccaactaattcaaattcttgatgcatatctttagggggagtctatttctatatcttgattatgttgagactatcgctttatcttagtaatctcatatagtctcttgcatgagaataagtttctcatgaagtatgctactatatatcaatccaatctggttaaaataatgtcacctctatcaaggattgtagctttcattgctaaagtagcatatttactggattctccttttctaagcttatctaatgcatatgttgttcttttgatcacatctgttatttgtttgatcattgaataatttcaattaacacttatgtttcttagtgccgcatatactatcaatcgatatctctcttgatatgcactaagttaaaaggagaattcatgatacatttatgcaatttgtgatccatttgatatatgctaaccatgacttggagaaggatcactagttgtaaaactctctcttgtgcaaaatatttccatacatcgtcttgaatataggtcttaagcaactaagactaaggacaaagcacaatgaagagagcatctctatgcgaaggtacaaaagggtaaaactacttcctctcattcaaacatgtacctagatcttccttttctatactttctttgcacatcttgtataaaaggaagagaaagcatgtccatgcattatccctgcttcatacctagtttaacctctcaaaaatttcattcttgcattaatgcatctttgttaaaactagatgaagtgattttattgtcaaagagcttaaagcttaaccttgtaacgaggataagctacctttgttccaaaggtggatggtccttaagcctctttgaaatccttaagggtaaatgcttaagatgtttataacatgctttcataagtgcatagtctgtcttgagcatcactcttttattatgtcacattgcacttcacagtttctataacgtatatatgttctcattaaaccaaattatgtgcacgtggtatttaaggccaaaatctatattcctctcaaggcacatatttagggggagcaatctatattatatagaactgtataagcttaattgatatatctttttaaccatgtctctttcctttgataaatttgcatatttcctatctctcttgtgccaaggctaagactaatatgcttccatgagtatcttgtgtattaagtcttagattgaaagggaaatggagtattcggcaaagacatcgcttcactcaactccatcgtattatctactctttgccggtattccgccatctctccattggtataatcttcactcatatttatttgtttgccattagggagaaagtaaaagggcttatatttcactcacaagtatccgtttttggcgattcatgccaaagggggagaaagtattagcccaaagcaaaaggaccacagcaccaccaacgaattttaaaaatgaacttttcaaattggtatcttaatgtgttttcaaaagggggagaaagttctagtatcttcaaaaacttgtaaaaccctattgaacactaagaggagaatttcattaagggggagttttgtttaagtcaaaggaaaagcatttgaaacagggggagaaaatttcaagttttgaaaatgcttctttcaatctttttcatatacctttgactatttgcaaaaaggtttttgaaaagaatttaccaaagaatttgcaaaaacaaaacttgtggtgcaaatgtggtccaaaattttaaataagaagaaaacaatccatgcatatctattgaaataattatattggtttcattccaagcaacctttgcacttaccttatgcaaactagttcaattctgcacttataaatttgctttggtttgtgttggcatcaatcaccaaaaagggggagattgaaagggaaatagggtcaaaccttttcctaaatgattttggtggttgaattgctcaacacaaacaattggactaactagtttgctctagagtatatgttccacaggtgccaaaggttcacaacaaaccaatacaaagttaaaagaaagggttcaaaacaaaggagcaaaggaaaccaaagtgtgtcctggtctggcgcaccggactgtctggtgcaccaccggacagtgtccggtgcaccagggagaatcgactgtaattcacactcttcaacttcgggtttcccaggcatagctccgctataattcaccggactgtccgatgtgccactggactgtccggtgcatcagcggagcaacggctatctgcgcgcaacggtcgactcttcaaagtgaacagtgtaattcagatgtcagagcagaaggtcagaggggcaccggactgtccggtgccgcatgaggacaaagcctccaatggtcgaccagctccaagccctaacggcaggatgacatggcggcgcaccggactgtccggtcgcccatcatcagcagccttctccaacggctacaatttggttggtggctataaataccaccccaaccggccacttcaatgtgtgggagcccaagcaacattccaagtcatatagttgacatattcaagccctcccaaccatctctattcattgatccatcctatacacaaaatttagaccactacaaccaacacaagtgccacaaaagagagagcaagcaagagagagctactcgtttgagtttagcactagtgccttgtgagattcattgagagaaagtgtgttctacatcttgtgttcatttgtgcgtggagttttgactcccattgaacttcctccaaagttttggaggcttgtaaagctagcaagagacaccaaagagtgtggtgatccttgcggggtcttaagtgatccttgagaagaagaagagctcgccggtctttggtgatcggtggagagagggaaagggttaaaagagacccgtccttagtggactcctcaatggggactaggccttcgagggctgaacctcggtaaaacaaatcacccgtgtctcttatgttcatttcttgtgatttgtttgttttccctcatactaagttttcttgcactattctttgctaacattatttggtattgcttcaaagtaaattctcatttagtgaagcaacaccttgcaagaaagaacttgtgttattgctcttcttatctaagccctcttgctttattctcatagacttattagttgtattgatttatcaattccgcattatttgaaagcaatactctttacaagcaaaggacttagtttttatactccgataattgtgtatcttgttctaatcactaatcaagggatctagttggggtgtaaagttataattttcaggtttcacctatccaccccccctctaggcgactttcaggcatcatacgactacacaggttcccgttgtctattgtcag

SEQ ID NO: 54462 - DNA, 2146 bp, Zea Mays
gcgggaagcctatgacactggaattctggaagcaagttccgccaaatgaaccatatcgtgtcatacttggtgatgtcagggataaattgtactacacacgtgaacgttctcgtcacctattgacatctggaatttctgagattctagaggaggcaacttttactaatgttgaacagtttctggaacctcttgagctctgttatagatcattatgtgcttgtggtgacaaacctatagctgatggaagtcttcttgatttcttgcgtcaagtatcaacttttgggcttgcccttgtgaagctcgacatcaggcaggaatctgatcgacacactgatgtccttgattcgataacgacacatcttggaattggctcctatgctgaatggtctgaggagaaacgccaggattggctgttgtctgaactgaggggcaaacgtccattgtttggttcagatcttcctcagactgaagagactgctgatgttttaggcacatttcatgtccttgcagagcttcctgcagattgctttggcgcgtatatcatctctatggcaactgccccatccgatgtgcttgcggtcgagcttttgcagcgtgagtgccatgtaaaacatccactgagagttgttccactttttgagaaacttgcagatcttgaagcagctccagcagctgtagcacggctcttttcaattgactggtacatggataggattaatggcaagcaggaggtcatgattggatattcagactctggcaaagatgccgggcgtctctctgcagcatggcaaatgtataaagcacaagaagagctcatcaaagtggcaaagcattatggagtcaagttgacaatgtttcatgggaggggtggaacagttggcagaggaggtggtccaactcatctggccatattatctcagccaccagacacgatacatggatcacttcgtgtaacagttcaaggcgaagttattgagcactcctttggagaggagctcttgtgcttcagaactttgcaacgctacactgcagctactcttgagcatggcatgcatcctccgatttcccctaagccagaatggcgtgctctgatggatgaaatggctgttgtagcaactaaagaatatcgatcaattgtcttccaagaaccacgcttcgttgaatacttcagatcggctacacctgagactgaatatggtaggatgaatattggcagccgtccatcaaagaggaagcctagtgggggaatagaatcactccgtgcaattccatggatctttgcttggacacaaacaaggttccatctgcctgtctggcttggatttggtgcagcgataaagcacatcatgcagaaggacatcaggaacatccatatactgagagaaatgtacaatgagtggccattcttcagggtcacccttgatttgcttgagatggttttcgcgaagggagacccgggaatcgcagctgtgtacgacaaattgctagtggctgatgatttgcaatccttcggcgagcaactgaggaagaactatgaggagacaaaagagctactccttcaggttgctggtcacaaggacgtccttgaaggtgatccttatctgaagcagcgtctgcggctgcgtgagtcctacatcaccactctgaacgtgtgccaggcctacaccctgaagcggatacgcgacccgagcttccaggtgagcccgcagccgcccctgtccaaggagttcaccgacgagagtcagccggcggagctggtgcagctgaaccagcagagcgagtacgctccaggcctggaggacaccctcatcctgaccatgaagggcatcgccgccggcatgcagaacaccggctaggccaagatcttcggtgtgcaaataacctgtctcccatgagacggtggacgatatgtgtaggcctgtgagcagttagtacaccggcgccagtgtgttctggaggatttttcatgtcagagcctttctcttgtgtgcttgctgtagatgccaaggggagcttattggctgttgaagcctgatgcaaaataaagtacgaaactatgttttttgtttaactaataactagcaaacatgcttccgttgcattgaaactagcagcttcgtgcgtagtcatctgtggataataaaag

SEQ ID NO: 54463 - DNA, 2246 bp, Zea Mays
gtcatttttattttttattcttgtttatggttcacggagggcgggcctggtgcagcggtagagcctaccgtctgtgaccggaaggtccgggttcgagcctcagcctctgcatattatgcggaattctggaagcaagttccgccaaatgaaccatatcgtgtcatacttggtgatgtcagggataaattgtactacacacgtgaacgttctcgtcacctattgacatctggaatttctgagattctagaggaggcaacttttactaatgttgaacagtttctggaacctcttgagctctgttatagatcattatgtgcttgtggtgacaaacctatagctgatggaagtcttcttgatttcttgcgtcaagtatcaacttttgggcttgcccttgtgaagctcgacatcaggcaggaatctgatcgacacactgatgtccttgattcgataacgacacatcttggaattggctcctatgctgaatggtctgaggagaaacgccaggattggctgttgtctgaactgaggggcaaacgtccattgtttggttcagatcttcctcagactgaagagactgctgatgttttaggcacatttcatgtccttgcagagcttcctgcagattgctttggcgcgtatatcatctctatggcaactgccccatccgatgtgcttgcggtcgagcttttgcagcgtgagtgccatgtaaaacatccactgagagttgttccactttttgagaaacttgcagatcttgaagcagctccagcagctgtagcacggctcttttcaattgactggtacatggataggattaatggcaagcaggaggtcatgattggatattcagactctggcaaagatgccgggcgtctctctgcagcatggcaaatgtataaagcacaagaagagctcatcaaagtggcaaagcattatggagtcaagttgacaatgtttcatgggaggggtggaacagttggcagaggaggtggtccaactcatctggccatattatctcagccaccagacacgatacatggatcacttcgtgtaacagttcaaggcgaagttattgagcactcctttggagaggagctcttgtgcttcagaactttgcaacgctacactgcagctactcttgagcatggcatgcatcctccgatttcccctaagccagaatggcgtgctctgatggatgaaatggctgttgtagcaactaaagaatatcgatcaattgtcttccaagaaccacgcttcgttgaatacttcagatcggctacacctgagactgaatatggtaggatgaatattggcagccgtccatcaaagaggaagcctagtgggggaatagaatcactccgtgcaattccatggatctttgcttggacacaaacaaggttccatctgcctgtctggcttggatttggtgcagcgataaagcacatcatgcagaaggacatcaggaacatccatatactgagagaaatgtacaatgagtggccattcttcagggtcacccttgatttgcttgagatggttttcgcgaagggagacccgggaatcgcagctgtgtacgacaaattgctagtggctgatgatttgcaatccttcggcgagcaactgaggaagaactatgaggagacaaaagagctactccttcaggttgctggtcacaaggacgtccttgaaggtgatccttatctgaagcagcgtctgcggctgcgtgagtcctacatcaccactctgaacgtgtgccaggcctacaccctgaagcggatacgcgacccgagcttccaggtgagcccgcagccgcccctgtccaaggagttcaccgacgagagtcagccggcggagctggtgcagctgaaccagcagagcgagtacgctccaggcctggaggacaccctcatcctgaccatgaagggcatcgccgccggcatgcagaacaccggctaggccaagatcttcggtgtgcaaataacctgtctcccatgagacggtggacgatatgtgtaggcctgtgagcagttagtacaccggcgccagtgtgttctggaggatttttcatgtcagagcctttctcttgtgtgcttgctgtagatgccaaggggagcttattggctgttgaagcctgatgcaaaataaagtacgaaactatgttttttgtttaactaataactagcaaacatgcttccgttgcattgaaactagcagcttcgtgcgtagtcatctgtggataataaaag

SEQ ID NO: 54464 - DNA, 2648 bp, Zea Mays
cgtagcgttactgcgttactgtggatccgtaactgcctgaggcagctttatgccaaggacatcactgctgacgacaagcaggagcttgatgaggcacttcagagggagattcaagctgctttcagaactgatgaaatccgcagaacccctcccactcctcaagatgaaatgcgtgctggaatgagttacttccatgaaactatatggaagggtgtaccaaaattcttgcgccgtattgacaccgctctgaaaaatattgggatcaatgaacgtctcccttacaatgctcctctcattcagttctcttcctggatgggtggtgatcgtgatggaaatccaagagtaacaccagaggttacacgggatgtatgcttgttggcgagaatgatggctgctaacttgtacttctctcagattgaagatttaatgtttgagctgtctatgtggcgctgcagtgatgaacttcggatccgtgcagatgaactacatcgctcttcaagaaaagctgcaaagcactatatagaattctggaagcaagttccgccaaatgaaccatatcgtgtcatacttggtgatgtcagggataaattgtactacacacgtgaacgttctcgtcacctattgacatctggaatttctgagattctagaggaggcaacttttactaatgttgaacagtttctggaacctcttgagctctgttatagatcattatgtgcttgtggtgacaaacctatagctgatggaagtcttcttgatttcttgcgtcaagtatcaacttttgggcttgcccttgtgaagctcgacatcaggcaggaatctgatcgacacactgatgtccttgattcgataacgacacatcttggaattggctcctatgctgaatggtctgaggagaaacgccaggattggctgttgtctgaactgaggggcaaacgtccattgtttggttcagatcttcctcagactgaagagactgctgatgttttaggcacatttcatgtccttgcagagcttcctgcagattgctttggcgcgtatatcatctctatggcaactgccccatccgatgtgcttgcggtcgagcttttgcagcgtgagtgccatgtaaaacatccactgagagttgttccactttttgagaaacttgcagatcttgaagcagctccagcagctgtagcacggctcttttcaattgactggtacatggataggattaatggcaagcaggaggtcatgattggatattcagactctggcaaagatgccgggcgtctctctgcagcatggcaaatgtataaagcacaagaagagctcatcaaagtggcaaagcattatggagtcaagttgacaatgtttcatgggaggggtggaacagttggcagaggaggtggtccaactcatctggccatattatctcagccaccagacacgatacatggatcacttcgtgtaacagttcaaggcgaagttattgagcactcctttggagaggagctcttgtgcttcagaactttgcaacgctacactgcagctactcttgagcatggcatgcatcctccgatttcccctaagccagaatggcgtgctctgatggatgaaatggctgttgtagcaactaaagaatatcgatcaattgtcttccaagaaccacgcttcgttgaatacttcagatcggctacacctgagactgaatatggtaggatgaatattggcagccgtccatcaaagaggaagcctagtgggggaatagaatcactccgtgcaattccatggatctttgcttggacacaaacaaggttccatctgcctgtctggcttggatttggtgcagcgataaagcacatcatgcagaaggacatcaggaacatccatatactgagagaaatgtacaatgagtggccattcttcagggtcacccttgatttgcttgagatggttttcgcgaagggagacccgggaatcgcagctgtgtacgacaaattgctagtggctgatgatttgcaatccttcggcgagcaactgaggaagaactatgaggagacaaaagagctactccttcaggttgctggtcacaaggacgtccttgaaggtgatccttatctgaagcagcgtctgcggctgcgtgagtcctacatcaccactctgaacgtgtgccaggcctacaccctgaagcggatacgcgacccgagcttccaggtgagcccgcagccgcccctgtccaaggagttcaccgacgagagtcagccggcggagctggtgcagctgaaccagcagagcgagtacgctccaggcctggaggacaccctcatcctgaccatgaagggcatcgccgccggcatgcagaacaccggctaggccaagatcttcggtgtgcaaataacctgtctcccatgagacggtggacgatatgtgtaggcctgtgagcagttagtacaccggcgccagtgtgttctggaggatttttcatgtcagagcctttctcttgtgtgcttgctgtagatgccaaggggagcttattggctgttgaagcctgatgcaaaataaagtacgaaactatgttttttgtttaactaataactagcaaacatgcttccgttgcattgaaactagcagcttcgtgcgtagtcatctgtggataataaaag

SEQ ID NO: 54465 - DNA, 3381 bp, Zea Mays
gccacacacgatcaccatcacccccgggctcccgacccagtacaaatagacacgcacactcccaactccccacccatctccgccgcgcacaccgcccaatcagccaatctcctcctcctcctccgctctcagacgagcagcggttgccatcactctccacttcccacgcccgctgcgggctcgcaggcggcagagaattgtctgtgccgccgggtgggaatttgattcggtcggattcgctgcgccgcgatgccggagcggcaccagtccatcgacgcgcagctgcggctgctggcccccgggaaggtctccgaggacgacaagctcgtcgagtacgacgccctcctcgtcgaccgcttcctcgacatcctccaggacctgcacggcccccacctgcgcgaattcgtgcaggagtgctacgagctctcggcggagtacgagaacgaccgggatgaggctcggcttggcgagctcgggagcaagctcaccagcctgccgccgggggactccattgtcgtcgccagttccttctcgcacatgctcaacctcgctaacctcgccgaggaagtgcagatcgcgcaccgtcgccggatcaagctaaagcggggagacttcgccgacgaggcctccgcgccgacggagtcggacatcgaggagacgctcaagcgcctcgtctcgcagctcggcaagtcgcgggaggaggtcttcgacgcgctcaagaaccagaccgtcgacctcgttttcaccgcccaccctacacagtccgtgaggaggtctcttctccagaagcatggaaggatccgtaactgcctgaggcagctttatgccaaggacatcactgctgacgacaagcaggagcttgatgaggcacttcagagggagattcaagctgctttcagaactgatgaaatccgcagaacccctcccactcctcaagatgaaatgcgtgctggaatgagttacttccatgaaactatatggaagggtgtaccaaaattcttgcgccgtattgacaccgctctgaaaaatattgggatcaatgaacgtctcccttacaatgctcctctcattcagttctcttcctggatgggtggtgatcgtgatggaaatccaagagtaacaccagaggttacacgggatgtatgcttgttggcgagaatgatggctgctaacttgtacttctctcagattgaagatttaatgtttgagctgtctatgtggcgctgcagtgatgaacttcggatccgtgcagatgaactacatcgctcttcaagaaaagctgcaaagcactatatagaattctggaagcaagttccgccaaatgaaccatatcgtgtcatacttggtgatgtcagggataaattgtactacacacgtgaacgttctcgtcacctattgacatctggaatttctgagattctagaggaggcaacttttactaatgttgaacagtttctggaacctcttgagctctgttatagatcattatgtgcttgtggtgacaaacctatagctgatggaagtcttcttgatttcttgcgtcaagtatcaacttttgggcttgcccttgtgaagctcgacatcaggcaggaatctgatcgacacactgatgtccttgattcgataacgacacatcttggaattggctcctatgctgaatggtctgaggagaaacgccaggattggctgttgtctgaactgaggggcaaacgtccattgtttggttcagatcttcctcagactgaagagactgctgatgttttaggcacatttcatgtccttgcagagcttcctgcagattgctttggcgcgtatatcatctctatggcaactgccccatccgatgtgcttgcggtcgagcttttgcagcgtgagtgccatgtaaaacatccactgagagttgttccactttttgagaaacttgcagatcttgaagcagctccagcagctgtagcacggctcttttcaattgactggtacatggataggattaatggcaagcaggaggtcatgattggatattcagactctggcaaagatgccgggcgtctctctgcagcatggcaaatgtataaagcacaagaagagctcatcaaagtggcaaagcattatggagtcaagttgacaatgtttcatgggaggggtggaacagttggcagaggaggtggtccaactcatctggccatattatctcagccaccagacacgatacatggatcacttcgtgtaacagttcaaggcgaagttattgagcactcctttggagaggagctcttgtgcttcagaactttgcaacgctacactgcagctactcttgagcatggcatgcatcctccgatttcccctaagccagaatggcgtgctctgatggatgaaatggctgttgtagcaactaaagaatatcgatcaattgtcttccaagaaccacgcttcgttgaatacttcagatcgccgtccatcaaagaggaagcctagtgggggaatagaatcactccgtgcaattccatggatctttgcttggacacaaacaaggttccatctgcctgtctggcttggatttggtgcagcgataaagcacatcatgcagaaggacatcaggaacatccatatactgagagaaatgtacaatgagtggccattcttcagggtcacccttgatttgcttgagatggttttcgcgaagggagacccgggaatcgcagctgtgtacgacaaattgctagtggctgatgatttgcaatccttcggcgagcaactgaggaagaactatgaggagacaaaagagctactccttcaggttgctggtcacaaggacgtccttgaaggtgatccttatctgaagcagcgtctgcggctgcgtgagtcctacatcaccactctgaacgtgtgccaggcctacaccctgaagcggatacgcgacccgagcttccaggtgagcccgcagccgcccctgtccaaggagttcaccgacgagagtcagccggcggagctggtgcagctgaaccagcagagcgagtacgctccaggcctggaggacaccctcatcctgaccatgaagggcatcgccgccggcatgcagaacaccggctaggccaagatcttcggtgtgcaaataacctgtctcccatgagacggtggacgatatgtgtaggcctgtgagcagttagtacaccggcgccagtgtgttctggaggatttttcatgtcagagcctttctcttgtgtgcttgctgtagatgccaaggggagcttattggctgttgaagcctgatgcaaaataaagtacgaaactatgttttttgtttaactaataactagcaaacatgcttccgttgcattgaaactagcagcttcgtgcgtagtcatctgtggataataaaag

SEQ ID NO: 54466 - DNA, 3379 bp, Zea Mays
gccacacacgatcaccatcacccccgggctcccgacccagtacaaatagacacgcacactcccaactccccacccatctccgccgcgcacaccgcccaatcagccaatctcctcctcctcctccgctctcagacgagcagcggttgccatcactctccacttcccacgcccgctgcgggctcgcaggcggcagagaattgtctgtgccgccgggtgggaatttgattcggtcggattcgctgcgccgcgatgccggagcggcaccagtccatcgacgcgcagctgcggctgctggcccccgggaaggtctccgaggacgacaagctcgtcgagtacgacgccctcctcgtcgaccgcttcctcgacatcctccaggacctgcacggcccccacctgcgcgaattcgtgcaggagtgctacgagctctcggcggagtacgagaacgaccgggatgaggctcggcttggcgagctcgggagcaagctcaccagcctgccgccgggggactccattgtcgtcgccagttccttctcgcacatgctcaacctcgctaacctcgccgaggaagtgcagatcgcgcaccgtcgccggatcaagctaaagcggggagacttcgccgacgaggcctccgcgccgacggagtcggacatcgaggagacgctcaagcgcctcgtctcgcagctcggcaagtcgcgggaggaggtcttcgacgcgctcaagaaccagaccgtcgacctcgttttcaccgcccaccctacacagtccgtgaggaggtctcttctccagaagcatggaaggatccgtaactgcctgaggcagctttatgccaaggacatcactgctgacgacaagcaggagcttgatgaggcacttcagagggagattcaagctgctttcagaactgatgaaatccgcagaacccctcccactcctcaagatgaaatgcgtgctggaatgagttacttccatgaaactatatggaagggtgtaccaaaattcttgcgccgtattgacaccgctctgaaaaatattgggatcaatgaacgtctcccttacaatgctcctctcattcagttctcttcctggatgggtggtgatcgtgatggaaatccaagagtaacaccagaggttacacgggatgtatgcttgttggcgagaatgatggctgctaacttgtacttctctcagattgaagatttaatgtttgagatgaactacatcgctcttcaagaaaagctgcaaagcactatatagaattctggaagcaagttccgccaaatgaaccatatcgtgtcatacttggtgatgtcagggataaattgtactacacacgtgaacgttctcgtcacctattgacatctggaatttctgagattctagaggaggcaacttttactaatgttgaacagtttctggaacctcttgagctctgttatagatcattatgtgcttgtggtgacaaacctatagctgatggaagtcttcttgatttcttgcgtcaagtatcaacttttgggcttgcccttgtgaagctcgacatcaggcaggaatctgatcgacacactgatgtccttgattcgataacgacacatcttggaattggctcctatgctgaatggtctgaggagaaacgccaggattggctgttgtctgaactgaggggcaaacgtccattgtttggttcagatcttcctcagactgaagagactgctgatgttttaggcacatttcatgtccttgcagagcttcctgcagattgctttggcgcgtatatcatctctatggcaactgccccatccgatgtgcttgcggtcgagcttttgcagcgtgagtgccatgtaaaacatccactgagagttgttccactttttgagaaacttgcagatcttgaagcagctccagcagctgtagcacggctcttttcaattgactggtacatggataggattaatggcaagcaggaggtcatgattggatattcagactctggcaaagatgccgggcgtctctctgcagcatggcaaatgtataaagcacaagaagagctcatcaaagtggcaaagcattatggagtcaagttgacaatgtttcatgggaggggtggaacagttggcagaggaggtggtccaactcatctggccatattatctcagccaccagacacgatacatggatcacttcgtgtaacagttcaaggcgaagttattgagcactcctttggagaggagctcttgtgcttcagaactttgcaacgctacactgcagctactcttgagcatggcatgcatcctccgatttcccctaagccagaatggcgtgctctgatggatgaaatggctgttgtagcaactaaagaatatcgatcaattgtcttccaagaaccacgcttcgttgaatacttcagatcggctacacctgagactgaatatggtaggatgaatattggcagccgtccatcaaagaggaagcctagtgggggaatagaatcactccgtgcaattccatggatctttgcttggacacaaacaaggttccatctgcctgtctggcttggatttggtgcagcgataaagcacatcatgcagaaggacatcaggaacatccatatactgagagaaatgtacaatgagtggccattcttcagggtcacccttgatttgcttgagatggttttcgcgaagggagacccgggaatcgcagctgtgtacgacaaattgctagtggctgatgatttgcaatccttcggcgagcaactgaggaagaactatgaggagacaaaagagctactccttcaggttgctggtcacaaggacgtccttgaaggtgatccttatctgaagcagcgtctgcggctgcgtgagtcctacatcaccactctgaacgtgtgccaggcctacaccctgaagcggatacgcgacccgagcttccaggtgagcccgcagccgcccctgtccaaggagttcaccgacgagagtcagccggcggagctggtgcagctgaaccagcagagcgagtacgctccaggcctggaggacaccctcatcctgaccatgaagggcatcgccgccggcatgcagaacaccggctaggccaagatcttcggtgtgcaaataacctgtctcccatgagacggtggacgatatgtgtaggcctgtgagcagttagtacaccggcgccagtgtgttctggaggatttttcatgtcagagcctttctcttgtgtgcttgctgtagatgccaaggggagcttattggctgttgaagcctgatgcaaaataaagtacgaaactatgttttttgtttaactaataactagcaaacatgcttccgttgcattgaaactagcagcttcgtgcgtagtcatctgtggataataaaag

SEQ ID NO: 54467 - DNA, 3416 bp, Zea Mays
gccacacacgatcaccatcacccccgggctcccgacccagtacaaatagacacgcacactcccaactccccacccatctccgccgcgcacaccgcccaatcagccaatctcctcctcctcctccgctctcagacgagcagcggttgccatcactctccacttcccacgcccgctgcgggctcgcaggcggcagagaattgtctgtgccgccgggtgggaatttgattcggtcggattcgctgcgccgcgatgccggagcggcaccagtccatcgacgcgcagctgcggctgctggcccccgggaaggtctccgaggacgacaagctcgtcgagtacgacgccctcctcgtcgaccgcttcctcgacatcctccaggacctgcacggcccccacctgcgcgaattcgagtgctacgagctctcggcggagtacgagaacgaccgggatgaggctcggcttggcgagctcgggagcaagctcaccagcctgccgccgggggactccattgtcgtcgccagttccttctcgcacatgctcaacctcgctaacctcgccgaggaagtgcagatcgcgcaccgtcgccggatcaagctaaagcggggagacttcgccgacgaggcctccgcgccgacggagtcggacatcgaggagacgctcaagcgcctcgtctcgcagctcggcaagtcgcgggaggaggtcttcgacgcgctcaagaaccagaccgtcgacctcgttttcaccgcccaccctacacagtccgtgaggaggtctcttctccagaagcatggaaggatccgtaactgcctgaggcagctttatgccaaggacatcactgctgacgacaagcaggagcttgatgaggcacttcagagggagattcaagctgctttcagaactgatgaaatccgcagaacccctcccactcctcaagatgaaatgcgtgctggaatgagttacttccatgaaactatatggaagggtgtaccaaaattcttgcgccgtattgacaccgctctgaaaaatattgggatcaatgaacgtctcccttacaatgctcctctcattcagttctcttcctggatgggtggtgatcgtgatggaaatccaagagtaacaccagaggttacacgggatgtatgcttgttggcgagaatgatggctgctaacttgtacttctctcagattgaagatttaatgtttgagctgtctatgtggcgctgcagtgatgaacttcggatccgtgcagatgaactacatcgctcttcaagaaaagctgcaaagcactatatagaattctggaagcaagttccgccaaatgaaccatatcgtgtcatacttggtgatgtcagggataaattgtactacacacgtgaacgttctcgtcacctattgacatctggaatttctgagattctagaggaggcaacttttactaatgttgaacagtttctggaacctcttgagctctgttatagatcattatgtgcttgtggtgacaaacctatagctgatggaagtcttcttgatttcttgcgtcaagtatcaacttttgggcttgcccttgtgaagctcgacatcaggcaggaatctgatcgacacactgatgtccttgattcgataacgacacatcttggaattggctcctatgctgaatggtctgaggagaaacgccaggattggctgttgtctgaactgaggggcaaacgtccattgtttggttcagatcttcctcagactgaagagactgctgatgttttaggcacatttcatgtccttgcagagcttcctgcagattgctttggcgcgtatatcatctctatggcaactgccccatccgatgtgcttgcggtcgagcttttgcagcgtgagtgccatgtaaaacatccactgagagttgttccactttttgagaaacttgcagatcttgaagcagctccagcagctgtagcacggctcttttcaattgactggtacatggataggattaatggcaagcaggaggtcatgattggatattcagactctggcaaagatgccgggcgtctctctgcagcatggcaaatgtataaagcacaagaagagctcatcaaagtggcaaagcattatggagtcaagttgacaatgtttcatgggaggggtggaacagttggcagaggaggtggtccaactcatctggccatattatctcagccaccagacacgatacatggatcacttcgtgtaacagttcaaggcgaagttattgagcactcctttggagaggagctcttgtgcttcagaactttgcaacgctacactgcagctactcttgagcatggcatgcatcctccgatttcccctaagccagaatggcgtgctctgatggatgaaatggctgttgtagcaactaaagaatatcgatcaattgtcttccaagaaccacgcttcgttgaatacttcagatcggctacacctgagactgaatatggtaggatgaatattggcagccgtccatcaaagaggaagcctagtgggggaatagaatcactccgtgcaattccatggatctttgcttggacacaaacaaggttccatctgcctgtctggcttggatttggtgcagcgataaagcacatcatgcagaaggacatcaggaacatccatatactgagagaaatgtacaatgagtggccattcttcagggtcacccttgatttgcttgagatggttttcgcgaagggagacccgggaatcgcagctgtgtacgacaaattgctagtggctgatgatttgcaatccttcggcgagcaactgaggaagaactatgaggagacaaaagagctactccttcaggttgctggtcacaaggacgtccttgaaggtgatccttatctgaagcagcgtctgcggctgcgtgagtcctacatcaccactctgaacgtgtgccaggcctacaccctgaagcggatacgcgacccgagcttccaggtgagcccgcagccgcccctgtccaaggagttcaccgacgagagtcagccggcggagctggtgcagctgaaccagcagagcgagtacgctccaggcctggaggacaccctcatcctgaccatgaagggcatcgccgccggcatgcagaacaccggctaggccaagatcttcggtgtgcaaataacctgtctcccatgagacggtggacgatatgtgtaggcctgtgagcagttagtacaccggcgccagtgtgttctggaggatttttcatgtcagagcctttctcttgtgtgcttgctgtagatgccaaggggagcttattggctgttgaagcctgatgcaaaataaagtacgaaactatgttttttgtttaactaataactagcaaacatgcttccgttgcattgaaactagcagcttcgtgcgtagtcatctgtggataataaaag

SEQ ID NO: 54468 - DNA, 1565 bp, Zea Mays
aaagaaaattaaaaaggaaaaataaaattaaaatccaagtcttacgcgagtccccttcccgatccgccggccgatccacccaccgccgccatgccggcgttcaaggccccggcgccgggcttcgccgtgcgcttcagccccttccacgagaaccgcctcctcgccgccacgtcccagcacttcggtctcgtgggtaacggtcacctcatcgtcctcgacctagccggcggcgggcctggggccgccccggcgccggtcttctccttcccgacctccgatgcgctcttcgactgcgcgtggtccgagtcccacgactccctctgcgccgccgcctccggggacggctccgtgcgccttttcgacgccgctctcccgccggcgcagaaccccgtgcggctcctccgggagcacgcacgggaggtgcacggcctcgactggaaccccgtccgccgggacgccttcatctccgcctcctgggacgacacgctcaagctctggtcccccgaccgcccagcctccgtccgcaccttccggggccacgagtactgcgtgtacgccgccgcctggtccgcgcgccacccggacgtcttcgcgtcggcctccggggaccgaaccgcgcgcgtctgggacgtccgggatcccgcgcccacgctcatcctgcccgcgcacgaccacgaggtgctctcgctcgactgggacaagtacgacccctccatcctcgccaccgcctccgtcgacaagtccatccgcgtctgggacgtgcgcgcgccgcgggcgcccatcgcgcagctcgccggacacagctacgccgttaagcgggtccgtttctcgccgcaccgccagggcatgctcatgtcatgctcctacgacatgactgtctgcatgtgggactaccgcgccgaggatgctctgctcgccaggtacaatcaccacacggagttcgttgccggcatcgacatgagcgtcctcgtcgacggcttgctcgctagcaccggatgggacgagatggtctacatctggccatttgggacggatccaagagccatgtagcacgcagatgcaatagaccaggtcatatgttcaaagctgcttctccatatttgcgagaggaaggcttaccttggtttatcccttctctagaacctactcatgtggctgtcttcggcactaggtctgtcccctttttttcataataatgagttccaatttaaaaatgcagagaacctaccaataaacattaaacaagtgggtttctactttctagcttatcttgaaaaagctggtggaatgagttccaatgaccataggctagccatacacctcttttaaaggataccaccagttaagattttgttacaaaacaatagaaaagcaaaaagattgcatttctcttcactgttggtcatcacatctgttcatccacatcagtttttccttgaactattatcagttccagtgatttggattggttcacaattgaaactgttggcacgaattgaggtccgttgtgttttggtgtagttggacattctataatggggactatagatgaatgaagttatctt

SEQ ID NO: 54469 - DNA, 3133 bp, Zea Mays
atggctgggaggaccgcgcccgcctccctcccctccttctccctcacgcccgactccctcgctgcccctttatcctggatctcgtcatggacgctaccacgaccaacgattgatatcatgtccaagttcttcaagctgatggtggttctacaattaatgaatgatttgaactgaagtgttcaagatgccgctatctcttgtattgaggttagttaattccatatttgatattgtctgtgtatgcctacttcagccgacattgtgttttttctagacccatggtgactggtatgatctctatttctattggacttgttcaatttcccaatagttacatcccatatttacaagctggagagattgaaacattttttataacatcttatctattaaaactccatgtcgtttgctccaccaggggcttccagtgcgcttttttccctcgatctcgtgtgatctgagtgtgacaaggcttatagtgtgcttgaggttcttcgacctctctataattcccctaagatactggaacaaaaggtaactgttgcgatacatgtcaatcttcaatttcgttgtcgcttagcagttgttgggctttggtacctagtctgtaattttgctgatgcaccagcgacacatatttatcattgtttgttttttaatcaataacaaagcacaggtacaatataatcttatatagcttttaaggtatgtaaacatccactttagtgatgctaacaaatgtataaaataattattattattttttcatagcaatatattttatcatattgcatcttagttcatgctacctggatgtaaatgtggtgcggtttagtttagtaagattttcactaatcactacatagtgcagcactgggctgttaatattttttgtaccatgtgtcataagcatgagatgttgcctgtagagtaccaatgctttattgcagtcttcctcctcgtctgccccaatgtcggcaagtcagccctcttcaacagattctagatgatggtacgacaaattattttaggagtgctttgacataatttaaagcttggaagggagctttctatgatttatttttctgactgtttcgtcacatgttctttccctagatgaaagtattgatttatttttggttctgcaggatcattgcgtctctgcgagctaatcagttctgtgagcgtctccctagccccaatggcgagtcaattgttgattgccatcagatctcaaagatgccaaatcttgcattcaccatagcaaacaagactttcaccttaacaccagagctgtacatagtgaagttggagcaagcaggacaaactatctgcatcaatgggtttatggcatttgacgtaccgcctcctcgtggtcctctctgctacgctaaacatatctgtactactcttaagttaaacatgaagaagtcatcgggctcgggctcggtgtcgttgccgcggagcatcccggagctgtacgaggagaggggagccagcagcctccgggagttcgggttccaggagctccgggccgccaccagtgacttcagccgcctgctcaaggtcggcgaggtggcttcgggagcgtttacaagggcgtcgtccgccttcctggcgggcccgccggcggcacgaagttcaaggttatctcattctggcatatctcatttgcctgctgatgaagtgaagcctttggttaaatatgataatgatgaagatgcacactcacctggtggtcgtggaaggggtcgtggtggtcgaggccgtgggcggggcaggggcagaggtggacgtggaaatgggttcaatgagtatgctgatgctggttgggaagacgatcacgcccgtgcatatatgggcaatggatatgcccgtggaagaggtcgcagtttcaggggccgtggtaggagaggcgacgacgataaccagcctgaataccaacaggtcggaggttatttcaagaagatccaattgaaccaaaaacttgaataaaatttccaacatttctggaagacgactccagtccatctgcagcggtccttgttgggataggtttcaaaggcatgagagtgacgagggtcaaaaatctgaacctctacgcttttggtttatatatgcaaccaacttctatccgtgagaagttgggtcctaagtatgcttcatttccaactgacaagctgatggagaaccctgatttctatagtgatcttctcaggaaatgggttcaatgagtatgctgatgctggttgggaagacgatcactcccctgcatatatgggcaatggatatgcccgtggaagaggtcacagcttcaggggccgtggtaggagaggcggcgacaataaccagcctgaataccaacaggtcggaggttattacgaggaggcacctgttcatgctccagctttaggtgggtaacctcacaggacacaaatgaagtgtacaaaatattttcaaacaaaattaagcaaggcctgaagataatctgaagagctttgtacagacgatttttgatcattgtcgatcctgattcctgatgcttttatttttttcaacaacagattttcaccatttgtaatggaactgaaatcagcctctcatcgaagtggaaacctttttttagtcgtaaacatttacatggtttatccagtggtcctgggtacgtcaaattttgtccacattgaaccagtacgaatgacatcttccttgaaagttatagaaatgcttcaaagttcaaatggcattcagcatattccatgtgctgctatttcagcactcatttctcgtgctggcaatgcaaactggaataggaagggtttgctcctcatccaatcgaattgggcaccgatggtgaaggcctacgggcactcgcgcttgaagaactccgagtacttggaggcgcggcagattcgtccgagtgacaagaaggtagattaccaaatccaaaagctcaccaatgcggctgacaatgccactgctcgagagaaatcaggaaatgcagagacgaatgggaaggatgggcattcggatgaggaagacctcctgaagtataggccaaacccagatatgatggacacagactggtcctgatggtcagttaacgaagcggagcacctgaactagcagtcac

SEQ ID NO: 54470 - DNA, 3117 bp, Zea Mays
ccccatccaccatcccagcgcgatggctgggaggaccgcgcccgcctccctcccctccttctccctcacgcccgactccctcgctgcccctttatcctggatctcgtcatggacgctaccacgaccaacgattgatatcatgtccaagttcttcaagctgatggtggttctacaattaatgaatgatttgaactgaagtgttcaagatgccgctatctcttgtattgaggggcttccagtgcgcttttttccctcgatctcgtgtgatctgagtgtgacaaggcttatagtgtgcttgaggttcttcgacctctctataattcccctaagatactggaacaaaaggtaactgttgcgatacatgtcaatcttcaatttcgttgtcgcttagcagttgttgggctttggtacctagtctgtaattttgctgatgcaccagcgacacatatttatcattgtttgttttttaatcaataacaaagcacaggtacaatataatcttatatagcttttaaggtatgtaaacatccactttagtgatgctaacaaatgtataaaataattattattattttttcatagcaatatattttatcatattgcatcttagttcatgctacctggatgtaaatgtggtgcggtttagtttagtaagattttcactaatcactacatagtgcagcactgggctgttaatattttttgtaccatgtgtcataagcatgagatgttgcctgtagagtaccaatgctttattgcagtcttcctcctcgtctgccccaatgtcggcaagtcagccctcttcaacagattctagatgatggtacgacaaattattttaggagtgctttgacataatttaaagcttggaagggagctttctatgatttatttttctgactgtttcgtcacatgttctttccctagatgaaagtattgatttatttttggttctgcaggatcattgcgtctctgcgagctaatcagttctgtgagcgtctccctagccccaatggcgagtcaattgttgattgccatcagatctcaaagatgccaaatcttgcattcaccatagcaaacaagactttcaccttaacaccagagctgtacatagtgaagttggagcaagcaggacaaactatctgcatcaatgggtttatggcatttgacgtaccgcctcctcgtggtcctctctgctacgctaaacatatctgtactactcttaagttaaacatgaagaagtcatcgggctcgggctcggtgtcgttgccgcggagcatcccggagctgtacgaggagaggggagccagcagcctccgggagttcgggttccaggagctccgggccgccaccagtgacttcagccgcctgctcaaggtcggcgaggtggcttcgggagcgtttacaagggcgtcgtccgccttcctggcgggcccgccggcggcacggtagttgccataaaaaactcaatcccaatggtcatcaggtatggtcgtgtggatcggtgttttcttggctcacctgtgtcaataccatcttgtcgttgttgatcacgaattcgtcagcatttttacagtatattgcctaccatatacattatctgtgtgtgtgtgtgtgggtgaaccctacatcccgtagaagtagaactacacagggtctctgttttttggatcatgaaatggaccgtaccttgcatgactctgtacaattcatctcgctaatgtgtctgtgaagtatctatcattttgctagccatgtttcatttcagaagttcaaggttatctcattctggcatatctcatttgcctgctgatgaagtgaagcctttggttaaatatgataatgatgaagatgcacactcacctggtggtcgtggaaggggtcgtggtggtcgaggccgtgggcggggcaggggcagaggtggacgtggaaatgggttcaatgagtatgctgatgctggttgggaagacgatcacgcccgtgcatatatgggcaatggatatgcccgtggaagaggtcgcagtttcaggggccgtggtaggagaggcgacgacgataaccagcctgaataccaacaggtcggaggttatttcaagaagatccaattgaaccaaaaacttgaataaaatttccaacatttctggaagacgactccagtccatctgcagcggtccttgttgggataggtttcaaaggcatgagagtgacgagggtcaaaaatctgaacctctacgcttttggtttatatatgcaaccaacttctatccgtgagaagttgggtcctaagtatgcttcatttccaactgacaagctgatggagaaccctgatttctatagtgatcttctcaggaaatgggttcaatgagtatgctgatgctggttgggaagacgatcactcccctgcatatatgggcaatggatatgcccgtggaagaggtcacagcttcaggggccgtggtaggagaggcggcgacaataaccagcctgaataccaacaggtcggaggttattacgaggaggcacctgttcatgctccagctttaggtggattttcaccatttgtaatggaactgaaatcagcctctcatcgaagtggaaacctttttttagtcgtaaacatttacatggtttatccagtggtcctgggtacgtcaaattttgtccacattgaaccagtacgaatgacatcttccttgaaagttatagaaatgcttcaaagttcaaatggcattcagcatattccatgtgctgctatttcagcactcatttctcgtgctggcaatgcaaactggaataggaagggtttgctcctcatccaatcgaattgggcaccgatggtgaaggcctacgggcactcgcgcttgaagaactccgagtacttggaggcgcggcagattcgtccgagtgacaagaaggtagattaccaaatccaaaagctcaccaatgcggctgacaatgccactgctcgagagaaatcaggaaatgcagagacgaatgggaaggatgggcattcggatgaggaagacctcctgaagtataggccaaacccagatatgatggacacagactggtcctgatggtcagttaacgaagcggagcacctgaactagcagtcac

SEQ ID NO: 54471 - DNA, 1498 bp, Zea Mays
agctagtcagcccggccctggtcttagcagtgggcggtgtcagtgtgcgccatcgccccccactcagactcagccactgctgcagtccgccggctagtacacgtacgacaggctgtaccgaggttcagttcggtagtgtagttgtaggttgcgatggcgaggcggctgctggcggcggtcgccatagtagtcgtggccgccgcgctcgcgtgcggcgcgggcgcgcagctctcggcggggttctactcgtcgagctgccccgccgtgcacagcatcgtgcgccaggccatgtcgcaggccgtcacgaacaacacgcgcagcgccgccgccgtgctccgcgtcttcttccacgactgcttcgtcaatggctgcgacgcctcgctgctgctggacgacacgcccacgacgcccggcgagaagggcgccggccccaacgccggcggctccaccgtcggcttcgacctcatcgacaccatcaaggcgcaggtcgaggccgcctgccccgccaccgtctcctgcgccgacatcctggcgctcaccgcgcgcgacggcgtcaacctggtctctctcggcggcccgagctgggccgtgccgctgggccggcgcgacgcgacgttccccaacagcacgggcgcggcgacggacctcccgggcccggactccgacctggccggcctggtggccgggttcgccgccaagggcctgagcccgcgcgacctcgcggcgctgtcgggcgcgcacacggtggggatggcgcgctgcgccagcttccgcacccgcgtctactgcgacgacaacgtgagcccggcgttcgccgcgcagcagcgccaggcctgcccgtcggccgacgccgacgacgcgctcgcgccgctcgactcgctcacccccgaccagttcgacaacggctactaccggagcctcatggccggcgccggcctgctgcactcggaccaggagctcttcagcaacggcgcactcgactcgctcgtgcgcctctacggcaccaacgccgacgccttctcgtcggacttcgccgcgtccatggtcaagctcggcaacatcggcccgctcacgggttccgcgggggaggtcaggctcaactgcaggacggtgaattcgaattcgtgacttcaggacgaccagacggccaaaccgctctggacagcactgcggcgtccgtccgtgggcggaccacagcagacaccaccccgtgaccgtgaggatcctagcgggaaagacgagcgttccggcgagacgcgcacgtcaagcgtgaagaattggtttctgaatgcgcctaaaaaccttggaaagcgacatgccaacaagagacatacgagttgcgtctgcctggtgtgcatttgtaatatgtggctacctctgccgcatgcacgtatctgtagatattctcgaattggctgtcacttattctcgaagtagctcattggggttgtgattttttgacgcaggaaacttctgatttttattaagcataatgtcg

SEQ ID NO: 54472 - DNA, 2455 bp, Zea Mays
tgcaaccagtaaaattataccaaaatgcattttagtggcaccaatattagacaaatgctttattttttggaaagaaataaagtggaaccggaattgctaatgtggaccagcctttgccctaatcgtaaaattttcacgaaaggaagatatctctactgttgatgcttgatagaggaaagctacccaattctatctatcataattgctaatttcttagataaattataagtaaaatccaaaattatgtgcggaaggtatcatcaaataaatgttcgcaacactgaaacaaccaaaaactaacaaaggatatagaagtgaccaacgttgatagtaattcttctctattcttttagtattatatctgaatttattcaaaaatataaaagaatattctagatatatattttgttacctcacggaagaacatttctttgcagtgtttttgttaaagagaatgatattgctaaatttagagtatgcactatagaggatcccagaacattgaacaagatgttgtatctgaggcctccaggaaatgtgtgctcgattaatgaattggcagatctgtgggaaataaaactcaaaaaatccctaaaaatgttatatgtaacagaagagcagcttcttaaaggaatcgatgatgctccatttcccttgaagatggatttaatttttatatagtcaatatttgtcaagggtgatcatacgtatttttaaatcgacttgtcaatggaaggtactcaactgtaaattacacaatagtgaatgagtagtatttgacatcagatgtgaaccagaagaggagagaatcaactcaccaggaggccaagccgtcgctcccagccgacatacaccatgacctcaaggtccacgacctcatcctccgcggccccgtcgcctagaagatccatcgccacaatatccgactttctcttcctccccacctcaagctgcctccggtgtcatccacacccagtggtggagcggcagggacgagccaccggagaaatatggggatgtggtcgtcgaggagtcgcacacaatggtggtcgccgaggaggaggcgaagaggtgggcgaggccgtcgcggaggaagtacggatggaggttgatggtacggggtcaggtggtggcggccgccaggcacgatgctcactcgtctcccaagagacaggggtttccggcgtgcgtcatagcgacgtggcgatgggtagagaggggtcgtctggggatgcggtgagcgcaagcggaggaagaaccaaggcaccactctacaactggaggagatgtcgagacggaaggagagtgcgggtacagggggcggagccaacagaagtctgctgcaacgtacgttggcaggggcatggcgggctggttagcgggggtgggggagtgggcgtggagcgtggggatgacgacgaggcgaaggtcacgacaggcgtggagcggggggccgcgatggagggcgggggcagggacgggcaacgcgacgatggaggctcagatggaaggccgacgacgggcgggaggttgggcaagacgggcaatagagatatcgcgtgggcagacgtgggggcagggagacgtgggggcagggacgggcaacacgacgatggaggctcggatggaaggccgatgacaggcgggaggttgggcaagacaggcggcagagatatcgcgtgggcggacgcgggggcacgaggaagtgtggcaccgcggcaagattagcgggggggtgcgccggcgagattagcgggggagggtggagccgtggtgaaagtggtggacgccctcgttaccctctcaaggaatagtatagatttataataaccagggttcaatccaatcacaatgcatggttcatgagaagtggcaaaatgcaatacatcatgggaaaatgtacctacaagaagatcactgggacagcgatctagtgcttcgatgtcctatgcttagctgatgtactcttgcgtatggttgagaacaataatatgtaattcgattattaattcccaggaacatcagaatatttgtaacaggacaacatctttggcgattaatgggtgcctttaatgattgaacgacactacgacagtaacaagacatagtgaggaatcaaccaacagtcatacctgtgtgggacgccttggcctaattgcagattcctcaaatgcattcttgtgagaatgggcaccacgaggcatagaaaagtacatcaaattaatcatccttgtttgcattaataagattaactaccattgccaaggtgagctcatctccctgaaaggatagaaatcggtcaaattcaaattttacaaataaaacttatagaaaacccttatgctcaaagcttcgattgctctctattgtagtacaaccgaaaacaaaaggaaatagtaaggcacataccttgcaaaaacctcacagattgccacttctcatgattggattgaac

SEQ ID NO: 54473 - DNA, 503 bp, Zea Mays
atccatgtggactagtgaaaagaagcaggcccagtacagcgtccgctagatgttcaacgaaacgccgaaaccaataatcatcatcgtctccgacttccgcagcagcagcgtcgttctctccatggtgctcgtcgtcgacttcgccctcacatcatcatggcttgacggtcgcctaagctcgtgcttgctcatctactcgtcctcgccatggacatgcgtctccgcatgctgatgtgcccagaccatcaatttcgcccttgtcattacaagcgtcaccggcgtccgcggatagatacgttaagtgatcacgtgatggggagaaccaaagctgagtcgaccaccagatgctgtaaagcgtgagccagtcgtgaggtgatgctgatggacgaacctgaagatggacagacggagcaagtatcgaaacaaaagctgttcgccaagtggacatcgtctaacaaacactaatgtagtgtttattccaggtaagccccggtgcatgcaac

SEQ ID NO: 54474 - DNA, 1110 bp, Zea Mays
acgttatatttgatgagcaccaaagatgatgtttattctgtcaaaatcattacaaggaagcattgggttttggttgggacacatgatggtttcatcttggtgtacgagtatgaaacaggaatgaaactgataacaagattcaaagcggtatcaaacatattccatggttactctgatggagtgttggtcgttcatccaaccctaccatatgtgctttcggcttatggccgcgaaatgaaactttgggattgggacaaagggtgggagtgcatacaaacatttgagctgggacgctatggttccatacgtcaagtggcatttagcccgaatggcactgataattttgctacagcttcaagtgatcgcaaaataaagctttggagccattcttcccccacagcggagtatactctgtgtcaccataagagagatgtgagctgcctggatttcttcagaggtgacgacagtaatcaatatttgattagtggctctggtgactatacggccaagatctgggacttgcagaaaaagacttgtcttcatacattggatgttatgtctccggttacttctatcatttcccttccaaattctccatatttgattataggttcggaagacggaactgttcatttgtggaggtctcctagttttaggattgagagaatacttcagattggctgcacaagacctgttcggagcctatgtttggtggggtcaaaaagggtactcattgaaaagatgggtgaagtatcaatcatggatattgatacatccattaaggaacccccagagttattacttcatgtccacccgaccacactcgtgtttgaattgcaacccgggaagttgagccaatgctcaatgcagctaacaaatgacacagatcaacacatggcatttaagctcagttcaacagatagtgtggactggttagagcagtttcttccatggtacggcattgttgcggcacgctccacatacactctcattctgaatgtgttcttggagcgagatactgcagaaaagagattctgtgatatgatcctagagagctgtacatgtgaatacaacgacaataacatgtattcggccacaacttattgggag

SEQ ID NO: 54475 - DNA, 1177 bp, Zea Mays
attgttgtcgtcaaggcaggcaaaaggcgccaacacatattttattttatttgcccgagggaatagttgatggcgtttgcgcgacgggtgccatatcttgcctctcgatcttcctcttcctcgcattgccggtgcttgttggatgaaaaatcagctcatcagcagatctctccctgccggttgttctgccctccaatccaacaaaccaccaagctaagacatttttgtcataacttttccttccccatcgatatggtggcccagtatttccgagaaatccgtggcagattattacggaaatcctgacaagtactacactctccattgctaatctagaggtttgatcacatcgttgaatatctgcatacctttccacttggtgttttgcagagcacctacagccaggacactggatcgatcgctgcttagagcgagctacaaattatggactgtaaagctagcgcaacaagagaggacctggaattcatactacttaatgaagatgcacagccaaaaccactgcctttgtcgctccttgcagacatcacaagtgatttctccgacaagaatattattggaaggggtggatttggcatagtttataagggattcatcgggaatcgcacggttgctgtgaagaggttgctgcgtgtactacattttgacgaggatggattctaccgagagattaaatgcctgatgaaggtgaagcaccaaaatgtagttcgatttttaggatattgtaacgagacacgaggggagatggcagggttcaacggtacacttgtcatggcacaagaagaagaacgattgctttgtttccaatacctatccaaaggagggcttaacaactatatcaatgcagatgcatcttctgcgcttgaatgggaacaatgctatcgaataatcaatggagtttgccagggcttacatcaacttcatcagcacaatattttacacatggatctgaaaccggaaaacatacttttgggtaacgacatggtcccaaaaattgctgatttcggcctatcaaggcgattgcatgaagaccaaagctacgttataactaaaaatttatgcggaacacggtaagatgagctatagctaagcctcattaattacagctcaattgattttgtataccctttttatggttcatactgagccccactttatt

SEQ ID NO: 54476 - DNA, 1147 bp, Zea Mays
aaaggatgtggccggccggaccattgttgtcgtcaaggcaggcaaaaggcgccaacacatattttattttatttgcccgagggaatagttgatggcgtttgcgcgacgggtgccatatcttgcctctcgatcttcctcttcctcgcattgccggtgcttgttggatgaaaaatcagctcatcagcagatctctccctgccggttgttctgccctccaatccaacaaaccaccaagctaagacatttttgtcataacttttccttccccatcgatatggtggcccagtatttccgagaaatccgtggcagattattacggaaatcctgacaagtactacactctccattgctaatctagagagcacctacagccaggacactggatcgatcgctgcttagagcgagctacaaattatggactgtaaagctagcgcaacaagagaggacctggaattcatactacttaatgaagatgcacagccaaaaccactgcctttgtcgctccttgcagacatcacaagtgatttctccgacaagaatattattggaaggggtggatttggcatagtttataagggattcatcgggaatcgcacggttgctgtgaagaggttgctgcgtgtactacattttgacgaggatggattctaccgagagattaaatgcctgatgaaggtgaagcaccaaaatgtagttcgatttttaggatattgtaacgagacacgaggggagatggcagggttcaacggtacacttgtcatggcacaagaagaagaacgattgctttgtttccaatacctatccaaaggagggcttaacaactatatcaatgcagatgcatcttctgcgcttgaatgggaacaatgctatcgaataatcaatggagtttgccagggcttacatcaacttcatcagcacaatattttacacatggatctgaaaccggaaaacatacttttgggtaacgacatggtcccaaaaattgctgatttcggcctatcaaggcgattgcatgaagaccaaagctacgttataactaaaaatttatgcggaacacggtaagatgagctatagctaagcctcattaattacagctcaattgattttgtataccctttttatggttcatactgagccccactttatt

SEQ ID NO: 54477 - DNA, 1244 bp, Zea Mays
aaaggatgtggccggccggaccattgttgtcgtcaaggcaggcaaaaggcgccaacacatattttattttatttgcccgagggaatagttgatggcgtttgcgcgacgggtgccatatcttgcctctcgatcttcctcttcctcgcattgccggtgcttgttggatgaaaaatcagctcatcagcagatctctccctgccggttgttctgccctccaatccaacaaaccaccaagctaagacatttttgtcataacttttccttccccatcgatatggtggcccagtatttccgagaaatccgtggcagattattacggaaatcctgacaagtactacactctccattgctaatctagaggtttgatcacatcgttgaatatctgcatacctttccacttggtgttttgcagagcacctacagccaggacactggatcgatcgctgcttagagcgagagcacatgatatactcgtcatttcgtcgccgttgtactcgtgtagctacaaattatggactgtaaagctagcgcaacaagagaggacctggaattcatactacttaatgaagatgcacagccaaaaccactgcctttgtcgctccttgcagacatcacaagtgatttctccgacaagaatattattggaaggggtggatttggcatagtttataagggattcatcgggaatcgcacggttgctgtgaagaggttgctgcgtgtactacattttgacgaggatggattctaccgagagattaaatgcctgatgaaggtgaagcaccaaaatgtagttcgatttttaggatattgtaacgagacacgaggggagatggcagggttcaacggtacacttgtcatggcacaagaagaagaacgattgctttgtttccaatacctatccaaaggagggcttaacaactatatcaatgcagatgcatcttctgcgcttgaatgggaacaatgctatcgaataatcaatggagtttgccagggcttacatcaacttcatcagcacaatattttacacatggatctgaaaccggaaaacatacttttgggtaacgacatggtcccaaaaattgctgatttcggcctatcaaggcgattgcatgaagaccaaagctacgttataactaaaaatttatgcggaacacggtaagatgagctatagctaagcctcattaattacagctcaattgattttgtataccctttttatggttcatactgagccccactttatt

SEQ ID NO: 54478 - DNA, 1210 bp, Zea Mays
ctgcagtataagcaaacaaaaggatgtggccggccggaccattgttgtcgtcaaggcaggcaaaaggcgccaacacatattttattttatttgcccgagggaatagttgatggcgtttgcgcgacgggtgccatatcttgcctctcgatcttcctcttcctcgcattgccggtgcttgttggatgaaaaatcagctcatcagcagatctctccctgccggttgttctgccctccaatccaacaaaccaccaagctaagacatttttgtcataacttttccttccccatcgatatggtggcccagtatttccgagaaatccgtggcagattattacggaaatcctgacaagtactacactctccattgctaatctagagagcacctacagccaggacactggatcgatcgctgcttagagcgagagcacatgatatactcgtcatttcgtcgccgttgtactcgtgtagctacaaattatggactgtaaagctagcgcaacaagagaggacctggaattcatactacttaatgaagatgcacagccaaaaccactgcctttgtcgctccttgcagacatcacaagtgatttctccgacaagaatattattggaaggggtggatttggcatagtttataagggattcatcgggaatcgcacggttgctgtgaagaggttgctgcgtgtactacattttgacgaggatggattctaccgagagattaaatgcctgatgaaggtgaagcaccaaaatgtagttcgatttttaggatattgtaacgagacacgaggggagatggcagggttcaacggtacacttgtcatggcacaagaagaagaacgattgctttgtttccaatacctatccaaaggagggcttaacaactatatcaatgcagatgcatcttctgcgcttgaatgggaacaatgctatcgaataatcaatggagtttgccagggcttacatcaacttcatcagcacaatattttacacatggatctgaaaccggaaaacatacttttgggtaacgacatggtcccaaaaattgctgatttcggcctatcaaggcgattgcatgaagaccaaagctacgttataactaaaaatttatgcggaacacggtaagatgagctatagctaagcctcattaattacagctcaattgattttgtataccctttttatggttcatactgagccccactttatt

SEQ ID NO: 54479 - DNA, 1102 bp, Zea Mays
ctgcagtataagcaaacaaaaggatgtggccggccggaccattgttgtcgtcaaggcaggcaaaaggcgccaacacatattttattttatttgcccgagggaatagttgatggcgtttgcgcgacgggtgccatatcttgcctctcgatcttcctcttcctcgcattgccggtgcttgttggatgaaaaatcagctcatcagcagatctctccctgccggttgttctgccctccaatccaacaaaccaccaagctaagacatttttgtcataacttttccttccccatcgatatggtggcccagtatttccgagaaatccgtggcagattattacggaaatcctgacaagtactacactctccattgctaatctagaggtttgatcacatcgttgaatatctgcatacctttccacttggtgttttgcagagcacctacagccaggacactggatcgatcgctgcttagagcgagagcacatgatatactcgtcatttcgtcgccgttgtactcgtgtagctacaaattatggactgtaaagctagcgcaacaagagaggacctggaattcatactacttaatgaagatgcacagccaaaaccactgcctttgtcgctccttgcagacatcacaagtgatttctccgacaagaatattattggaaggggtggatttggcatagtttataagggattcatcgggaatcgcacggttgctgtgaagaggttgctgcgtgtactacattttgacgaggatggattctaccgagagattaaatgcctgatgaagatgcatcttctgcgcttgaatgggaacaatgctatcgaataatcaatggagtttgccagggcttacatcaacttcatcagcacaatattttacacatggatctgaaaccggaaaacatacttttgggtaacgacatggtcccaaaaattgctgatttcggcctatcaaggcgattgcatgaagaccaaagctacgttataactaaaaatttatgcggaacacggtaagatgagctatagctaagcctcattaattacagctcaattgattttgtataccctttttatggttcatactgagccccactttatt

SEQ ID NO: 54480 - DNA, 2372 bp, Zea Mays
atcgcttcgaggtcgatgcgacctggcgtcctggtctgttatactttgaggcaagtggcgagggcggcagtgccgggtggccgcagcagccgcgaaccgtagcagcagccaaaggccggtccactttatttactgctcgtctagacgtctagtgcagcctgcagcgcagaaaaaccagcggcgcagtgacaaaagcccacagcttcttctccctactcctccagtcctccgtcatccgtttcgctctctgccgccgccaccgcacaagaagctagctcctgcctgtaccgccccgtcatggcgatgctatcccgcgcagcctcctccgcggcccggcgcccgctgctgccgccgcctaggcttctggcggtgagggcgatggcgtcgtcgctcttcggccacgtcgagccggcgcccaaggaccccatcctcggcgtcaccgaggctttcctcgccgacccctcgtccgacaaagtgaacgtcggcgtcggcgcctaccgggacgacaacggccagcccgtcgtgctcagctgcgtgcgcgaggccgagcgccggatcgcgggcaacctcaacatggagtaccttccgatgggaggcagcgtcaagatgattgaagagtcactgaagctggcgtacggagaagattctgacttcatcaaagataagaggatagcagcggtgcaggcgctttcaggcactggtgcctgccggctctttgctgatttccaaaagcgttttttgccggattcgcagatctacataccaacaccaacgtggtccaaccatcacaatatttggagggatgctcaagtgccacagaagacattcacatactaccatccagagtcaagagggcttgatttctcaggattgatgaatgaaatcaagaatgctccagatggttcattctttttgcttcatgcatgtgctcataatcccaccggtgtagatcctacggaggaacaatggagagaaatatcccatcagttcaaggtgaaaaaacattttccattctttgacatggcataccaagggtttgccagtggtgatccagagagagatgccaaggcaatccgaattttccttgaagatggacaccaaattggatgtgctcagtcatacgcaaagaacatgggactttatggacaaagagcaggatgcctgagtattttgtgtgaggatgagatgcaagcagttgctgtcaagagccaactgcaacagatcgcaagaccaatgtacagcaacccacctgttcatggtgcactggttgtttctataatcctcagtgatccagaattgaagagtttgtggttaaaagaagtcaagggtatggctgatcgtatcattggaatgcggaaggcacttaaggaaaatcttgaaaagctaggttcacctttgtcatgggatcatatcactaatcagattggaatgttctgctacagtgggatgacacctgaacaagttgaccgtttaacaaatgaataccacatttacatgacccgcaatgggaggataagcaaatgcaattcatgaggttaccaaaccaaattgagttagggtcctaccttctttggtcgatggaagctgatggaatgagactgtgaagcggcgtttccccccctctgttcctgacagaaataagtttagcctgctgctaccatatacatggacacagactcagatgtagacactcaagttttgagagctgtgatcctgtttcatttaatcaaaaacaattttgtttttttttcatcttgtcatggcaaatgttacaccagctgcaaaataattacaataattgatcttgatccagcgtcacagttacttcgcagattagagtttgtacaattgatcgaagaaaactgaccattacgactcaggtctctagcctgttggtggccacaaagcgtgtttcagttaggttgtcagtgtgtgcatggtaaagaaagccgatcttcagcaagaacagcggcaacgcaaaaaagaggtggattagtcgggcatggtacagaaaactgatcagcccaaaaaaaaaatctagatcaaatctcgattaaagaagcctggtgaaacttggaaactttgcacaagaaaaccccactttgcacaagaaaaacccactgcataaatgccaccaaaacgaggtaggcaaatgaatgtttaatttagctttggttggggtgcgccagcttagacagtagtgcaaagcctaagcgacactcaagagccctagtagcaagctactgttgcgagctcttccccacaaaaaataaatttaatatcgaagtagacacatggtctacatatcagatattaaactgataagaacagatactacacttgatcttagccaaaaggccgagaaaggtatg

SEQ ID NO: 54481 - DNA, 657 bp, Zea Mays
cttctgtcagcgcaatgcaatgccatttcagtggtacgatccttcaacaggcatctacggaatggacttctacgtcgtgctggagcgtgcgggctaccgtgtggcacgccgcaggaggtgcaagtcccgcgtcgggattcagcacagggtgaccaaggaggactccatgaagtggttccaggtcaagtacgaaggcgtcatcctcaacaaggctcaggccaacacgttgtaaacctcacctgtgggcaaaacagctctctggtctcttctcctcctccgtgtcaacgcaagaccaccacccacctcgccaggcttttttgggtttaatttgtgttctcagccctgatgtttagtctgctagcactctgtgggtgctgttgtcgcaagatcaccaccatgtcaattatttccgtgcccttgtcgcactctgtgtgctgttgcttgaaaacatgctagtttgatctccctagcgcagcttgtgatctggcttttttgtttggttatatgcttttatctgccacctgcgttttagttcttgatggattaccatctcccggtctggaaaatagagggtgacctaaagcatctccaccagaatgagaattctcttttactgaaatattggtataggagattgagaaaaacaaaactatagaa

SEQ ID NO: 54482 - DNA, 945 bp, Zea Mays
ggaaagcctctcactgtccccagagcccaaacaagccagctagggttgctcccttttaacctcgcgccgccacccccttatacctcaacgcacatctccaccgtcgtccgccgccgccgaaggacggaaggagaagagggcccacgagaagaagctgtccaacccgatgcgggagatcaaggtgcagaagctcgtcctcaatatctccgtcggggagagcggcgaccgtctcacccgcgccgcaaagctgctcaggaggaacttcagcgacaccgggtgctttggtttcggcatccaggagcacatcgaccttggtatcaagtacgatccttcaacaggcatctacggaatggacttctacgtcgtgctggagcgtgcgggctaccgtgtggcacgccgcaggaggtgcaagtcccgcgtcgggattcagcacagggtgaccaaggaggactccatgaagtggttccaggtcaagtacgaaggcgtcatcctcaacaaggctcaggccaacacgttgtaaacctcacctgtgggcaaaacagctctctggtctcttctcctcctccgtgtcaacgcaagaccaccacccacctcgccaggcttttttgggtttaatttgtgttctcagccctgatgtttagtctgctagcactctgtgggtgctgttgtcgcaagatcaccaccatgtcaattatttccgtgcccttgtcgcactctgtgtgctgttgcttgaaaacatgctagtttgatctccctagcgcagcttgtgatctggcttttttgtttggttatatgcttttatctgccacctgcgttttagttcttgatggattaccatctcccggtctggaaaatagagggtgacctaaagcatctccaccagaatgagaattctcttttactgaaatattggtataggagattgagaaaaacaaaactatagaa

SEQ ID NO: 54483 - DNA, 1273 bp, Zea Mays
atgatgaacttttcttacagcagttgaggtagtctgacaagaaaagtaatatcagaacataaatgctgtggaattatacttcttcatttggagttaaactgttaatgaatggagttaaactgttaatgaaacctttccatgggttatttactttagatggaccttttacattggtttttcccatattggttattttagttacattttggttctgattaattggtatctacgtgcggtgtattttttagacgctaataataaatgcatgaattgaatggccaggtttaccactctagtttcgctgatgatgatgggatcacaaaagcttgcagctgtcctttgcttccactgaaaactcatatcaagggcccggcaccagcctctgaccctgataaagcggacattgttgatgaagccataactttctttcgagccaatgttttcttcaaaaatttccatgtgaaatgctcagcagacaagttattgatctatctgacgttttatatcaatattgccttaaaaagactagaaggttgccggacactagctgttgggactaaagcaatcattaatctgggattggagaaagttcctgtacctggggaaccagggtttcctttccctggacttttcactcttccccagtcccaggaggaagcagtaggactgattaagtctgcaaaacgactgtacccatggattccagtgataaattgacgattgcgcattctgtgtctgaatgcagaattgttgaggaattatttgaagcagataagggaggaaacaagtggaagattgctcaactgtgcatacagagctaatggctttccaaacaagtggtggttggcttttgctaagaggaagttcatgaacattgtcatcctttagacttgggctttttgtaccaactggttcaagctgttttttcactcatgatcgtgtgaagtatccacacacaacaaagatagttatcctacatcccaaagtaacaagccaaagacttcgatgataggatagatgaatgacataagataaattatttgttcccaatttgcgatgtataaccgtgggaacaataattatcatgttgtattgccttttgtaattctcaccctgctatatcagagagacgaaacctcatacgggggtatatttgtatgagtatattctacaatgatgtctaaaacgagacagttcaaatgttcttactattggtttagtattagcaaaaacttcatagtattgacaatggtattattaactttttcatgca

SEQ ID NO: 54484 - DNA, 937 bp, Zea Mays
tagcttctcctgattcggacacgcaacatggtttaccactctagtttcgctgatgatgatgggatcacaaaagcttgcagctgtcctttgcttccactgaaaactcatatcaagggcccggcaccagcctctgaccctgataaagcggacattgttgatgaagccataactttctttcgagccaatgttttcttcaaaaatttccatgtgaaatgctcagcagacaagttattgatctatctgacgttttatatcaatattgccttaaaaagactagaaggttgccggacactagctgttgggactaaagcaatcattaatctgggattggagaaagttcctgtacctggggaaccagggtttcctttccctggacttttcactcttccccagtcccaggaggaagcagaattgttgaggaattatttgaagcagataagggaggaaacaagtggaagattgctcaactgtgcatacagagctaatggctttccaaacaagtggtggttggcttttgctaagaggaagttcatgaacattgtcatcctttagacttgggctttttgtaccaactggttcaagctgttttttcactcatgatcgtgtgaagtatccacacacaacaaagatagttatcctacatcccaaagtaacaagccaaagacttcgatgataggatagatgaatgacataagataaattatttgttcccaatttgcgatgtataaccgtgggaacaataattatcatgttgtattgccttttgtaattctcaccctgctatatcagagagacgaaacctcatacgggggtatatttgtatgagtatattctacaatgatgtctaaaacgagacagttcaaatgttcttactattggtttagtattagcaaaaacttcatagtattgacaatggtattattaactttttcatgca

SEQ ID NO: 54485 - DNA, 883 bp, Zea Mays
cactgaaacctaacctgtcgtcttcacggccggtgggagcttttcgtgacccgcgagctgctccccgcgagctgttagtgggagctctagacgctgactgtgcccgctggcagcctcgcgctgagcctcaactgtgccttcgacgacagattttgcatgcttttctggacagctttaactagctcgaggggaacagtacctgcagcacctagatcaagagtgtagactgctaccatttttcatccacagccccaagcagacagcagccatgttatcccaacctcatccacagcaacaaggaggtgaaccatcaagtgtaaactctgcttcaattactcaaaaaacatcaaatgctatcaagtcagatgaccctacatgggagcattgctttgtcccggatatgagtaagaagcatgcaatacagtgcaagtactgtgacaaggtgatccatggtggaattactagagttaagtatcatcttgtaaacattggaggtttcaatgttacaaagtgcaagaaagttccagcacatgttaagcaagagatggaggccttgcttacaaagaagactggagaaaaagaacagagaaagaaggaaaagcaaagagaaagggatgaaattgatctagataaatcagatggatccgatgaagaagagaatgagcatgagaatgatgttattgtgctgaaatcaacaagggaaagtaataattgcagcagctctagactcccaacaaatggtggcagtggcactattgacaacttctacaagccacaatctattgaagagtctgtccactagaacaaaattcaaacaaagttgtcaactcaaaaaagagaagagagaagagatagagcctgtgagtatatatgccaatttttt

SEQ ID NO: 54486 - DNA, 3194 bp, Zea Mays
ctgcttcccatgaagcaaggaccatgctgcagcactcctccagctcaagcgatcctttctcttcgactactccaccaccacccttgcttcatgggaagcaggcacggactgctgcctctgggagggtgttggatgcgacagtgtctccggccatgtcactgttcttgacctcggtggccgtggcttgtacagctacagtcttgacggcgcgctcttcaacctcacctcactccagcgactcgacctgagcaagaatgacttcggtggatcccctattccggcggctggctttgagaggctttcgctataaccttttggtcctacaagaaccaagtttcgagacactattgtcaaacctcacaaatctgagagagctctaccttgatggcgtggacataagtagtagtggcagagaagattggggcagaactcttggaaaatacgttcctcatcttcaggttcttagcatggaggaatgcaggcttgttggtcctatccatcgacattttctacgtctccgctctatcgaagtgattaatctaaaaatgaatggaatttccggcgtggttccagaattctttgcagattttctcaatttaagagttcttcaactcagctttaataacttgagaggcacctttccaccgaaaatctttcaactgaagaatctggcagtattggatgtgtcaaataacgatcaactctcggggcttattccaaaatttctccatgggagctcgctggaaactttgaatctacaggatacacatttctctgggccaattccacagttaattggcaaccttacgacattggaatatttgacaatctctgattgtgcttttactggtcaattactctcttcagttggcaatctagaaaacttaagattcctgcaaatatcctataaccatcaaggtttatctggccctataacaccgacaattggacatctcaacaagttgacagtattaatacttcgaggttgcagcttctctgggagaataccaaatacaatcgccaacatgactaaactgatttttgtggacctttcacagaatgacctcgtcgggggcgtaccgacatttctattcactttaccatcattattacaattggatctttcatcgaatcaactctctggacctatacaagagttccatacactatcttcgtgcatcgaagttgttactttaaatgataataaaatcagcggaaatattccttcagcactcttccacctcataaatttggttattttggatcttagctcaaataacataacaggttttgtagaccttgatgatttttggaaactacggaagctcgctcaaatgagtttatccaacaacaagctgtatatcaaggagggaaaaagaagtaactccacattccggttattaccaaagctcactgaattagatctgaaatcatgtggcttaactgaaattcctagtttcttggtacaccttgatcatatcactatattggacctttcttgcaacaagatacttgggactattccaaattggatatggcacacatgggaccatagccttaggaatttgaatctttcaaacaacgcattcacaaatttgcagctcacttcatatattctccctaatagtcatttggaatttcttgatttgagttccaacagaatccagggtcaaatcccgattccgaacatgttgacaatggaaagcaattatgaacaagtcttggattattcaaataacagtttcacatctgttatgttaaacttcactttgtatcttagccaaactgtgtatctcaagctatccgacaataacatagcaggctacataccacccacactttgcaatttaacttatcttaaagtccttgacctggcaaataacgacttcagagggaaggttccatcttgcctgatagaagatggcaacttaaatatattgaatttgagggggaatcgcttcgaaggagagttgacttataaaaattatagtagccaatgtgatctgcggacaatagatataaatggaaataacattcaaggacagctgcctaaagctctttctcaatgcactgatttggaggttcttgacgttggatacaataacattgtagatgttttcccatcttggcttggcaacctttccaatcttcgtgtccttgtattaaggtccaatcaattctatggcacactagatgaccctttcacaagtggaaatttccaggggtacttcttggggatacaaataattgatattgccttgaacaatttctctggctatgtgaaaccacaatggttcaagatgtttaaatctatgagggagaagaataataacactggacagatcctgggtcattctgcatccaaccaatattaccaagatactgttgcaataacagttaaggggaattacgtctcaattgataggattttgacagccttaactgcaatggacttatcaaataataaactcaatggtactattccagatttggtcggaaaccttgttatactacatttattgaatatgtcacacaacgccttcacaggaaatattccactccaattaggcaggatgagccagctggaatcactggacctgtcatggaactacctttccggggagataccacaagaactaacaaatctcacatttcttgagaccctagatttgtctaacaacaatttggcagggatgattccacaatcacgccaatttggaacatttgagaacagttcatttgaaggtaacataggcctctgtggagcacccttaagcagacaatgtgccagttcacctcagccaaatgacctgaaacaaaaaatgtcgcaagatcatgtcgatataactctatatatgttcattggattaggatttggacttggatttgctgttgctattcttgtcatgcaggttccacttggcaaattctatagaactataagcattttgcgaaacttatcctaggtcacaagggatcaatatctgcacagttcgcatgtatgtaatactggaaaggagaatgacacttagatggatgtgtcatgtgtgattgtgattattcatctctatattctagcgatacttgtaaagtatgtcatgctgcattttttaagatattgttttggtgtaataaaaagtaaattgatcataatcatctctatattctgttgatatatgtaaagcatgttatgc

SEQ ID NO: 54487 - DNA, 2280 bp, Zea Mays
cataatttttggttcagtagtttgggagatatcgaattttaaagttaaccatactgctgtctaaaacagattcagtcagttatcttgtcagatgttttagaactagtagatggcagaatttaattatccattgaatactgaagttgtagagtattttgtgtaaatactcctagagtatttgtttgatatcaccgctgttttaattttaaatatacaaaattaacaaacagcgctgctgctgtatgacatgtggttcagggtgggagtctttccactgggtcttggtttcaagtgtaggagtgttttgttgattgatggcaaatgtttgtaaaatatttgtactaagttttatgcccgctagcagggggctacactccagatcatgtctagtacatttcttcttcttcgatgaaggcaagtgaatgtagcggtggttgcttccgttctgacctgttatttctattgcctacactctaatattcagaagtattggattctttcataattggactctatggtgatgctttacttgcttgcattatactgatgatcaatcatatattgatgatgattatgattcgagtatgattcatgagattaattcacacccctgaaggtaaatgaagtattatttgaggttggtattgtatctgaaggtaaataaagtattatttaaggtttgtattgtatttgaaggaagtgaagtttattgataaatgtagcatgccatatacattgcatgactcatttgcatctgaagttttgtcgtgacctatggtccgaccgtaccggtacaatttagcatcttatgttgcccgaggaggggtacgatgtggcttcatacccttagaggtatgaaggcagaggacatatgcagtcattgaagtgatatttgcagatgatgtggttttataccctcagaggtatgaagatagagtacctacacattgcattcctatgcatacattgaagtgatatttgcaggtattgttgacgcagggaagtgttatagaacctattgtggttgttcgaggaaatgagatggtattggttatagtgggacttactgagttctatatctacaattatttctgatttttaattgtgactctttttaaaatgttgatgaattcaatttgtgattttaaatatctcgtcaaaataattcgcttgttgagatgtttcatctcactctttgcattactcaatgcaggtgcttgttgctcatcaagggaagtggggagtagcagcacatccaccttcactcttataataacgctgcttaggcgcagtcatgatttaattagaagcttcttgtcaaaggatgtttgtttctaactagttgtgcgcactgattaatttagctcatgtcgttatgattgtcttcccattgctagcagactattaatgtctattatgttttcttatcatgatatctatttatactttgttgcttccccgtttatgcaattttcaaaggagatgctgtcgaaattttatatacgaatgttagaagcgtagtttagtagcattctggggtgtttgtggatctcggggtgttacaataggtttcatgagtctttgaaatatgctactacgtacaagatagcacatgatccagatggaggtgtgaatgattgggtggttcaacatacttcaaggtcgaataagattgtgtgggggcaacaccaattcaaagtaatggatgatgtagatgctggaaagtatgaatgtgaatgcaagcattgtgagcatacaagtatgttatattaggtctgctatgtgtgcatcttttacgaacatttatgcatcttcagattgattgtattcctctggaatacatccttcagagatacacctactctgctatacaagatgtgactttttcaagggatgataagaatttgaagggtaaagacagtgagactaaatcatataggcaaaagatgttgcttaaaaaggcaatgaaagtagtgcatcatgcaagtctttcaaaggcggggcatgatagagccctagagatgatggatgaactacttttgctactttcgctgttggagccagatatagaagagtgacagggatgatgtaagagacatgccaggagaaaatctaccgacaagaagggcacatggtggtgaaattcaattggtgcctagtttacaagaaggtggtgtgtgcaatacccgatgtgctatgccgctacaaatactggaacatcacggtgttggacagttgcccactggcataccactgagagatgagtgcgcaacagatatg

SEQ ID NO: 54488 - DNA, 2805 bp, Zea Mays
aaggttgacatgtcagcggctggcgccatgggccccacccgctctcctccctagaagacgaaagctgtggtcgggctcgggcgtcctcctcctctcctccctccctccctcacccgcttcctcttcctcctcctcgcctcctccgcctcctttccgtccggccgtttcttcccaagtggcgccggtcccggtcccggtcccactcccagcaggtgccagcgcgcaacgggacgccggcagtgggtacacccgcgcgagcgcgaccatttccgcgccgtcgccgcccgtctcctacctaacctaacgcgcccccacccaatcgatcgcctatccgcctcgcctcgtctcgtctcgtcaggcgggggaggggtcggtcaaaggaacgggggcagggattccgttcccagttcctcccagccaccgaggagcgggcctcgacgctcctctggtcctgtcctcttcgccatggccgcgccggcctcgtcgccggtcgagttcctgctccaccgcccgctgccgcgccagcggaggaggccgccactggccggagcgttcttcgcgcccacggggctgtccggcgcaccgctgctccgcgcgctggcgtcgctcgcggcggacctgctggggaccccgccccctgccgtcgcagcgacggaacatcgacgcgctcatgcggaggctcgcgctgctctccgcgctcctcgactcgctcctgctcctcctcgccgacgaaggcgaggccgccttctccgacgccgccaacctctgcttccgcgagctctacgtcgtgctcttccgcgccgacctgctcgtctcctacgtcgcctccgccggccgcgcgtgggcgctgctacgggcgccccagctcgccgcctcgttccgcgaccttgacgccgagctcgcagtcgtcctcgacgtcctacccgccgcctcgctccgcctctcgtgggacgccgctcagtacctcgacttcctccgcgcgcgctgccgccgacgggcgccggcccactaccacgaccccgcggaggccgctctcggagactgcctcctcgccgccctgcgccacttcgagctcggccagccgccggacccctccatgctccgatccctcctccgccaaatcggcatctccgacgccgcttcttgccgctctgaaatcgagtacctggaggagcaaatcttgaaccaagaggaggacgccgacctccccctcatcggcggcgttgtcgccttgctccggttgctgctgtcatcggattggatggcgcaggagaacgcagtgactgcattgctcaatctatcaatctttgagccgaacaagacccggattatggaacaagaggattgcctgcatcttatcgtcagtgtgttgaagaacggtttgacaacagaggccaaggagaatgctgcagctacgctcttcagtttatctgtggtccatgactacaagaaaaagataatgaatgagccaggggctgtggaggagcttgcgtctatgctgaccaaggggacagcaaggggaaagaaagacgcagtgatggcattgttcaacctctcaacacacccagaaagctcaggacggatgcttgagtcatctgcagttgtatctttaattgagtcactgaggaatgataccgtttcggaggaagctgctggtgctctggctctgctgatgaagcagcctagcatcgtgcaccttgttggtagctctgaaacagtgatcactagccttgttgggttaatgaggcgtgggactccaaagggcaaggagaacgcagtgtcagctttgtatgagatatgccggagaggtggatcgacattggcacagcgcgtggcaaggatacccgggttgaacacggtaatgcagaacatcacgctcacaggaacgaagcgtgccaagaagaaggcaagcctgatcgtcaagatgtgccagagaagccaaatgccatcggcgctggcgctaggaagtaccttggcagtggtggatcattcgttggtagggaacagcagattgaggcgcgctccaagctttggcagcggggagttgtcaaaccctgtgtcaatttcagtgcctgtgccttagatggagaaagaacccccaaaaaaaaatccatttttgagagcccacataattgtcaccgcattcagtgagttttgtccctgaaattctttcattgcgtcctcaaatgaaggtatacagatttaatccaaagaatgaaatatatcagatgtgctcgtttgtatgtggctgtgaataactgtgcagatatataggtttacaggtagaattctggcttgacgtttccttggcaagcctggaaatcatttatttatttttgttcagtttcggaaacaccgaatatgtatgcgacttgctgtaaactgttcccataatttagtactcgccgcatttcacaaaatcgtaagtcgttttggctatgcgtaaggtatgtacctggaaaagccaaaacaatttacaaatggaattgtaataaaacagaggaggatgaattatcaacaaatgcgcctttagcatatacgtacatgtcttgctttcgatcgaccaaagagaactggtgctgcttgttgcatagcagagggaatggatgccaatctgaagaacatcccgagaaaggcagagcgctttgattcttgaagatatatttttcccccactgaagacaaccttcttgcaaaagaattgtcctctcaccagaatctgaatctcctccagaaagattatatacgtgtgcatgccaatctatgctggactatgaacagaaaccgtgtggaatattgtgttccc

SEQ ID NO: 54489 - DNA, 1569 bp, Zea Mays
atgtttgtctaccaaccttttgcgttactccttcatgtatgatcatggaaattgtgtttcgtgattaatttcatgccgattatgtctggcagatcgaccagcatcgatagctaatctcatattggtcattggtgctgttgtggctggatatatcttctctggtttccaacacgggtttggattctcaggctccgagaaggtagaggcacctgaaaacgagcagcacgagagcagcacaatcgggaagccacctctggtggtggagagcctgaaagaggaaccaggagctgggtggccatccctcgggacgctaattgccgatctcttgaaacttgccatcgagggagtggggaaactgctactcagcgtagtccctcaacgcatgcaacacgggaagaggaagacagatctcaccccgctcagggacaggctggtgatgcccgaggacagagaggagacggcagcggcggcgcagaagctcagcagcacaccaatgcggcccgagacagcccacgcccctaaccccgtaaccgagacggcagcacccaaggccccgaagagcacgaagccatccaagctcagggattcttcgaccctgtcaagcaagcacaggtcctccaagcggcaggaatacgcggacttctacggcacctccgagcccgctcccgtaggtgccgccgccaaggtccccaaggacaggctccgccaccgccaccaccaccgcgagaagagcggggaggtcgcctacggcgccgcccatcacgacctgaagcccgcggaagcgaagcctgccgattacagcgatccgagctacgatccgtacgtgaggagcaagtatgccgccgagagtgggtacaggtattgacgtgtcgctagctgtcctgtcctgtcctctcctgccgggggaaacagcggaatgaaaacctttcgccggcgtctgcctggcaatgttgtaagtgtgaagctatatagcctccacaagcgcaaagcgaggcgcaaacaaagctgctgctggtgcctggtgctgctcatggtttggtggtgcccatgagatgtggcaagtagtcatcctagttaggttaggtatggacggccaggacggggttggcatctggcccggtttcaggatatgctaagtgcgattttcgcagagggcgacatgtagagcctggcggcggttttgatttcgtatctgcagttcgatgtatccatccatggatcgatcccttgtgcctgcctgcctctgcctggcggcgcgtgtcggcacctgacagcaggtgatgcctcgtgacgggcagttaacccttttgccggtggctcactgatctgctgcctgcctgcctggcccggacgtctgttcgctgtccctgaatgcgatgcatcgtctccgtttcggtctgcacgtcaggtctagttgtgccgaagctgtagccatcacaggccgacctggcgtcgagagaagcgaggatggctgtgtgtagtcaatctctgtcgtactactactgtccactaccagctttggtggcgtcggtccgcatggcatgtgactggaataggctccagttagag

SEQ ID NO: 54490 - DNA, 1532 bp, Zea Mays
aacaaaccaagatttgcaaaagttgtatgatgacttataaactgtgttcagtaaatgctatacatgtatgatccatatctcatattggtcattggtgctgttgtggctggatatatcttctctggtttccaacacgggtttggattctcaggctccgagaaggtagaggcacctgaaaacgagcagcacgagagcagcacaatcgggaagccacctctggtggtggagagcctgaaagaggaaccaggagctgggtggccatccctcgggacgctaattgccgatctcttgaaacttgccatcgagggagtggggaaactgctactcagcgtagtccctcaacgcatgcaacacgggaagaggaagacagatctcaccccgctcagggacaggctggtgatgcccgaggacagagaggagacggcagcggcggcgcagaagctcagcagcacaccaatgcggcccgagacagcccacgcccctaaccccgtaaccgagacggcagcacccaaggccccgaagagcacgaagccatccaagctcagggattcttcgaccctgtcaagcaagcacaggtcctccaagcggcaggaatacgcggacttctacggcacctccgagcccgctcccgtaggtgccgccgccaaggtccccaaggacaggctccgccaccgccaccaccaccgcgagaagagcggggaggtcgcctacggcgccgcccatcacgacctgaagcccgcggaagcgaagcctgccgattacagcgatccgagctacgatccgtacgtgaggagcaagtatgccgccgagagtgggtacaggtattgacgtgtcgctagctgtcctgtcctgtcctctcctgccgggggaaacagcggaatgaaaacctttcgccggcgtctgcctggcaatgttgtaagtgtgaagctatatagcctccacaagcgcaaagcgaggcgcaaacaaagctgctgctggtgcctggtgctgctcatggtttggtggtgcccatgagatgtggcaagtagtcatcctagttaggttaggtatggacggccaggacggggttggcatctggcccggtttcaggatatgctaagtgcgattttcgcagagggcgacatgtagagcctggcggcggttttgatttcgtatctgcagttcgatgtatccatccatggatcgatcccttgtgcctgcctgcctctgcctggcggcgcgtgtcggcacctgacagcaggtgatgcctcgtgacgggcagttaacccttttgccggtggctcactgatctgctgcctgcctgcctggcccggacgtctgttcgctgtccctgaatgcgatgcatcgtctccgtttcggtctgcacgtcaggtctagttgtgccgaagctgtagccatcacaggccgacctggcgtcgagagaagcgaggatggctgtgtgtagtcaatctctgtcgtactactactgtccactaccagctttggtggcgtcggtccgcatggcatgtgactggaataggctccagttagag

SEQ ID NO: 54491 - DNA, 2075 bp, Zea Mays
ctcactgataattatttcagtatcgttctccttcacttcagctggccctgcattgatggccacgtgggggtagccctgcaatttgagagcggctactttgtagagacacttgttgagggtgacaagcttggtgtcacgccgcacaccgttagagtatctcctgttgagggcggggagctccttgcggtcgactcggcacatagcaacattgtgcggataaccccgccactttctgagtatagcaggggaagacttgttgctggttctttccagggccattctggtcatatagatggtaaaccaagtgatgcccgattcaagcgccccacaggcgttgccgtggatgatatgggcaatgtttatgttgctgatacagcaaacttggcgattcgaaagattggagaatcaggagtgaccaccatagcgggtggtaaatcgaatatcccaggatacagggatggccccagtgaagatgcaaagttctctacagattttgatgtggtgtatgtgaagaaaatgtgttctcttctggttattgaccgtggaaatgcagcccttaggaagatttctcttccacaagaagactgtacttaccaggattctgcactcctatcttcagatctcatattggtcattggtgctgttgtggctggatatatcttctctggtttccaacacgggtttggattctcaggctccgagaaggtagaggcacctgaaaacgagcagcacgagagcagcacaatcgggaagccacctctggtggtggagagcctgaaagaggaaccaggagctgggtggccatccctcgggacgctaattgccgatctcttgaaacttgccatcgagggagtggggaaactgctactcagcgtagtccctcaacgcatgcaacacgggaagaggaagacagatctcaccccgctcagggacaggctggtgatgcccgaggacagagaggagacggcagcggcggcgcagaagctcagcagcacaccaatgcggcccgagacagcccacgcccctaaccccgtaaccgagacggcagcacccaaggccccgaagagcacgaagccatccaagctcagggattcttcgaccctgtcaagcaagcacaggtcctccaagcggcaggaatacgcggacttctacggcacctccgagcccgctcccgtaggtgccgccgccaaggtccccaaggacaggctccgccaccgccaccaccaccgcgagaagagcggggaggtcgcctacggcgccgcccatcacgacctgaagcccgcggaagcgaagcctgccgattacagcgatccgagctacgatccgtacgtgaggagcaagtatgccgccgagagtgggtacaggtattgacgtgtcgctagctgtcctgtcctgtcctctcctgccgggggaaacagcggaatgaaaacctttcgccggcgtctgcctggcaatgttgtaagtgtgaagctatatagcctccacaagcgcaaagcgaggcgcaaacaaagctgctgctggtgcctggtgctgctcatggtttggtggtgcccatgagatgtggcaagtagtcatcctagttaggttaggtatggacggccaggacggggttggcatctggcccggtttcaggatatgctaagtgcgattttcgcagagggcgacatgtagagcctggcggcggttttgatttcgtatctgcagttcgatgtatccatccatggatcgatcccttgtgcctgcctgcctctgcctggcggcgcgtgtcggcacctgacagcaggtgatgcctcgtgacgggcagttaacccttttgccggtggctcactgatctgctgcctgcctgcctggcccggacgtctgttcgctgtccctgaatgcgatgcatcgtctccgtttcggtctgcacgtcaggtctagttgtgccgaagctgtagccatcacaggccgacctggcgtcgagagaagcgaggatggctgtgtgtagtcaatctctgtcgtactactactgtccactaccagctttggtggcgtcggtccgcatggcatgtgactggaataggctccagttagag

SEQ ID NO: 54492 - DNA, 2302 bp, Zea Mays
gcggagcacaagagaatcgagaacgtcaccaaggccgtctgaaagcgaaaaggccctttgcctctcgctctaccccaaaccacagcagtcagcagcagaccctcgccatgggactgagatccccgctcgtgctcctgctgctcctcctcttcctcgccgctactttccgtcccagcgcggccgctttggcccctccaacaggcagcatcgtgaagcagctgtcgtcggtcgtcaggtggccgcgggccgccccctcgacgcacgggcccaaacagcccggccacccccagtacgccgatggccacgtgggggtagccctgcaatttgagagcggctactttgtagagacacttgttgagggtgacaagcttggtgtcacgccgcacaccgttagagtatctcctgttgagggcggggagctccttgcggtcgactcggcacatagcaacattgtgcggataaccccgccactttctgagtatagcaggggaagacttgttgctggttctttccagggccattctggtcatatagatggtaaaccaagtgatgcccgattcaagcgccccacaggcgttgccgtggatgatatgggcaatgtttatgttgctgatacagcaaacttggcgattcgaaagattggagaatcagcgggtggtaaatcgaatatcccaggatacagggatggccccagtgaagatgcaaagttctctacagattttgatgtggtgtatgtgaagaaaatgtgttctcttctggttattgaccgtggaaatgcagcccttaggaagatttctcttccacaagaagactgtacttaccaggattctgcactcctatcttcagatctcatattggtcattggtgctgttgtggctggatatatcttctctggtttccaacacgggtttggattctcaggctccgagaaggtagaggcacctgaaaacgagcagcacgagagcagcacaatcgggaagccacctctggtggtggagagcctgaaagaggaaccaggagctgggtggccatccctcgggacgctaattgccgatctcttgaaacttgccatcgagggagtggggaaactgctactcagcgtagtccctcaacgcatgcaacacgggaagaggaagacagatctcaccccgctcagggacaggctggtgatgcccgaggacagagaggagacggcagcggcggcgcagaagctcagcagcacaccaatgcggcccgagacagcccacgcccctaaccccgtaaccgagacggcagcacccaaggccccgaagagcacgaagccatccaagctcagggattcttcgaccctgtcaagcaagcacaggtcctccaagcggcaggaatacgcggacttctacggcacctccgagcccgctcccgtaggtgccgccgccaaggtccccaaggacaggctccgccaccgccaccaccaccgcgagaagagcggggaggtcgcctacggcgccgcccatcacgacctgaagcccgcggaagcgaagcctgccgattacagcgatccgagctacgatccgtacgtgaggagcaagtatgccgccgagagtgggtacaggtattgacgtgtcgctagctgtcctgtcctgtcctctcctgccgggggaaacagcggaatgaaaacctttcgccggcgtctgcctggcaatgttgtaagtgtgaagctatatagcctccacaagcgcaaagcgaggcgcaaacaaagctgctgctggtgcctggtgctgctcatggtttggtggtgcccatgagatgtggcaagtagtcatcctagttaggttaggtatggacggccaggacggggttggcatctggcccggtttcaggatatgctaagtgcgattttcgcagagggcgacatgtagagcctggcggcggttttgatttcgtatctgcagttcgatgtatccatccatggatcgatcccttgtgcctgcctgcctctgcctggcggcgcgtgtcggcacctgacagcaggtgatgcctcgtgacgggcagttaacccttttgccggtggctcactgatctgctgcctgcctgcctggcccggacgtctgttcgctgtccctgaatgcgatgcatcgtctccgtttcggtctgcacgtcaggtctagttgtgccgaagctgtagccatcacaggccgacctggcgtcgagagaagcgaggatggctgtgtgtagtcaatctctgtcgtactactactgtccactaccagctttggtggcgtcggtccgcatggcatgtgactggaataggctccagttagag

SEQ ID NO: 54493 - DNA, 879 bp, Zea Mays
gcggagcacaagagaatcgagaacgtcaccaaggccgtctgaaagcgaaaaggccctttgcctctcgctctaccccaaaccacagcagtcagcagcagaccctcgccatgggactgagatccccgctcgtgctcctgctgctcctcctcttcctcgccgctactttccgtcccagcgcggccgctttggcccctccaacaggcagcatcgtgaagcagctgtcgtcggtcgtcaggtggccgcgggccgccccctcgacgcacgggcccaaacagcccggccacccccagtacgccgatggccacgtgggggtagccctgcaatttgagagcggctactttgtagagacacttgttgagggtgacaagcttggtgtcacgccgcacaccgttagagtatctcctgttgagggcggggagctccttgcggtcgactcggcacatagcaacattgtgcggataaccccgccactttctgagtatagcaggggaagacttgttgctggttctttccagggccattctggtcatatagatggtaaaccaagtgatgcccgattcaagcgccccacaggcgttgccgtggatgatatgggcaatgtttatgttgctgatacagcaaacttggcgattcgaaagattggagaatcaggagtgaccaccatagcgggtggtaaatcgaatatcccaggatacagggatggccccagtgaagatgcaaagttctctacagattttgatgtggtgtatgtgaagaaaatgtgttctcttctggttattgaccgtggaaatgcagcccttaggaagatttctcttccacaagaagactgtacttaccaggattctgcactcctatcttcagatgatgaggtccttgaag

SEQ ID NO: 54494 - DNA, 1121 bp, Zea Mays
aacggatggatccgccccgcccctctcgcggccgtaaaaaatcgtgttgcctcccatccttacccaatcccctctcatcgcggcacaggcgcaggcgagcggccgtccgtccaggcgtccgtccaagcgaactggttcaatcgtccaggcgagcggccgtccgtccatgcgttggattccaagaaccgttgggagggttcagcacatgatgctttagtactaagagatgctttagagcgagagaatggccttcgtgtaccacaaggaaaattctatctagtggacgctggatatggagccaaacctggatttttgcccccttttcgtgttgtccggtatcacttgaatgaatggggaaataatccggtacaaaatgagaaggagttgttcaaccttaggcactcgtctcttcgtgtcaccgtagagcgtgcatttggttcactgaagagaagatttaaaatacttgatgatgccacaccattctttccattttctagtatgaaacatagattgatgagggagatgttaatgctgttcctagtcctatagatgatattggggcttcatcctcagctcctagacctaggaagaaggcaaaggttactagtaatgaagaggcagggctgattggagcattcaaagatggtgctgaaaggcttgcaatggctattgagaaggctagttcagatgacctaccacctgacttgcttcaaacattgcaaagtattccaggttttgatgacacacacaaggccttttactttgcatatctagtgaaaaatcctggattagcaaggcagttccctactctcccattgacatatcagataagttttcttgctcggttcgttagtgagacctttccttagattatgaggaccgggaattaggactatgctggaggttaagtggaaattagaactatgttgttcttttgttatgtaaaccatgaccaatactttgttttcaagtactggtattgaaataatggctttgctatgtcgaaatactcggtttgttatgaaatactgggtttgttatgaccaacatggatgctcggtttgtttgttttgaaatactgggtttgagattcattgtaatggtgtatgctcagtttgttt

SEQ ID NO: 54495 - DNA, 2082 bp, Zea Mays
gcggaaaacaaatccgtctcttcccaccaccaaggcaccaaccgccgccatcgtgtgatggccgccacgcccgacgagcggaagcaggagaggccgatgaggcccgcgacgtcgccggcgagcgtggtggcggacttcgccatgggaggcgcggccgccgtggtggcaaagacgggggccgcgccggtcgagcgcgtcaagctgctgctccagaaccaggccgagatgctgcgccgcggcaccctcacgcgcccctacaggggcatcgccgacgccttcacccgcatcctccgcgaggagggccccgccgcgctttggcgtggcaaccaggccaacgtcatccgctacttccccacccagggagaaagacggaaagtggaagtggttagctggaaatgtagcatctggcagtgctgccggagctacaacatcattgctgctataccatctagattatgcaagaacaaggctagctactgatgcaattgaatcacggggaaccaagcgccagttcagggggttgctggatgtttacaagaagacacttacaaccgatggcatgtctggactataccgaggggaatttcttcgccagttttgtgttgggctggacaataactacgttctctggggcttgtgcctatccattcgacacggtccgtcgtagaatgatgttaacttcaggagaaccatttaaatacaagaacggtttccatgcagtaaaactgatagtttcaaccgaagggttcttcacattattcagaggtgttggtgcaaatattctctcagggctggcaggggctggagttctttctgggtatgatcaactccaacggttggcaagccggcatgatcaaaattttgagcacaatatgaaaggggcattgaaatgatgtgcatatgatatgaatagattcagatccttggttgaagtccagatcattcaaatgggatgctcaagcaagaactcctgagcctgaagaacttcgcaaaaaatattgggggaagaaaaaggaaaagttttcctggagatgaatttcacaaggagatggaatcattgcaacaaaagataactcttgtaaacagagagtgctgaatatatattttaatgtgtagatctaatccttcaagtatgagcacatgtacatgttggtgtttcttcgattgttagaggcaatagtatcctatcaatgtgaaatgtaaatccaaatccttcagtaggtcatgaccaagctatttttctaaaaagggatggacatcttgactcttgaggaaggttcttcagttacagatttggatttttgctaacatcatatgagcatgtcatgtgcagatgcaaatgacatttttgcaggagtgtcagaccttttttgaagtgacaggattcaagtggatatcgtatccattaatctgtgcatcactcaaaagaagagcaaaggagcctctaatccccatctgtctctgattctgatcatctccagggagccgagtaattgccactgcgctgggactgaacaactgaaaggagggaggctgatgagccgtgtgagctcactgggaggtgcagtcgccatggtgaccaagatggggaccatgccagtggaatgtgccaagctgctgctcctgaagaccagaactatgatgagatgaggctaggggccctcacatactcatacaatggcatcaacgacacattcactcacatcttccacgagtagggtgccgcttcaaccagtgaggagctaaatacatctaagcttccttcctacttctggcttggatcacagactaatggacctgaatgttgtttctaagtggtgcacaggcaccagctctgcccccgctggtgtccttactcgtgagctttcatgagatgatacagataaccttgagtgttgcttttaggttgtaatattatcagtgacaaagagttcctgtcattatttcattcaatcattacttgtatgactgttacttcatacttttgttattgttgctgccctgatggttgagtaccagtactgttaattgctttgtggcacagacgtcagtgaaacaaaattaagatgcatttaaagagtt

SEQ ID NO: 54496 - DNA, 2205 bp, Zea Mays
gcggaaaacaaatccgtctcttcccaccaccaaggcaccaaccgccgccatcgtgtgatggccgccacgcccgacgagcggaagcaggagaggccgatgaggcccgcgacgtcgccggcgagcgtggtggcggacttcgccatgggaggcgcggccgccgtggtggcaaagacgggggccgcgccggtcgagcgcgtcaagctgctgctccagaaccaggccgagatgctgcgccgcggcaccctcacgcgcccctacaggggcatcgccgacgccttcacccgcatcctccgcgaggagggccccgccgcgctttggcgtggcaaccaggccaacgtcatccgctacttccccacccagggagaaagacggaaagtggaagtggttagctggaaatgtagcatctggcagtgctgccggagctacaacatcattgctgctataccatctagattatgcaagaacaaggctagctactgatgcaattgaatcacggggaaccaagcgccagttcagggggttgctggatgtttacaagaagacacttacaaccgatggcatgtctggactataccgaggtttcagtgtgtctattacgggaatctccttataccggggtttatattttggtatctatgatagcatgaagcctctagttctagtaggcccattggaggggaatttcttcgccagttttgtgttgggctggacaataactacgttctctggggcttgtgcctatccattcgacacggtccgtcgtagaatgatgttaacttcaggagaaccatttaaatacaagaacggtttccatgcagtaaaactgatagtttcaaccgaagggttcttcacattattcagaggtgttggtgcaaatattctctcagggctggcaggggctggagttctttctgggtatgatcaactccaacggttggcaagccggcatgatcaaaattttgagcacaatatgaaaggggcattgaaatgatgtgcatatgatatgaatagattcagatccttggttgaagtccagatcattcaaatgggatgctcaagcaagaactcctgagcctgaagaacttcgcaaaaaatattgggggaagaaaaaggaaaagttttcctggagatgaatttcacaaggagatggaatcattgcaacaaaagataactcttgtaaacagagagtgctgaatatatattttaatgtgtagatctaatccttcaagtatgagcacatgtacatgttggtgtttcttcgattgttagaggcaatagtatcctatcaatgtgaaatgtaaatccaaatccttcagtaggtcatgaccaagctatttttctaaaaagggatggacatcttgactcttgaggaaggttcttcagttacagatttggatttttgctaacatcatatgagcatgtcatgtgcagatgcaaatgacatttttgcaggagtgtcagaccttttttgaagtgacaggattcaagtggatatcgtatccattaatctgtgcatcactcaaaagaagagcaaaggagcctctaatccccatctgtctctgattctgatcatctccagggagccgagtaattgccactgcgctgggactgaacaactgaaaggagggaggctgatgagccgtgtgagctcactgggaggtgcagtcgccatggtgaccaagatggggaccatgccagtggaatgtgccaagctgctgctcctgaagaccagaactatgatgagatgaggctaggggccctcacatactcatacaatggcatcaacgacacattcactcacatcttccacgagtagggtgccgcttcaaccagtgaggagctaaatacatctaagcttccttcctacttctggcttggatcacagactaatggacctgaatgttgtttctaagtggtgcacaggcaccagtgcacaaccgttgtttattggttagctctgcccccgctggtgtccttactcgtgagctttcatgagatgatacagataaccttgagtgttgcttttaggttgtaatattatcagtgacaaagagttcctgtcattatttcattcaatcattacttgtatgactgttacttcatacttttgttattgttgctgccctgatggttgagtaccagtactgttaattgctttgtggcacagacgtcagtgaaacaaaattaagatgcatttaaagagtt

SEQ ID NO: 54497 - DNA, 2170 bp, Zea Mays
gcggaaaacaaatccgtctcttcccaccaccaaggcaccaaccgccgccatcgtgtgatggccgccacgcccgacgagcggaagcaggagaggccgatgaggcccgcgacgtcgccggcgagcgtggtggcggacttcgccatgggaggcgcggccgccgtggtggcaaagacgggggccgcgccggtcgagcgcgtcaagctgctgctccagaaccaggccgagatgctgcgccgcggcaccctcacgcgcccctacaggggcatcgccgacgccttcacccgcatcctccgcgaggagggccccgccgcgctttggcgtggcaaccaggccaacgtcatccgctacttccccacccaggcttttaactttgcattcaggggctatttcaaaagcttttttggctatgacagggagaaagacggaaagtggaagtggttagctggaaatgtagcatctggcagtgctgccggagctacaacatcattgctgctataccatctagattatgcaagaacaaggctagctactgatgcaattgaatcacggggaaccaagcgccagttcagggggttgctggatgtttacaagaagacacttacaaccgatggcatgtctggactataccgaggtttcagtgtgtctattacgggaatctccttataccggggtttatattttggtatctatgatagcatgaagcctctagttctagtaggcccattggaggggaatttcttcgccagttttgtgttgggctggacaataactacgttctctggggcttgtgcctatccattcgacacggtccgtcgtagaatgatgttaacttcaggagaaccatttaaatacaagaacggtttccatgcagtaaaactgatagtttcaaccgaagggttcttcacattattcagaggtgttggtgcaaatattctctcagggctggcaggggctggagttctttctgggtatgatcaactccaacggttggcaagccggcatgatcaaaattttgagcacaatatgaaaggggcattgaaatgatgtgcatatgatatgaatagattcagatccttggttgaagtccagatcattcaaatgggatgctcaagcaagaactcctgagcctgaagaacttcgcaaaaaatattgggggaagaaaaaggaaaagttttcctggagatgaatttcacaaggagatggaatcattgcaacaaaagataactcttgtaaacagagagtgctgaatatatattttaatgtgtagatctaatccttcaagtatgagcacatgtacatgttggtgtttcttcgattgttagaggcaatagtatcctatcaatgtgaaatgtaaatccaaatccttcagtaggtcatgaccaagctatttttctaaaaagggatggacatcttgactcttgaggaaggttcttcagttacagatttggatttttgctaacatcatatgagcatgtcatgtgcagatgcaaatgacatttttgcaggagtgtcagaccttttttgaagtgacaggattcaaggagccgagtaattgccactgcgctgggactgaacaactgaaaggagggaggctgatgagccgtgtgagctcactgggaggtgcagtcgccatggtgaccaagatggggaccatgccagtggaatgtgccaagctgctgctcctgaagaccagaactatgatgagatgaggctaggggccctcacatactcatacaatggcatcaacgacacattcactcacatcttccacgagtagggtgccgcttcaaccaggtcaatgacatccactacttcccacccaatgaggagctaaatacatctaagcttccttcctacttctggcttggatcacagactaatggacctgaatgttgtttctaagtggtgcacaggcaccagctctgcccccgctggtgtccttactcgtgagctttcatgagatgatacagataaccttgagtgttgcttttaggttgtaatattatcagtgacaaagagttcctgtcattatttcattcaatcattacttgtatgactgttacttcatacttttgttattgttgctgccctgatggttgagtaccagtactgttaattgctttgtggcacagacgtcagtgaaacaaaattaagatgcatttaaagagtt

SEQ ID NO: 54498 - DNA, 2117 bp, Zea Mays
gcggaaaacaaatccgtctcttcccaccaccaaggcaccaaccgccgccatcgtgtgatggccgccacgcccgacgagcggaagcaggagaggccgatgaggcccgcgacgtcgccggcgagcgtggtggcggacttcgccatgggaggcgcggccgccgtggtggcaaagacgggggccgcgccggtcgagcgcgtcaagctgctgctccagaaccaggccgagatgctgcgccgcggcaccctcacgcgcccctacaggggcatcgccgacgccttcacccgcatcctccgcgaggagggccccgccgcgctttggcgtggcaaccaggccaacgtcatccgctacttccccacccagggagaaagacggaaagtggaagtggttagctggaaatgtagcatctggcagtgctgccggagctacaacatcattgctgctataccatctagattatgcaagaacaaggctagctactgatgcaattgaatcacggggaaccaagcgccagttcagggggttgctggatgtttacaagaagacacttacaaccgatggcatgtctggactataccgaggtttcagtgtgtctattacgggaatctccttataccggggtttatattttggtatctatgatagcatgaagcctctagttctagtaggcccattggaggggaatttcttcgccagttttgtgttgggctggacaataactacgttctctggggcttgtgcctatccattcgacacggtccgtcgtagaatgatgttaacttcaggagaaccatttaaatacaagaacggtttccatgcagtaaaactgatagtttcaaccgaagggttcttcacattattcagaggtgttggtgcaaatattctctcagggctggcaggggctggagttctttctgggtatgatcaactccaacggttggcaagccggcatgatcaaaattttgagcacaatatgaaaggggcattgaaatgatgtgcatatgatatgaatagattcagatccttggttgaagtccagatcattcaaatgggatgctcaagcaagaactcctgagcctgaagaacttcgcaaaaaatattgggggaagaaaaaggaaaagttttcctggagatgaatttcacaaggagatggaatcattgcaacaaaagataactcttgtaaacagagagtgctgaatatatattttaatgtgtagatctaatccttcaagtatgagcacatgtacatgttggtgtttcttcgattgttagaggcaatagtatcctatcaatgtgaaatgtaaatccaaatccttcagtaggtcatgaccaagctatttttctaaaaagggatggacatcttgactcttgaggaaggttcttcagttacagatttggatttttgctaacatcatatgagcatgtcatgtgcagatgcaaatgacatttttgcaggagtgtcagaccttttttgaagtgacaggattcaaggagccgagtaattgccactgcgctgggactgaacaactgaaaggagggaggctgatgagccgtgtgagctcactgggaggtgcagtcgccatggtgaccaagatggggaccatgccagtggaatgtgccaagctgctgctcctgaagaccagaactatgatgagatgaggctaggggccctcacatactcatacaatggcatcaacgacacattcactcacatcttccacgagtagggtgccgcttcaaccaggtcaatgacatccactacttcccacccaatgaggagctaaatacatctaagcttccttcctacttctggcttggatcacagactaatggacctgaatgttgtttctaagtggtgcacaggcaccagctctgcccccgctggtgtccttactcgtgagctttcatgagatgatacagataaccttgagtgttgcttttaggttgtaatattatcagtgacaaagagttcctgtcattatttcattcaatcattacttgtatgactgttacttcatacttttgttattgttgctgccctgatggttgagtaccagtactgttaattgctttgtggcacagacgtcagtgaaacaaaattaagatgcatttaaagagtt

SEQ ID NO: 54499 - DNA, 2775 bp, Zea Mays
cagcccaaaatcccacatccgcacccatacggccacacactgaaacacagctatgtgtcgttaaaggcaaacagacccaggattatgtctccaattaaattcccagaaaactctgctcaactcgttctatcgtctgtcgtctcgctctccacatccgttgatccatcccttccaactccaatcaactccgtcccaaactacaatccgtggcaacagaaaaaggtgtatcttttaccagaaacagaagctagattcccggattgctccgcttgatcgctggtgaatcgacccaaccgagtggcccatggccggaaccgagcggctccaccgcccgattgacccgccgcggcccgcgggcagccgctccgtcgtggtcggtgctggtggctcgccggcgaggtgggacgacgataacgacgactgcggcggcggcggacgtgtcgaaggcttggcgggactccacatatttgaccaagaggcagaggagtcaccaaccaaaaacgacatggccaacagccttgatactaactgcactcccattgctaaaggatgcaacactgaaacaaccgaaacttctgtagagtcggaacctgtaaatgtcttgaacctgcttcatgatcataccggcatctgggtccctgtttctgtcccgcctatgacagcgctggccagcgaggattggcacagagggtttcgttgcaatggtgggcacttcccggaagaagagttcagctgggagctggatgaagacaataaggagatgacaatgtgggatgtttttgctgatatggctgtcgcagcaaaagataaggtgatatctgctgcaaaatatgagtatgggagatgtgggatgtcgacagtgtccaacttctttctacaagaggcttggaaggatatggcacaaacacttgtggatgcaaacactggtattgcgaatgagcttcttgagacagagccaactaagtggttgcctgacagtgctgccacctcttgcatgctctgtggcgtgcgatttcatccaataatgtgctctcgccatcattgtcgtttctgtggtggagtattctgcaatggctgttcaaatggcagaagcttgatgcctccaaaatttaggactgcagatcctcagagggtttgtgatgtctgcggagtacgtctagagagtatccaacctcaattgatgaatcagattagtcgggcctcacaacttccaactcgggatgtcacagacctgagtaccttgaggtcatggctgaatttcccttggtcacacacaatggaatatgagatatacaaggctgcaaattctttacgtagttactgtaaggtatgcctttttatactccttaattattgactagttctattacgatagcctttatcgttgtcttcttttttggctgctttcattttcatgtagtcttctgtattcttatcaaatgttattgtgttaaagagtagtgccgaccaatatttcgcaccaaacaggaaaacactaatatgcttgataatgataacactacaacaaatatagcaatcctacactggtgttgataaactgatgtcatgaaatcatgtagggaaatgtgtttcacaagtcatcaaatgttgttgttttctgtttgtatagtaattagttggatgaacatttggacaaattgagtcgtgtgggtaaaagatgacatggaacactggcaaattatttttttctagtgcaataatacaatacagtctggatatgtgattctaatcactgaaatgaacctaggcaaaagaaaaaatgcgtaggcatctgtaaaaaaaatcaatttcttaagtaaataactgcttgtagttccccaatctgcattttagtaactctagattatttaagctcaacttagttgttctggggaattttattatttggaaattacttagtcattgtattcttatgaaatactggaaatgatgttactctggctgtggggctgctgatttttcaggtgggaagactgaaaccagagaagtctatccctgatactattcttagacaagcaaaaggccttgctatagttactgtggtgaaggttgggatgatggttacatacaaacttggcagtgggctggttgttgctcgaagagtggatggctcctggtcaccaccgtcagcaatctccacctgtggtattggatatggggctcaggctggaggtgagatagctgactttattattgttctgaggaacacggatgccatcaaaacattcagtgggaaggcacatctatctgttggtgctggtgttagcgcttctgctggccatgttggacgtgcagctgaagctgacttccgtgctggtgatggtggttatgccgcatgttatacatacagttgtagcaaaggtgcctttgtgggctgtgcgttgaatggcggcatagtatcaactagagacactgagaacgcacgattttacggaggtcctgtccaggcatctgatatccttctaggatcgacggcgaggccgcctgcagcctctcctctgtacaaagctctgtcagaattatttgacaagattggaaagtaatcctctctcttgcagaccctgcctcaccttgtaaatacaatcgaatttgtgcccttcaggaattggttggaaacaattgcgcaactgtacagtaaggccattcttcaacacgtcaaatgtgtttagtgatgctaccaacaaaaccactctgtaaatatttgtacattggattgacaatcgcatcaagatgtgaaaaaaggtgtttattctt

SEQ ID NO: 54500 - DNA, 2168 bp, Zea Mays
ctcactttacctccctttgctacgtccgatcaatttggctagttttagtcagaactcagcccaaaatcccacatccgcacccatacggccacacactgaaacacagctatgtgtcgttaaaggcaaacagacccaggattatgtctccaattaaattcccagaaaactctgctcaactcgttctatcgtctgtcgtctcgctctccacatccgttgatccatcccttccaactccaatcaactccgtcccaaactacaatccgtggcaacagaaaaaggtgtatcttttaccagaaacagaagctagattcccggattgctccgcttgatcgctggtgaatcgacccaaccgagtggcccatggccggaaccgagcggctccaccgcccgattgacccgccgcggcccgcgggcagccgctccgtcgtggtcggtgctggtggctcgccggcgaggtgggacgacgataacgacgactgcggcggcggcggacgtgtcgaaggcttggcgggactccacatatttgaccaagaggcagaggagtcaccaaccaaaaacgacatggccaacagccttgatactaactgcactcccattgctaaaggatgcaacactgaaacaaccgaaacttctgtagagtcggaacctgtaaatgtcttgaacctgcttcatgatcataccggcatctgggtccctgtttctgtcccgcctatgacagcgctggccagcgaggattggcacagagggtttcgttgcaatggtgggcacttcccggaagaagagttcagctgggagctggatgaagacaataaggagatgacaatgtgggatgtttttgctgatatggctgtcgcagcaaaagataaggtgatatctgctgcaaaatatgagtatgggagatgtgggatgtcgacagtgtccaacttctttctacaagaggcttggaaggatatggcacaaacacttgtggatgcaaacactggtattgcgaatgagcttcttgagacagagccaactaagtggttgcctgacagtgctgccacctcttgcatgctctgtggcgtgcgatttcatccaataatgtgctctcgccatcattgtcgtttctgtggtggagtattctgcaatggctgttcaaatggcagaagcttgatgcctccaaaatttaggactgcagatcctcagagggtttgtgatgtctgcggagtacgtctagagagtatccaacctcaattgatgaatcagattagtcgggcctcacaacttccaactcgggatgtcacagacctgagtaccttgaggtcatggctgaatttcccttggtcacacacaatggaatatgagatatacaaggctgcaaattctttacgtagttactgtgggaagactgaaaccagagaagtctatccctgatactattcttagacaagcaaaaggccttgctatagttactgtggtgaaggttgggatgatggttacatacaaacttggcagtgggctggttgttgctcgaagagtggatggctcctggtcaccaccgtcagcaatctccacctgtggtattggatatggggctcaggctggaggtgagatagctgactttattattgttctgaggaacacggatgccatcaaaacattcagtgggaaggcacatctatctgttggtgctggtgttagcgcttctgctggccatgttggacgtgcagctgaagctgacttccgtgctggtgatggtggttatgccgcatgttatacatacagttgtagcaaaggtgcctttgtgggctgtgcgttgaatggcggcatagtatcaactagagacactgagaacgcacgattttacggaggtcctgtccaggcatctgatatccttctaggatcgacggcgaggccgcctgcagcctctcctctgtacaaagctctgtcagaattatttgacaagattggaaagtaatcctctctcttgcagaccctgcctcaccttgtaaatacaatcgaatttgtgcccttcaggaattggttggaaacaattgcgcaactgtacagtaaggccattcttcaacacgtcaaatgtgtttagtgatgctaccaacaaaaccactctgtaaatatttgtacattggattgacaatcgcatcaagatgtgaaaaaaggtgtttattctt

SEQ ID NO: 54501 - DNA, 671 bp, Zea Mays
ttgatatatcagcggcaaactcttctcagttttattctgtccacgtggaggattatctgatgaaagaaaacagttcttggtttgcaaaatcaactctactgaaaataggagatggaaaatggattttagaaacgtgaggaggatgaagttgtagttgctgccttgccggtgttctccctttggattaatatatagcacgagcagatggtgtgttgaagggcgccgtcaatggtaagaggacgccgaggatggaaggggccggtggtgaggcttggattttgcttcccctccacgacttccacatggatcccatacatcccggcatcagcgtgtattccttccatgagggaggcgtggattgggtggaggaagttgtgcctgcgcgtgccgtctatggaagggggagccatgaccgccactgtagagtagattgggcggaggctaggtgcgcgggggagggaggttcggtggcggcatgccgagatctgcggtggggacagaggtgcgaggggagggaggttcggtggcagctaggtgggagtcgatcttgtacatctttttggcggagcgcgaggtatggaggaggtcaacttcttctcgctgacgaagaccacaccgtcgcccaccaggatcccgagggctgactcgcagtccgtgttgctccggagcgc

SEQ ID NO: 54502 - DNA, 951 bp, Zea Mays
gtcacaacttggagaagctactatagcagtattggacactgaacaacaagcacataaattgaaatggcatactaaaaatgaattgtattgaaatggcatactgagtttgtgtccttcaacaaactgtattgaaatcaactcttctcagttttaaaaacaagcatgtacatactttgatatatcagcggcaaactcttctcagttttattctgtccacgtggaggattatctgatgaaagaaaacagttcttggtttgcaaaatcaactctactgaaaataggagatggaaaatggattttagaaacgtgaggaggatgaagttgtagttgctgccttgccggtgttctccctttggattaatatatagcacgagcagatggtgtgttgaagggcgccgtcaatggtaagaggacgccgaggatggaaggggccggtggtgaggcttggattttgcttcccctccacgacttccacatggatcccatacatcccggcatcagcgtgtattccttccatgagggaggcgtggattgggtggaggaagttgtgcctgcgcgtgccgtctatggaagggggagccatgaccgccactgtagagtagattgggcggaggctaggtgcgcgggggaggtgcggggcatgtggtggaggctgtatccagatattgggcggaggctaggtgcgcggggcatgtggggggaggtgcggggtgggggaggaaggtgcgggggctactccctggggcgcggcggcatgctgagatctacacgcagggacggaggtgtggggggagtgaggttcggtggcagctaggtgggagtcgatcttgtacatctttttggcggagcgcgaggtatggaggaggtcaacttcttctcgctgacgaagaccacaccgtcgcccaccaggatcccgagggctgactcgcagtccgtgttgctccggagcgc

SEQ ID NO: 54503 - DNA, 2125 bp, Zea Mays
ttttaggaaaacaacgatttcatcaacctctaaaacattcagtgtgctcctagacctcctaactcgtagatagcaccattttaagagaacctaaacctcctaactgaacaacttgtctatacataggaagatagaagcttcatttcgagagaagttgaaccatcttcctaacagtgtgtcacaacttggagaagctactatagcagtattggacactgaacatcaagcacataaattgaaatggcatactggaaatgaaacttcaacgaacagctatattaatcaagcacactgagtttatgtattgcaatgtcttatgtattgaaatcaagcaaacctttgtactatacataaacaaatctctgaatacagtgacacttgaacatgcatgccactttcaagtaaaataaagatttttcagtactgtaggttggtacaaaaacaaataaatgccagtctaggaaaattggttacctcctttacgattgatgtggtgtcacattgtaaatactattgatcggttacctcctttaccaaacagaaacaagtacttgagcctttttacaaagacagatacattaggtagataaggtattcattgtgcttttgaaaaggtatttttagcagaaatcacatacatttaatcaaaatcttcttggcacataaatgttcatcagacaattcgtagatagcaccaatttaagagaactcttatacctactctagcagtattggacacgaacatcaagcacatggcatactgaaaatgaagcttcaacgaacaactgtatgaaatctgagtttgtgtccttcaatgttttatgtattgaaatcaagaaaatgaatcaaactgagagaaaagacccaataaagaaattggaattaaatctattttatactcggggaacacatctaacatgttcaccattgaccaaaagtatgaagagaaaaaatttacaagaaactggatatgattactaattttttggttgtcacatcgtatcccagtggagtatagtgatgatgttgtcacataatgtaactgaacactttcattgttgcagttatacataaaatcattttgcaaaatctgctcttctccatctgcctaacagtttgacacaatttggagaagctactctagcagttttggacaatgaacaacaagcacataaattgaaatggcatactaaaaatgaattgtattgaaatggcatactgagtttgtgtccttcaacaaactgtattgaaatcaactcttctcagttttaaaaacaagcatgtacatactttgatatatcagcggcaaactcttctcagttttattctgtccacgtggaggattatctgatgaaagaaaacagttcttggtttgcaaaatcaactctactgaaaataggagatggaaaatggattttagaaacgtgaggaggatgaagttgtagttgctgccttgccggtgttctccctttggattaatatatagcacgagcagatggtgtgttgaagggcgccgtcaatggtaagaggacgccgaggatggaaggggccggtggtgaggcttggattttgcttcccctccacgacttccacatggatcccatacatcccggcatcagcgtgtattccttccatgagggaggcgtggattgggtggaggaagttgtgcctgcgcgtgccgtctatggaagggggagccatgaccgccactgtagagtagattgggcggaggctaggtgcgcgggggaggtgcggggcatgtggtggaggctgtatccagatattgggcggaggctaggtgcgcggggcatgtggggggaggtgcggggtgggggaggaaggtgcgggggctactccctggggcgcggcggcatgctgagatctacacgcagggacggaggtgtggggggagtgaggttcggtggcggcatgccgagatctgcggtggggacagaggtgcgaggggagggaggttcggtggcagctaggtgggagtcgatcttgtacatctttttggcggagcgcgaggtatggaggaggtcaacttcttctcgctgacgaagaccacaccgtcgcccaccaggatcccgagggctgactcgcagtccgtgttgctccggagcgc

SEQ ID NO: 54504 - DNA, 434 bp, Zea Mays
gggcatcagacccttggatcaaataaccgtagaatcaacggagtccactggcggccggatctcgtacgtcgtcgacgatcgttggtgcacgtgcgagtagcagtgcatgctgatggacgagttgaagtagctagcggctaacatatgcacgcgcgcatgaagcaagtttgatctatctttctgtctatatatgttaattttatatgtatatataataatatatctatctatctagaaactttgacgaaaaagatatatatatgagtagtagacagacactataccgcaataataataatcaacttctccacagctagtcagctacctcccggccggccggtaatcccgttatgtaaccgccggatcggactactgggtacggtaggggtagcaggtgatatatggttgatctgttacatttataggcacttttc

SEQ ID NO: 54505 - DNA, 1501 bp, Zea Mays
atttttgtcaccaagtgttcatattttaccgtatgtgtcatcataggtagacagttcttttaccaaggaaggaaaactgctacttcagagcttcaaacacgggcacagtatttctttagtttgaaagagatcgaatctgcaacaaaacattttgatcctgcaaataaaataggtgagggtggctttggacctgtttacaagggcacactagcaaatggtactatagttgcagttaaaaagctatcttcaaagtcgagccaaggaaatcgcgagtttttaaatgagataggaataatatctgctctaaggcatccgaatcttgtgaggctatttggttgctgtattgatggggatcagcttcttcttatatatgaattcttggaaaataatagtcttggccgtgcgctttttggccgcacagaacatcagttaaaattggattggccaacaaggtacaatatctgccttggaactgcaaaaggcctggtctatctgcatgaagagtctgcactaaaaatcgtccacagagatattaagccatcaaatattcttcttgatggaaagatgcgacctaaaatatcagattttggcttggctaaactgaatgatgactgtggacgtgtgagcactcggatcgctggaactgtgctgaaagattgaagcagcaagggaagctgctggaaatggtggaccggcgtctcggttctgactactcccaagaacaggcactgaggctgctggatgtagctctcctctgtacaagcatacaaccaacccagcggccaagaatgtcttcagtggtgaagatgctttgtggtgagatccccgtcgagattgtacctgctgacgatgatctaagtgaagatctacgactcaacatcgctcaatcccggcaatcaatagataacagccaaacaaattggtcccagtactcagtaaataacagccaaacaaattggtctgaaacgctttcaagcgatcgttcggtcttgccccacagcagcaaggacagtggctacctcccatcttcgagctccctttctgtcaagctgtgaacttcagcatcgagaatagctagccaggtgtcggcttttttttggggcccgttgctgcagttgtacataggcaaatgttgggtttcatgcttgcaatgcaagtatttgatgtctcatctcgattgtcaagtgtcattcaagaatatcgtccacgacacatggcaattgatcacagtactgtctcaacgtcagccatatttcggctagctccttagtttgttgctttggatgtagaaagttataatgacttataatttggaacagatggagatgtagtatatcattaggacagtgcacttgagaaatgtaggccagaaatattgtttcatatatgcagatcttggagacagtgcaatactttatttcggtcttctttctattgtttacaagcgcagttgtgtgcatgcagtactgctcatgttccacctttttgtatactgtcccta

SEQ ID NO: 54506 - DNA, 1646 bp, Zea Mays
caagtcttagcttggaaaaataatgtcgtctttcaatcaggtagacagttcttttaccaaggaaggaaaactgctacttcagagcttcaaacacgggcacagtatttctttagtttgaaagagatcgaatctgcaacaaaacattttgatcctgcaaataaaataggtgagggtggctttggacctgtttacaagggcacactagcaaatggtactatagttgcagttaaaaagctatcttcaaagtcgagccaaggaaatcgcgagtttttaaatgagataggaataatatctgctctaaggcatccgaatcttgtgaggctatttggttgctgtattgatggggatcagcttcttcttatatatgaattcttggaaaataatagtcttggccgtgcgctttttggccgcacagaacatcagttaaaattggattggccaacaaggtacaatatctgccttggaactgcaaaaggcctggtctatctgcatgaagagtctgcactaaaaatcgtccacagagatattaagccatcaaatattcttcttgatggaaagatgcgacctaaaatatcagattttggcttggctaaactgaatgatgactgtggacgtgtgagcactcggatcgctggaactgttggttatatggcccctgaatatgccacaagaggttgcttaacacgtaaagcggacatctatagttatggagtggtggctcttgaggttgttagtggaatgagcaatacgaatagcatgtcaaatgaagaatatctgcatcttcttgattgggctgaaagattgaagcagcaagggaagctgctggaaatggtggaccggcgtctcggttctgactactcccaagaacaggcactgaggctgctggatgtagctctcctctgtacaagcatacaaccaacccagcggccaagaatgtcttcagtggtgaagatgctttgtggtgagatccccgtcgagattgtacctgctgacgatgatctaagtgaagatctacgactcaacatcgctcaatcccggcaatcaatagataacagccaaacaaattggtcccagtactcagtaaataacagccaaacaaattggtctgaaacgctttcaagcgatcgttcggtcttgccccacagcagcaaggacagtggctacctcccatcttcgagctccctttctgtcaagctgtgaacttcagcatcgagaatagctagccaggtgtcggcttttttttggggcccgttgctgcagttgtacataggcaaatgttgggtttcatgcttgcaatgcaagtatttgatgtctcatctcgattgtcaagtgtcattcaagaatatcgtccacgacacatggcaattgatcacagtactgtctcaacgtcagccatatttcggctagctccttagtttgttgctttggatgtagaaagttataatgacttataatttggaacagatggagatgtagtatatcattaggacagtgcacttgagaaatgtaggccagaaatattgtttcatatatgcagatcttggagacagtgcaatactttatttcggtcttctttctattgtttacaagcgcagttgtgtgcatgcagtactgctcatgttccacctttttgtatactgtcccta

SEQ ID NO: 54507 - DNA, 2354 bp, Zea Mays
attttacctagcttaagattagtcttgttaggcttataaacctaaaccatgaccaaattcattttgattttgtgggggtgacatatttacaaaaaatgtatttttagatttcaacggtagcatctgtgtgcaatgttgaatggataagttctaaccacaagtcttagcttggaaaaataatgtcgtctttcaatcaggtactttcgtcactgctgtatttttgtcaccaagtgttcatattttaccgtatgtgtcatcataggtagacagttcttttaccaaggaaggaaaactgctacttcagagcttcaaacacgggcacagtatttctttagtttgaaagagatcgaatctgcaacaaaacattttgatcctgcaaataaaataggtgagggtggctttggacctgtttacaaggtaaaaactatgaacttcaatatgctctctcttctggttgcatggagaaaacagtttacttcatctcctcattagttaatatattttcacacaaactgatgattagccataattttttcagttgccaaataccagcattacaatatagaaatatagaacttggaaggaataatattttccctggtgatctatattgccggtagttttctgacattagaaaaccatcatttggtatcctttttgttttcaagaacgaaaggacggccattaaaaaacaaaaggatggagaatttgtaactgttgaggctaaacaactcatcatggcacactcaagggaacaaggttcccataaacagatagaggaagtaatcgttaaggggaatcaaacctagctgcaaaacaagaattttagtttctttttgttatctctcattggttagcatttatgtaattattccacatattgttaatatactttgtcttcagggcacactagcaaatggtactatagttgcagttaaaaagctatcttcaaagtcgagccaaggaaatcgcgagtttttaaatgagataggaataatatctgctctaaggcatccgaatcttgtgaggctatttggttgctgtattgatggggatcagcttcttcttatatatgaattcttggaaaataatagtcttggccgtgcgctttttggccgcacagaacatcagttaaaattggattggccaacaaggtacaatatctgccttggaactgcaaaaggcctggtctatctgcatgaagagtctgcactaaaaatcgtccacagagatattaagccatcaaatattcttcttgatggaaagatgcgacctaaaatatcagattttggcttggctaaactgaatgatgactgtggacgtgtgagcactcggatcgctggaactgttggttatatggcccctgaatatgccacaagaggttgcttaacacgtaaagcggacatctatagttatggagtggtggctcttgaggttgttagtggaatgagcaatacgaatagcatgtcaaatgaagaatatctgcatcttcttgattgggctgaaagattgaagcagcaagggaagctgctggaaatggtggaccggcgtctcggttctgactactcccaagaacaggcactgaggctgctggatgtagctctcctctgtacaagcatacaaccaacccagcggccaagaatgtcttcagtggtgaagatgctttgtggtgagatccccgtcgagattgtacctgctgacgatgatctaagtgaagatctacgactcaacatcgctcaatcccggcaatcaatagataacagccaaacaaattggtcccagtactcagtaaataacagccaaacaaattggtctgaaacgctttcaagcgatcgttcggtcttgccccacagcagcaaggacagtggctacctcccatcttcgagctccctttctgtcaagctgtgaacttcagcatcgagaatagctagccaggtgtcggcttttttttggggcccgttgctgcagttgtacataggcaaatgttgggtttcatgcttgcaatgcaagtatttgatgtctcatctcgattgtcaagtgtcattcaagaatatcgtccacgacacatggcaattgatcacagtactgtctcaacgtcagccatatttcggctagctccttagtttgttgctttggatgtagaaagttataatgacttataatttggaacagatggagatgtagtatatcattaggacagtgcacttgagaaatgtaggccagaaatattgtttcatatatgcagatcttggagacagtgcaatactttatttcggtcttctttctattgtttacaagcgcagttgtgtgcatgcagtactgctcatgttccacctttttgtatactgtcccta

SEQ ID NO: 54508 - DNA, 330 bp, Zea Mays
ctggcacttcaggaacaggagctgctcgagtctcttgttgaagctgatacggaaagagctaaaaagatggaagaaaagaaagtgtatctgcaactgtacgaagcaatggaggcgctggtccacatctgccgggaaaacatagaataaaattcaaatttggtggtcgcaaaagtgtggagactttatttcatataaagttaggcttaacattagtgcaaacagttgtattttagtttagatttagagtacacttatgtatgctttgtttgacaatgtttatttatgatatattgaatggtacttatttatattatattaattataatgttg

SEQ ID NO: 54509 - DNA, 1307 bp, Zea Mays
cttgccatctcggggatccggcactcgcctcccttttccctttccgcgccccatcaccattgccacaaatagcaaccaaggcagtaagcctagccaagccaaccgacggcggcgagataacagatccatggcgacgagcggcgtggctccgttcgtggccaagacgtaccgcatggtggatgacccggcgaccgacggcgtggtcgcgtggggcagggacaacaacagcttcgtcgtggccgaccccttcgccttctcgcagacgctcctgcccgcgcacttcaagcactccaacttctccagcttcgtgcgccagctcaacacctacggcttccggaaggtcgatccggaccggtgggagttcgcgcacgtgtcgttccttcgcggccagacgcatctcctgggccagatcgtccgccggagcaacggcggtaagcgcaaggacgacggcaacggtgccggctccggctccgccgacgacgaggacgcggtagccatggaggtggtccggctgaggcgggagcagcgggccatcgaggagcaggtggccgcgatgtggcgtcgcgtgcaggagacggagcgccggcccaagcagatgctcgcgttcctcgtcaaggtcgcgggcgacccgcaggtgctgcgccgcctcgtctccggcgccgggggcgacgccgtgttcgccgccgcggagccggaggacggcgcgagcatcaagagggcgcggctgcttctcgatgccggaagcggcggcgacggcgccgtcgacttcagcgggctctatagcacaaccgccggaagcgaagacgacggcgtcgggttcggcagcgattacctgcagccgccaccgccgtacgtgttccccgtcaacagcggcggctactgactgatggcggtctggtagtccagcatctatccgagcgatgtggcgtgcttcgtcgtcgctagttgcccctcccgagtgacgtgttggactgaagtggcaacggcgccgacggacggtgagcaaccaacccaagataattagctaggaggtggtacaaagtgtaaagcctttggtttaggcaggtctgtggtgatctttaatttgcttgttgcaatgttttccttccctaccctgtcaagtgaatgctacggatcagcggcggcaaaagccgttagctgcagctagtttgccgctgctcttcatacagctgcacgccgttaaaacacatctcctttgcactggctgtcttattttttagttgttgagctggtgtaagcaaccagaaaagcttgacagatagctgacaacgtgtctgatagtttga

SEQ ID NO: 54510 - DNA, 1662 bp, Zea Mays
cgagccgagccgaacgtggctcggctcgccgatgggtgcccctgcccctcgatagtcgcgccgctctcctgccccgttcggccgttccccatttgcctcgtcgcccaccgccccattagcgccgccctcccttatccgacccaacgccgccgccgccgccgcatagacctcgccggcgcctctgcgccgccccgtggcctccggaggtgctattcgcgcgcgatccgccgctgcgtccgtcgctctggcatcgattcggcggcgctgggaggtgagatggatctctaccgctcgaattggcgccgcttttgggtcgtttgcggggggttttgtggggaatttggttgtgaaatggtttgccggccatggagtttgggggggggtaggttcggatttgggcgtgggtggtgggctggtggctgtgccgtatgagatgtgaagctagttacaggcggcgagctgcttttgcaagctctgatgcttctgccgcagagttgacaaggtccgaatgggagttagtctgtctgtctttgcagctctgtttcttctgcacttgggtaaaaacgctgtgaaccccaaaattaggaagattcagttcagaggtgaggattaggggtgggtgtccggtctgaaatagcagtggacctttgatgcctctgtttgtcttggtctggttccagtgatagctgtatcttgtgctaggttatggttatagcagttcatcatatgagcttttggagaccagcaagatatggaaagttcctggtaattacttaagtatcatttcactgaatgagtaatgctagctagttagtgaaaaggaacatgtcagcacctaactgcaccagatatcagaccgcaacatcaggatacaatacaatgcagcgagataaacagtctacccaacgagtataaatatactatgagcagtatgttggggcctcagggaaagggggtaggcagggaattgaattcattctaataattataatttaggcatagattaattaagctaatactgtatgattttgtatggaatatatttatacactactgttagccatactacctatatgttacatttcagctgtagaagcgagttggttggagatcagaaacaggctacccaacttgaagatggcactgcgacgggctctaggatggtcggaaggggaggttatgcgaccagagtcaaagccctgctcccggttaatgcggcagactgcgggcatcttctccgtcggtggtggtccaagaatcactgttccaaggagtctcagatgggcgtcatgcggagcagtctctatgagcgcgacatcagcattgcttgtgcggctctttagcccagagtgtgagcctcaaaacatagctgccttcgacaaacctgaactaaaggcccaatagcataaccgaaaactggtgttaatctaccaagacccatgcaagtttttgttaatctgccaagatctatccaagtttctgtccttgtaatgatccaggcagttcctgtaagatacttttgcgtggtacaacccgccattaattgtttgtttgggattgctacaggtttcagtttcagcatggaagatgtggtttataatataaatctaaatagtttaaaaatatatttttaatttgaataataaatagaatgacttattt

SEQ ID NO: 54511 - DNA, 1190 bp, Zea Mays
aagttgatgcacatggtgtagaccaagagctcaagaaccatctcctgaagaaatacagtggctatctaagctcgctcaagcaagaactatcaaagaaggaagaaccctgctaatgtttcaggttgacatggatcatttggagaccgacttcaaatatcatatagttccctgcaaaggccttcatttgtttgttcaagccatgaattggggactggagacagtttttcatcatgctgtcgtgcctgatttcagtctcggtgaacttcagcacttttctcgtgatcgggaagacgtctcctgtaacctacaaagtacttggccatctgaaaacatgcttggtcctcacctttggctatgtcctgcttcacgacctatttagctggagaaacatacttgggatcctaatcgtggtaattgggatggttctgtacttgtacttctgcactagagagactcagcaaataccagcagaagcctccccgcaagtcgttcagatgaaattgtacgttcatggtttctcatttgtgctgtatctgtctgctggaactctcggtctgaatggtgcttttagcaaggttgccaagctggaactcgggatcttggtgcatcctgctgattgcaaaagcatgttagatgctttcatagctggctgtgatttccattccaggatagccatgaacatgtatcagcatattcgtgagaccattgaagaagagaaagtaattcttgagtggcatcctcaacccgatcaagagaaacctctcgtgctgttgttgaaggatgcttttggcgctgagaggaggaaagctataagatgctaaatctcttcattgtatacgggaaaacgtaggaaggcactgcagctgatgttgctatgtgtgccatgcttgggatagacagaaatactcgtcttaaggagcttggttggacgctactcatgcgggtagtttatgcataaagttatgctcgttcgctgcttaaatgttgcatattttgtttttctctttgaaactgtgaagggcgcaactttttaacgacttctgtaacttgtgtatctagcatctgtattcggtattctaagttaaaatggcaacatttaattatattttacataatttcttttaaagaatagatggatgattattctgcatgtttttcttatgctctttatgatatattcaacgtcttct

SEQ ID NO: 54512 - DNA, 2304 bp, Zea Mays
agagactgagctgcatgaagttgatgcacatggtgtagaccaagagctcaagaaccatctcctgaagaaatacagtggctatctaagctcgctcaagcaagaactatcaaagaaggaagaaccctgctaatgtttcaggttgacatggatcatttggagaccgacttcaaatatcatatagttccctgcaaaggccttcatttgtttgttcaagccatgaattggggactggagacaggtttgtctttttaacaccttctaggaggcaaacctatgtgttattttcttgtattatatataggaggcaaaaagataggcatctccttccaaaccactgttatttaatcgctaagaagttgggaggactagataattgggttaatcatgacatatgatgctctaatctagccagcacaagcacagataaagttggtgtggtgtggctggtggtagttgcacacaccatctgttcccatgctggaggcccatgatttcccatgctggttggtttgttcctgtaatcgcttgctgcttagccttggtgcttctactttgatctagaggctgggaactccaaagaggaacaacgtacatggaggctggaggcgcatgaggtggttctaatggggcggtgcaagcaaaggggagcgggactgatgcctctaccaagccgctgcccccttgctgtacagatttctataaccgtagttgatatgtgtgatagaattgtcacttttgtcacttgagatgttatcgtagtttgtgaaacagaccggtgatttctttgaccaatctgaatttgtttctctgctgccgcctacacatcatcagacaaatagcagaatcaaagcaatttgatagacatgcagatgaactcgaaaatgtgacacatagtgcttcagacaaccagcacagtcccaatgaaataggatgagtatccatcggaaccgtggtccatgcaagttgtccattttgttcgataatatgtatatgtagacatttttaaaaaaataaatacaagccttctcctgacatatgaaaagaaatactacattatttgttctcacatgcctaaagagaattgctattatttcagatattgttatatggcaatgtacatatcgctttgaaattttgttatctcccgttgcaacgcacgggccaattatatcccgttgaaatacaatacagaagaagtttaaggtatcttcaacacagctcctgtactagtcatgcccataccgggcattgacgttgttccttgtcggtccattcctcgatggatttttgactaaccaaaatgtctttgctttcgactacacaactcaagttctgtttttcatcatgctgtcgtgcctgatttcagtctcggtgaacttcagcacttttctcgtgatcgggaagacgtctcctgtaacctacaaagtacttggccatctgaaaacatgcttggtcctcacctttggctatgtcctgcttcacgacctatttagctggagaaacatacttgggatcctaatcgtggtaattgggatggttctgtacttgtacttctgcactagagagactcagcaaataccagcagaagcctccccgcaagtcgttcagatgaaattgtacgttcatggtttctcatttgtgctgtatctgtctgctggaactctcggtctgaatggtgcttttagcaaggttgccaagctggaactcgggatcttggtgcatcctgctgattgcaaaagcatgttagatgctttcatagctggctgtgatttccattccaggatagccatgaacatgtatcagcatattcgtgagaccattgaagaagagaaagtaattcttgagtggcatcctcaacccgatcaagagaaacctctcgtgctgttgttgaaggatgcttttggcgctgagaggaggaaagctataagatgctaaatctcttcattgtatacgggaaaacgtaggaaggcactgcagctgatgttgctatgtgtgccatgcttgggatagacagaaatactcgtcttaaggagcttggttggacgctactcatgcgggtagtttatgcataaagttatgctcgttcgctgcttaaatgttgcatattttgtttttctctttgaaactgtgaagggcgcaactttttaacgacttctgtaacttgtgtatctagcatctgtattcggtattctaagttaaaatggcaacatttaattatattttacataatttcttttaaagaatagatggatgattattctgcatgtttttcttatgctctttatgatatattcaacgtcttct

SEQ ID NO: 54513 - DNA, 2070 bp, Zea Mays
gagagactgagctgcatgaagttgatgcacatggtgtagaccaagagctcaagaaccatctcctgaagaaatacagtggctatctaagctcgctcaagcaagaactatcaaagaaggaagaaccctgctaatgtttcaggttgacatggatcatttggagaccgacttcaaatatcatatagttccctgcaaaggccttcatttgtttgttcaagccatgaattggggactggagacagaggctgggaactccaaagaggaacaacgtacatggaggctggaggcgcatgaggtggttctaatggggcggtgcaagcaaaggggagcgggactgatgcctctaccaagccgctgcccccttgctgtacagatttctataaccgtagttgatatgtgtgatagaattgtcacttttgtcacttgagatgttatcgtagtttgtgaaacagaccggtgatttctttgaccaatctgaatttgtttctctgctgccgcctacacatcatcagacaaatagcagaatcaaagcaatttgatagacatgcagatgaactcgaaaatgtgacacatagtgcttcagacaaccagcacagtcccaatgaaataggatgagtatccatcggaaccgtggtccatgcaagttgtccattttgttcgataatatgtatatgtagacatttttaaaaaaataaatacaagccttctcctgacatatgaaaagaaatactacattatttgttctcacatgcctaaagagaattgctattatttcagatattgttatatggcaatgtacatatcgctttgaaattttgttatctcccgttgcaacgcacgggccaattatatcccgttgaaatacaatacagaagaagtttaaggtatcttcaacacagctcctgtactagtcatgcccataccgggcattgacgttgttccttgtcggtccattcctcgatggatttttgactaaccaaaatgtctttgctttcgactacacaactcaagttctggtaagcattaaaccaggctttggggattttgtgttaactgtcgatatcgctccatctgatcatgggtctgcatttgttgcatctgcagtttttcatcatgctgtcgtgcctgatttcagtctcggtgaacttcagcacttttctcgtgatcgggaagacgtctcctgtaacctacaaagtacttggccatctgaaaacatgcttggtcctcacctttggctatgtcctgcttcacgacctatttagctggagaaacatacttgggatcctaatcgtggtaattgggatggttctgtacttgtacttctgcactagagagactcagcaaataccagcagaagcctccccgcaagtcgttcagatgaaattgtacgttcatggtttctcatttgtgctgtatctgtctgctggaactctcggtctgaatggtgcttttagcaaggttgccaagctggaactcgggatcttggtgcatcctgctgattgcaaaagcatgttagatgctttcatagctggctgtgatttccattccaggatagccatgaacatgtatcagcatattcgtgagaccattgaagaagagaaagtaattcttgagtggcatcctcaacccgatcaagagaaacctctcgtgctgttgttgaaggatgcttttggcgctgagaggaggaaagctataagatgctaaatctcttcattgtatacgggaaaacgtaggaaggcactgcagctgatgttgctatgtgtgccatgcttgggatagacagaaatactcgtcttaaggagcttggttggacgctactcatgcgggtagtttatgcataaagttatgctcgttcgctgcttaaatgttgcatattttgtttttctctttgaaactgtgaagggcgcaactttttaacgacttctgtaacttgtgtatctagcatctgtattcggtattctaagttaaaatggcaacatttaattatattttacataatttcttttaaagaatagatggatgattattctgcatgtttttcttatgctctttatgatatattcaacgtcttct

SEQ ID NO: 54514 - DNA, 1707 bp, Zea Mays
ccgactctcgcagagatgacgctggatgagtttctggagatgtggaggagagactgagctgcatgaagttgatgcacatggtgtagaccaagagctcaagaaccatctcctgaagaaatacagtggctatctaagctcgctcaagcaagaactatcaaagaaggaagaaccctgctaatgtttcaggttgacatggatcatttggagaccgacttcaaatatcatatagttccctgcaaaggccttcatttgtttgttcaagccatgaattggggactggagacagatattgttatatggcaatgtacatatcgctttgaaattttgttatctcccgttgcaacgcacgggccaattatatcccgttgaaatacaatacagaagaagtttaaggtatcttcaacacagctcctgtactagtcatgcccataccgggcattgacgttgttccttgtcggtccattcctcgatggatttttgactaaccaaaatgtctttgctttcgactacacaactcaagttctggtaagcattaaaccaggctttggggattttgtgttaactgtcgatatcgctccatctgatcatgggtctgcatttgttgcatctgcagtttttcatcatgctgtcgtgcctgatttcagtctcggtgaacttcagcacttttctcgtgatcgggaagacgtctcctgtaacctacaaagtacttggccatctgaaaacatgcttggtcctcacctttggctatgtcctgcttcacgacctatttagctggagaaacatacttgggatcctaatcgtggtaattgggatggttctgtacttgtacttctgcactagagagactcagcaaataccagcagaagcctccccgcaagtcgttcagatgaaattgtacgttcatggtttctcatttgtgctgtatctgtctgctggaactctcggtctgaatggtgcttttagcaaggttgccaaggttggtcatgttgctggctcaagaaccagagaaaagttacaattggttgtatcaaatctagcagccaaagtgaatcatcaagcgattttgtttcaagtaaaaagacaaacttgttttacgtgcagctggaactcgggatcttggtgcatcctgctgattgcaaaagcatgttagatgctttcatagctggctgtgatttccattccaggatagccatgaacatgtatcagcatattcgtgagaccattgaagaagagaaagtaattcttgagtggcatcctcaacccgatcaagagaaacctctcgtgctgttgttgaaggatgcttttggcgctgagaggaggaaagctataagatgctaaatctcttcattgtatacgggaaaacgtaggaaggcactgcagctgatgttgctatgtgtgccatgcttgggatagacagaaatactcgtcttaaggagcttggttggacgctactcatgcgggtagtttatgcataaagttatgctcgttcgctgcttaaatgttgcatattttgtttttctctttgaaactgtgaagggcgcaactttttaacgacttctgtaacttgtgtatctagcatctgtattcggtattctaagttaaaatggcaacatttaattatattttacataatttcttttaaagaatagatggatgattattctgcatgtttttcttatgctctttatgatatattcaacgtcttct

SEQ ID NO: 54515 - DNA, 3273 bp, Zea Mays
tatatgatgaagaagttcacccacaatatatccggatcgtcaagaacacacccctcatgacgacaagaatggctgactcttatcttgtactcctcttcctactagtgttcgtcacctccaactccagctcgcaatccatggcgcagatcactgacgcaagcgagctagcaatactcctagcaatcaagaaaggctggggcagcccatctgctctcagctcatggagctcccagaacgcttcctactgcagctgggcaggggtcaggtgcgtgaacggccaagtgtccgccctgtccttccagaacctcagcatagccaatccagttccagtcccagctgcttccatatgcaacctcaagaacctgtcgtctctcgacctttcctacaacaaactcaccggccagttccccacagcgctctacagctgctcggctgctcggttccttgacctctccaacaatcgattctccggtgccctcccagctgacatcaacaggctgtcgtcggcgatggagcacctcaacctgtcgagcaatggcttcacaggcagtgtgccccgggcgattgccgcgttcacgaagctgcggtccctggttcttgacaccaacagcttcgacgggacgtatccgggctcggctatcgcaggcctcagcgagctcgagacgctaactctggcaaataaccccttcgtgccaggccccatccccgacgacttcgggaagctgacgaagctgcagacactgtggatgtcggggatgaacctgactggtcgcatccccgacaagctgtcgtcgctcactgagctgacgacgttggccttgagcgtaaacaagcttcacggtgaaatcccggcgtgggtttggagcctccagaagcttcagatcctgtacctctacgataacagcttcaccggtgcaattgggccggacatcaccgccgtgagcctgcaagagatcgacctctcctcgaactggctcaacggaaccataccggagagcatgggcgatttgagggacctgacgttgctcttcctgtacttcaacaacctcaccggaccgattccgtcgagcgtggggcttctcccgaacctcaccgatatccggctgttcaacaaccggctctctggacccctcccgccggagctcgggaaacactcgccgctggccaacctcgaagtgagcaacaacctcctcagaggcgagctcccggacaccctctgcctcaacaggaagctctacgacctcgtcgtcttcaacaacagcttctccggcgttttcccggcgaacctcgcggactgcgacacggtgaacaacatcatggcgtacaataacctcttcaccggcgagttccccgagaaggtatggtcggggttcccagtcctgacgactgtcatgatccagaacaacagcttcactggcactatgcccagtgcgatatcctccaacatcacacggatcgagatggggaacaaccgattctccggcgacgtgccgacctccgcaccggggctgaagacgttcaaggcggggaacaaccagttctccggtactctgccggaggacatgtcggggctagccaatctcatcgagctgaacctcgctgggaacacgatatctggcgcgattccgccttccatcggatcgctgcaacgcctgaattacctgaacttaagcagcaatcagatatccggagcgattccgcctgggatcgggttgctgccagtgctcaccatccttgatctctccagcaacgagctcaccggagaaatacccgaggacttcaacgacctccataccagcttcctcaatctctcctccaaccaactcaccggcgagctccccgagtcgctgaagaacccagcatacgaccggtcgttcctcggaaaccgtggcctctgcgccgcggtgaacccgaacgtaaacttcccggcgtgccgctaccgccgccacagccagatgtcaatcgggctgatcatcctcgtctccgtggtcgccggcgccatcctcgtcggcgcggtcgggtgtttcatcgtccggcggaagaagcaacggtgcaacgtgacgtcgtggaagatgatgccgttccgcaagctggacttcagcgagtgcgacgtgctaataaccaacctccgcgacgaggacgtgatcggcagcggcggctccggcaaggtgtaccgcgtccacctccccgctcgcgggcgcgggcgcggctgcgccggcacggtggtggccgtgaagaagctgtgcagcagggggaaggccgaggagaagctcgaccgggagttcgacacggaggtgaagatcctcggcgacatccggcacaacaacatcgtgagcctcctctgctacatctcgagcgaggacaccaagctgctggtgtacgagtacatggagaacggcagcctcgaccggtggctgcaccccaaggacaacgcggccacggcggcgctggactggccgacgcggctgggcatcgccatcgacgcggcgagggggctcagctacatgcacgacgagtgcgcgcagcccatcatgcaccgggacgtcaagtccagcaacatcctgctcgacccggggttccgtgccaagatcgccgacttcgggctcgcccggatcctgctcaagtccggcgagcccgagtccgtgtccgccgtcagtggcaccttcggatacatggctccagagtacggacgcggcgccaaggtgaaccagaaggtagacgtgtacagcttcggcgtggtgctgctggagctggcgaccgggagggtagccaacgacagcagcaaggacgccgctgactgctgcctggtggagtgggcgtggcggaggtacaaggcgggggaccctctccacgacgtcgtggacgagaccatccaggacagggccgtttacatcgacgacgccgtggccatgttcaagctcggggtcatgtgcaccggggacgacgcgccgtcccggccgtcgtcaccaagttgccaagagatcgttagacgccggatcatttttgggtggcgacgaggagagcggcaacttcgtggcccatcctgtttaaattttcagtttaactttactttttcggtatgacgttaaatatttctcgaatgtaaatttttgtggcttcccgtaatatgtgctgcgtgtacacgatgaagacgatagacaaattagggatttactaaaagtaagtgtctcaatttaagtttttcatacgatggtcattgcatatattctaaacaaaaaccatagatttggtttctcgtaacttatgtagtca

SEQ ID NO: 54516 - DNA, 4038 bp, Zea Mays
ttttgttcctcgtcgagctcctcgctccgcagccaatcatcctcagccaaaatttctagaacctcgcgcagtcgcccgcaccacgccaatctgctgctgctctcgatggtgcgcctccatcagctcctctctcgcacgcttgcatctcaccaaatcctcgcttctgccacctccagcgtccgctccaccccgcggctgcttctccctctccggttgccgccgcctgctcctcctccccatggccgtactctgcttcccatcatcgtagccgcgtcgcgtcaatacgcctcgtcgaccttcgggaggcgagggcgctcgacgcggccgccgatgttgctgaggcgcaagagagccaggagtccgacgcggaagggccctggcgagctccgcgtgcaaattggcatagaggaggcccttcccgacgaccctggaatcctgagcattgcagaaactcttcggacggatgttgggaaggcagtgaagctggccctcaacgaccttgaaggctcggattacatgaccagagatccttctatatgcaatgtggacaagtatgctagcattgaggtctctgtgttgctttgtgatgatgatttcatcaggaagctcaacaaagaatggagggatgaggatcatgctactgatgttctgtcaatgtctcagcatatcccagagcttgatattcccattctcgacggcaagcagaagaaaggggacacacacttgttgatgagataagaatcctcatggtgcatgggctattgcatttattgggctttgaccatgaagtcagcaaggtggctgaagaagagatggagaaggaagaagaacatattttaaatactcttgaatggagaggaaagggattaattaagagtgcttatgatattgctactgttatggaacatttacaaaattctgttgaggctgatagcaatatagagaaagtgatcctacaagagaaacatcaacccaaactaagccatatcatctgtgatatagatggtactatcatggattatgaaggtggtctgcatgaaaaatcaataggatctttgagagaggcaattgcaacaggagtaaatgttatcatggttactggaaagagtcgggcttccactattagaaccttcaagcttcttgatttccgcgaaaaaggtgattttatttcagagacttcacctggtgtatttttgcagggttcacttatctatggaagggatggcaaaaaagttcatagagcagaattggatttagatgtctgcaaggaggcattgctgtactccttgaagcatagaattcctcttgttgcgtactgtgaggaacaatgtctaacattgtttgaacacccatttgttgaattgttgcacactgtacataatgaaaacaaggtaaaagtgatgcattcaattgaggaccttttggaatattcatctattcagtaccaaagaggattcatctgtcctaaggcagcatttttcagaactgagcagagggaaagcacatgttatcaaaatgcattcaaatacaattgatattgttcccctcaatacttcaaaaggtggtggtttaagaattctacttgatcatcttggaataacaaaagattgcgatcttgattctattggagactataccagatggctaagcaataaatgattcaactgacatgattactgggtcgttcttaagaaaaaaatgtggaatcgtaggcgcgccaaaggaacaaaactattgctctgaaggttgcaaaaattgtatgtttgtagcaccatctcttttagttggcaattcatgtgtttttatatttcgaaaaggattgggtggtgaatgtcagcttagatatttccttcaggtaatgtgtacatagattcaaagtatgtaacttcagcggaaactagcctttaatttcaaataccatgaattttttgttcgtcttctgaacagatcattttgttgagatacatgtgaagagaattgaatgggccacatccttgtgcaactggagcttaccatgtgacatttgcttttgtccaaagtcatctgcaacaccatttttaactctacatagatttttttgtagttttgttttgtgtagcatagcattgataaatgttgctaaataaacgagttaatggtttctccacgttgttgatatttgttcgaatgaaactaatgctgaagtataatttatggtcaggaattcaatggatgcattgtgatgacgataactgtattttctgccatgttgggctttgtttattatgactcaccgttactcattacatccatttgattgatcgatctttttatttatcatgaaatgaagcacataagaaatcaggttgattgtagaaacaaatattgttcagattttcatgcataaagcacacacgaagcacagctcgtcaatggaaagtggaggcttgtcaccctagttttccctttgttacagatcaatatgtgttgcaactctcttgttctggtgggcatatgatttagtgctgatgttcaaattgctggtgttgctagttcctggcattactctagcaaatgaaccatttgagggcctctttgctatcatcttgttgcacggccttgatacaatgattgtccgttggttcatgtctaatcctactgaatagcttttgcttgctctcatcctcttactgtatgaaactttctttgcaaggtcttgaacacttgtagcatcagatatagacgtgaatgattgggccttcccttggtagtaattggacagccctttcctgtggaaatcgtgttaattgaacatgagttggaatgctttgcatctgaagtgaaatttatagaagtaatgttgactatccatcttttataatcatgacattgtgttatatatccactcagtattttttcctttcagcaaatatacatatgaagttgaactctgctgcatgcttatcatagatcttgtgcaaaagggaacctctactagttatcacagagcagtatcaagttttgttgagctgaaagtgaatttgcaagctttttataacaaataacagatcattccattgtatggtagggacagaagcttgctggtttaatagaagataatagtgcaaagaaatcgcaaaacttattgaagcatttgtaattttgaggctatatctttttctaccttcatcatgaatgtaaaagttacaaaactacattgtgaagccacattgtgatttatttgtagaaattggacagcttttatgacttttcttcaaggtaaatgattataaacatgcacctgattggaagctcatctagcagcgaggataactcatacaggggaccctcggcgtccagatgcaacgtgctcgaagatgctgaggatggctcagagcgatggccaggtggggaagaagttgcatcatcagacacgttggaagctgatgagcacaaggacccactggacgcgcccgagaaggaattgtaagactcggagctttcgtcacctggtttattgcaaatctccttgtgacacgagggtactccatgaggtgctaagttgtaaggctctgccattcaatgttttgacatcaaagggacgcagcttatgtggatatatataggagaaaaagggagagctatccaagtggttggataagcgtcttgtttagtcggagaaattttgtgaactcacggccggagagcgagtgatagttgcccttactccatgtgatcttgatagattagtacattaatatttcttcatttcttgtgctattttattacttatgaactccgtctcttcgttgttgacatgaagcaagaaatggacatctgtcacttatttggataaatcaatgataacttagctgatggggagcatgcggaacaacgcccttcgggctgagacagacaagcatgttacctccggccaagaaaaagagagttatcccagcggattaggaaggataaggtagattatggcggcaagaaggtgctttctgttagcctggggctcatgcctagggtgttaataatgttaaataagagtgagat

SEQ ID NO: 54517 - DNA, 3496 bp, Zea Mays
ttttgttcctcgtcgagctcctcgctccgcagccaatcatcctcagccaaaatttctagaacctcgcgcagtcgcccgcaccacgccaatctgctgctgctctcgatggtgcgcctccatcagctcctctctcgcacgcttgcatctcaccaaatcctcgcttctgccacctccagcgtccgctccaccccgcggctgcttctccctctccggttgccgccgcctgctcctcctccccatggccgtactctgcttcccatcatcgtagccgcgtcgcgtcaatacgcctcgtcgaccttcgggaggcgagggcgctcgacgcggccgccgatgttgctgaggcgcaagagagccaggagtccgacgcggaagggccctggcgagctccgcgtgcaaattggcatagaggaggcccttcccgacgaccctggaatcctgagcattgcagaaactcttcggacggatgttgggaaggcagtgaagctggccctcaacgaccttgaaggctcggattacatgaccagagatccttctatatgcaatgtggacaagtatgctagcattgaggtctctgtgttgctttgtgatgatgatttcatcaggaagctcaacaaagaatggagggatgaggatcatgctactgatgttctgtcaatgtctcagcatatcccagagcttgatattcccattctcgacggcaagcagaagaaaggggacacacacttgttgatgagataagaatcctcatggtgcatgggctattgcatttattgggctttgaccatgaagtcagcaaggtggctgaagaagagatggagaaggaagaagaacatattttaaatactcttgaatggagaggaaagggattaattaagagtgcttatgatattgctactgttatggaacatttacaaaattctgttgaggctgatagcaatatagagaaagtgatcctacaagagaaacatcaacccaaactaagccatatcatctgtgatatagatggtactatcatggattatgaaggtggtctgcatgaaaaatcaataggatctttgagagaggcaattgcaacaggagtaaatgttatcatggttactggaaagagtcgggcttccactattagaaccttcaagcttcttgatttccgcgaaaaaggtgattttatttcagagacttcacctggtgtatttttgcagggttcacttatctatggaagggatggcaaaaaagttcatagagcagaattggatttagatgtctgcaaggaggcattgctgtactccttgaagcatagaattcctcttgttgcgtactgtgaggaacaatgtctaacattgtttgaacacccatttgttgaattgttgcacactgtacataatgaaaacaaggtaaaagtgatgcattcaattgaggaccttttggaatattcatctattcagaaattacttctttttgatagtaccaaagaggattcatctgtcctaaggcagcatttttcagaactgagcagagggaaagcacatgttatcaaaatgcattcaaatacaattgatattgttcccctcaatacttcaaaaggtggtggtttaagaattctacttgatcatcttggaataacaaaagattgcgatcttgattctattggagactataccagatggctaagcaataaatgattcaactgacatgattactgggtcgttcttaagaaaaaaatgtggaatcgtaggcgcgccaaaggaacaaaactattgctctgaaggttgcaaaaattgtatgtttgtagcaccatctcttttagttggcaattcatgtgtttttatatttcgaaaaggattgggtggtgaatgtcagcttagatatttccttcagatcattttgttgagatacatgtgaagagaattgaatgggccacatccttgtgcaactggagcttaccatgtgacatttgcttttgtccaaagtcatctgcaacaccatttttaactctacatagatttttttgtagttttgttttgtgtagcatagcattgataaatgttgctaaataaacgagttaatggtttctccacgttgttgatatttgttcgaatgaaactaatgctgaagtataatttatggtcaggaattcaatggatgcattgtgatgacgataactgtattttctgccatgttgggctttgtttattatgactcaccgttactcattacatccatttgattgatcgatctttttatttatcatgaaatgaagcacataagaaatcaggttgattgtagaaacaaatattgttcagattttcatgcataaagcacacacgaagcacagctcgtcaatggaaagtggaggcttgtcaccctagttttccctttgttacagatcaatatgtgttgcaactctcttgttctggtgggcatatgatttagtgctgatgttcaaattgctggtgttgctagttcctggcattactctagcaaatgaaccatttgagggcctctttgctatcatcttgttgcacggccttgatacaatgattgtccgttggttcatgtctaatcctactgaatagcttttgcttgctctcatcctcttactgtatgaaactttctttgcaaggtcttgaacacttgtagcatcagatatagacgtgaatgattgggccttcccttggtagtaattggacagccctttcctgtggaaatcgtgttaattgaacatgagttggaatgctttgcatctgaagtgaaatttatagaacgaggataactcatacaggggaccctcggcgtccagatgcaacgtgctcgaagatgctgaggatggctcagagcgatggccaggtggggaagaagttgcatcatcagacacgttggaagctgatgagcacaaggacccactggacgcgcccgagaaggaattgtaagactcggagctttcgtcacctggtttattgcaaatctccttgtgacacgagggtactccatgaggtgctaagttgtaaggctctgccattcaatgttttgacatcaaagggacgcagcttatgtggatatatataggagaaaaagggagagctatccaagtggttggataagcgtcttgtttagtcggagaaattttgtgaactcacggccggagagcgagtgatagttgcccttactccatgtgatcttgatagattagtacattaatatttcttcatttcttgtgctattttattacttatgaactccgtctcttcgttgttgacatgaagcaagaaatggacatctgtcacttatttggataaatcaatgataacttagctgatggggagcatgcggaacaacgcccttcgggctgagacagacaagcatgttacctccggccaagaaaaagagagttatcccagcggattaggaaggataaggtagattatggcggcaagaaggtgctttctgttagcctggggctcatgcctagggtgttaataatgttaaataagagtgagat

SEQ ID NO: 54518 - DNA, 4034 bp, Zea Mays
ttttgttcctcgtcgagctcctcgctccgcagccaatcatcctcagccaaaatttctagaacctcgcgcagtcgcccgcaccacgccaatctgctgctgctctcgatggtgcgcctccatcagctcctctctcgcacgcttgcatctcaccaaatcctcgcttctgccacctccagcgtccgctccaccccgcggctgcttctccctctccggttgccgccgcctgctcctcctccccatggccgtactctgcttcccatcatcgtagccgcgtcgcgtcaatacgcctcgtcgaccttcgggaggcgagggcgctcgacgcggccgccgatgttgctgaggcgcaagagagccaggagtccgacgcggaagggccctggcgagctccgcgtgcaaattggcatagaggaggcccttcccgacgaccctggaatcctgagcattgcagaaactcttcggacggatgttgggaaggcagtgaagctggccctcaacgaccttgaaggctcggattacatgaccagagatccttctatatgcaatgtggacaagtatgctagcattgaggtctctgtgttgctttgtgatgatgatttcatcaggaagctcaacaaagaatggagggatgaggatcatgctactgatgttctgtcaatgtctcagcatatcccagagcttgatattcccattctgcagttgggtgacatagtaatttctgttgacacagctcgacggcaagcagaagaaaggggacacacacttgttgatgagataagaatcctcatggtgcatgggctattgcatttattgggctttgaccatgaagtcagcaaggtggctgaagaagagatggagaaggaagaagaacatattttaaatactcttgaatggagaggaaagggattaattaagagtgcttatgatattgctactgttatggaacatttacaaaattctgttgaggctgatagcaatatagagaaagtgatcctacaagagaaacatcaacccaaactaagccatatcatctgtgatatagatggtactatcatggattatgaaggtggtctgcatgaaaaatcaataggatctttgagagaggcaattgcaacaggagtaaatgttatcatggttactggaaagagtcgggcttccactattagaaccttcaagcttcttgatttccgcgaaaaaggtgattttatttcagagacttcacctggtgtatttttgcagggttcacttatctatggaagggatggcaaaaaagttcatagagcagaattggatttagatgtctgcaaggaggcattgctgtactccttgaagcatagaattcctcttgttgcgtactgtgaggaacaatgtctaacattgtttgaacacccatttgttgaattgttgcacactgtacataatgaaaacaaggtaaaagtgatgcattcaattgaggaccttttggaatattcatctattcagaactgagcagagggaaagcacatgttatcaaaatgcattcaaatacaattgatattgttcccctcaatacttcaaaaggtggtggtttaagaattctacttgatcatcttggaataacaaaagattgcgatcttgattctattggagactataccagatggctaagcaataaatgattcaactgacatgattactgggtcgttcttaagaaaaaaatgtggaatcgtaggcgcgccaaaggaacaaaactattgctctgaaggttgcaaaaattgtatgtttgtagcaccatctcttttagttggcaattcatgtgtttttatatttcgaaaaggattgggtggtgaatgtcagcttagatatttccttcaggtaatgtgtacatagattcaaagtatgtaacttcagcggaaactagcctttaatttcaaataccatgaattttttgttcgtcttctgaacagatcattttgttgagatacatgtgaagagaattgaatgggccacatccttgtgcaactggagcttaccatgtgacatttgcttttgtccaaagtcatctgcaacaccatttttaactctacatagatttttttgtagttttgttttgtgtagcatagcattgataaatgttgctaaataaacgagttaatggtttctccacgttgttgatatttgttcgaatgaaactaatgctgaagtataatttatggtcaggaattcaatggatgcattgtgatgacgataactgtattttctgccatgttgggctttgtttattatgactcaccgttactcattacatccatttgattgatcgatctttttatttatcatgaaatgaagcacataagaaatcaggttgattgtagaaacaaatattgttcagattttcatgcataaagcacacacgaagcacagctcgtcaatggaaagtggaggcttgtcaccctagttttccctttgttacagatcaatatgtgttgcaactctcttgttctggtgggcatatgatttagtgctgatgttcaaattgctggtgttgctagttcctggcattactctagcaaatgaaccatttgagggcctctttgctatcatcttgttgcacggccttgatacaatgattgtccgttggttcatgtctaatcctactgaatagcttttgcttgctctcatcctcttactgtatgaaactttctttgcaaggtcttgaacacttgtagcatcagatatagacgtgaatgattgggccttcccttggtagtaattggacagccctttcctgtggaaatcgtgttaattgaacatgagttggaatgctttgcatctgaagtgaaatttatagaagtaatgttgactatccatcttttataatcatgacattgtgttatatatccactcagtattttttcctttcagcaaatatacatatgaagttgaactctgctgcatgcttatcatagatcttgtgcaaaagggaacctctactagttatcacagagcagtatcaagttttgttgagctgaaagtgaatttgcaagctttttataacaaataacagatcattccattgtatggtagggacagaagcttgctggtttaatagaagataatagtgcaaagaaatcgcaaaacttattgaagcatttgtaattttgaggctatatctttttctaccttcatcatgaatgtaaaagttacaaaactacattgtgaagccacattgtgatttatttgtagaaattggacagcttttatgacttttcttcaaggtaaatgattataaacatgcacctgattggaagctcatctagcagcgaggataactcatacaggggaccctcggcgtccagatgcaacgtgctcgaagatgctgaggatggctcagagcgatggccaggtggggaagaagttgcatcatcagacacgttggaagctgatgagcacaaggacccactggacgcgcccgagaaggaattgtaagactcggagctttcgtcacctggtttattgcaaatctccttgtgacacgagggtactccatgaggtgctaagttgtaaggctctgccattcaatgttttgacatcaaagggacgcagcttatgtggatatatataggagaaaaagggagagctatccaagtggttggataagcgtcttgtttagtcggagaaattttgtgaactcacggccggagagcgagtgatagttgcccttactccatgtgatcttgatagattagtacattaatatttcttcatttcttgtgctattttattacttatgaactccgtctcttcgttgttgacatgaagcaagaaatggacatctgtcacttatttggataaatcaatgataacttagctgatggggagcatgcggaacaacgcccttcgggctgagacagacaagcatgttacctccggccaagaaaaagagagttatcccagcggattaggaaggataaggtagattatggcggcaagaaggtgctttctgttagcctggggctcatgcctagggtgttaataatgttaaataagagtgagat

SEQ ID NO: 54519 - DNA, 3766 bp, Zea Mays
cccattttgttcctcgtcgagctcctcgctccgcagccaatcatcctcagccaaaatttctagaacctcgcgcagtcgcccgcaccacgccaatctgctgctgctctcgatggtgcgcctccatcagctcctctctcgcacgcttgcatctcaccaaatcctcgcttctgccacctccagcgtccgctccaccccgcggctgcttctccctctccggttgccgccgcctgctcctcctccccatggccgtactctgcttcccatcatcgtagccgcgtcgcgtcaatacgcctcgtcgaccttcgggaggcgagggcgctcgacgcggccgccgatgttgctgaggcgcaagagagccaggagtccgacgcggaagggccctggcgagctccgcgtgcaaattggcatagaggaggcccttcccgacgaccctggaatcctgagcattgcagaaactcttcggacggatgttgggaaggcagtgaagctggccctcaacgaccttgaaggctcggattacatgaccagagatccttctatatgcaatgtggacaagtatgctagcattgaggtctctgtgttgctttgtgatgatgatttcatcaggaagctcaacaaagaatggagggatgaggatcatgctactgatgttctgtcaatgtctcagcatatcccagagcttgatattcccattctgcagttgggtgacatagtaatttctgttgacacagctcgacggcaagcagaagaaaggggacacacacttgttgatgagataagaatcctcatggtgcatgggctattgcatttattgggctttgaccatgaagtcagcaaggtggctgaagaagagatggagaaggaagaagaacatattttaaatactcttgaatggagaggaaagggattaattaagagtgcttatgatattgctactgttatggaacatttacaaaattctgttgaggctgatagcaatatagagaaagtgatcctacaagagaaacatcaacccaaactaagccatatcatctgtgatatagatggtactatcatggattatgaaggtggtctgcatgaaaaatcaataggatctttgagagaggcaattgcaacaggagtaaatgttatcatggttactggaaagggttcacttatctatggaagggatggcaaaaaagttcatagagcagaattggatttagatgtctgcaaggaggcattgctgtactccttgaagcatagaattcctcttgttgcgtactgtgaggaacaatgtctaacattgtttgaacacccatttgttgaattgttgcacactgtacataatgaaaacaaggtaaaagtgatgcattcaattgaggaccttttggaatattcatctattcagaaattacttctttttgatagtaccaaagaggattcatctgtcctaaggcagcatttttcagaactgagcagagggaaagcacatgttatcaaaatgcattcaaatacaattgatattgttcccctcaatacttcaaaaggtggtggtttaagaattctacttgatcatcttggaataacaaaagattgcgatcttgattctattggagactataccagatggctaagcaataaatgattcaactgacatgattactgggtcgttcttaagaaaaaaatgtggaatcgtaggcgcgccaaaggaacaaaactattgctctgaaggttgcaaaaattgtatgtttgtagcaccatctcttttagttggcaattcatgtgtttttatatttcgaaaaggattgggtggtgaatgtcagcttagatatttccttcaggtaatgtgtacatagattcaaagtatgtaacttcagcggaaactagcctttaatttcaaataccatgaattttttgttcgtcttctgaacagatcattttgttgagatacatgtgaagagaattgaatgggccacatccttgtgcaactggagcttaccatgtgacatttgcttttgtccaaagtcatctgcaacaccatttttaactctacatagatttttttgtagttttgttttgtgtagcatagcattgataaatgttgctaaataaacgagttaatggtttctccacgttgttgatatttgttcgaatgaaactaatgctgaagtataatttatggtcaggaattcaatggatgcattgtgatgacgataactgtattttctgccatgttgggctttgtttattatgactcaccgttactcattacatccatttgattgatcgatctttttatttatcatgaaatgaagcacataagaaatcaggttgattgtagaaacaaatattgttcagattttcatgcataaagcacacacgaagcacagctcgtcaatggaaagtggaggcttgtcaccctagttttccctttgttacagatcaatatgtgttgcaactctcttgttctggtgggcatatgatttagtgctgatgttcaaattgctggtgttgctagttcctggcattactctagcaaatgaaccatttgagggcctctttgctatcatcttgttgcacggccttgatacaatgattgtccgttggttcatgtctaatcctactgaatagcttttgcttgctctcatcctcttactgtatgaaactttctttgcaaggtcttgaacacttgtagcatcagatatagacgtgaatgattgggccttcccttggtagtaattggacagccctttcctgtggaaatcgtgttaattgaacatgagttggaatgctttgcatctgaagtgaaatttatagaagtaatgttgactatccatcttttataatcatgacattgtgttatatatccactcagtattttttcctttcagcaaatatacatatgaagttgaactctgctgcatgcttatcatagatcttgtgcaaaagggaacctctactagttatcacagagcagtatcaagttttgttgagctgaaagtgaatttgcaagctttttataacaaataacagatcattccattgtatgcgaggataactcatacaggggaccctcggcgtccagatgcaacgtgctcgaagatgctgaggatggctcagagcgatggccaggtggggaagaagttgcatcatcagacacgttggaagctgatgagcacaaggacccactggacgcgcccgagaaggaattgtaagactcggagctttcgtcacctggtttattgcaaatctccttgtgacacgagggtactccatgaggtgctaagttgtaaggctctgccattcaatgttttgacatcaaagggacgcagcttatgtggatatatataggagaaaaagggagagctatccaagtggttggataagcgtcttgtttagtcggagaaattttgtgaactcacggccggagagcgagtgatagttgcccttactccatgtgatcttgatagattagtacattaatatttcttcatttcttgtgctattttattacttatgaactccgtctcttcgttgttgacatgaagcaagaaatggacatctgtcacttatttggataaatcaatgataacttagctgatggggagcatgcggaacaacgcccttcgggctgagacagacaagcatgttacctccggccaagaaaaagagagttatcccagcggattaggaaggataaggtagattatggcggcaagaaggtgctttctgttagcctggggctcatgcctagggtgttaataatgttaaataagagtgagat

SEQ ID NO: 54520 - DNA, 2523 bp, Zea Mays
ctatcttcccattttgttcctcgtcgagctcctcgctccgcagccaatcatcctcagccaaaatttctagaacctcgcgcagtcgcccgcaccacgccaatctgctgctgctctcgatggtgcgcctccatcagctcctctctcgcacgcttgcatctcaccaaatcctcgcttctgccacctccagcgtccgctccaccccgcggctgcttctccctctccggttgccgccgcctgctcctcctccccatggccgtactctgcttcccatcatcgtagccgcgtcgcgtcaatacgcctcgtcgaccttcgggaggcgagggcgctcgacgcggccgccgatgttgctgaggcgcaagagagccaggagtccgacgcggaagggccctggcgagctccgcgtgcaaattggcatagaggaggcccttcccgacgaccctggaatcctgagcattgcagaaactcttcggacggatgttgggaaggcagtgaagctggccctcaacgaccttgaaggctcggattacatgaccagagatccttctatatgcaatgtggacaagtatgctagcattgaggtctctgtgttgctttgtgatgatgatttcatcaggaagctcaacaaagaatggagggatgaggatcatgctactgatgttctgtcaatgtctcagcatatcccagagcttgatattcccattctcgacggcaagcagaagaaaggggacacacacttgttgatgagataagaatcctcatggtgcatgggctattgcatttattgggctttgaccatgaagtcagcaaggtggctgaagaagagatggagaaggaagaagaacatattttaaatactcttgaatggagaggaaagggattaattaagagtgcttatgatattgctactgttatggaacatttacaaaattctgttgaggctgatagcaatatagagaaagtgatcctacaagagaaacatcaacccaaactaagccatatcatctgtgatatagatggtactatcatggattatgaaggtggtctgcatgaaaaatcaataggatctttgagagaggcaattgcaacaggagtaaatgttatcatggttactggaaagagtcgggcttccactattagaaccttcaagcttcttgatttccgcgaaaaaggtgattttatttcagagacttcacctggtgtatttttgcagggttcacttatctatggaagggatggcaaaaaagttcatagagcagaattggatttagatgtctgcaaggaggcattgctgtactccttgaagcatagaattcctcttgttgcgtactgtgaggaacaatgtctaacattgtttgaacacccatttgttgaattgttgcacactgtacataatgaaaacaaggtaaaagtgatgcattcaattgaggaccttttggaatattcatctattcagaaattacttctttttgatagtaccaaagaggattcatctgtcctaaggcagcatttttcagaactgagcagagggaaagcacatgttatcaaaatgcattcaaatacaattgatattgttcccctcaatacttcaaaaggtggtggtttaagaattctacttgatcatcttggaataacaaaagattgcgatcttgattctattggagactataccagatggctaagcaataaatgattcaactgacatgattactgggtcgttcttaagaaaaaaatgtggaatcgtaggcgcgccaaaggaacaaaactattgctctgaaggttgcaaaaattcgaggataactcatacaggggaccctcggcgtccagatgcaacgtgctcgaagatgctgaggatggctcagagcgatggccaggtggggaagaagttgcatcatcagacacgttggaagctgatgagcacaaggacccactggacgcgcccgagaaggaattgtaagactcggagctttcgtcacctggtttattgcaaatctccttgtgacacgagggtactccatgaggtgctaagttgtaaggctctgccattcaatgttttgacatcaaagggacgcagcttatgtggatatatataggagaaaaagggagagctatccaagtggttggataagcgtcttgtttagtcggagaaattttgtgaactcacggccggagagcgagtgatagttgcccttactccatgtgatcttgatagattagtacattaatatttcttcatttcttgtgctattttattacttatgaactccgtctcttcgttgttgacatgaagcaagaaatggacatctgtcacttatttggataaatcaatgataacttagctgatggggagcatgcggaacaacgcccttcgggctgagacagacaagcatgttacctccggccaagaaaaagagagttatcccagcggattaggaaggataaggtagattatggcggcaagaaggtgctttctgttagcctggggctcatgcctagggtgttaataatgttaaataagagtgagat

SEQ ID NO: 54521 - DNA, 3421 bp, Zea Mays
gttaaacctatcttcccattttgttcctcgtcgagctcctcgctccgcagccaatcatcctcagccaaaatttctagaacctcgcgcagtcgcccgcaccacgccaatctgctgctgctctcgatggtgcgcctccatcagctcctctctcgcacgcttgcatctcaccaaatcctcgcttctgccacctccagcgtccgctccaccccgcggctgcttctccctctccggttgccgccgcctgctcctcctccccatggccgtactctgcttcccatcatcgtagccgcgtcgcgtcaatacgcctcgtcgaccttcgggaggcgagggcgctcgacgcggccgccgatgttgctgaggcgcaagagagccaggagtccgacgcggaagggccctggcgagctccgcgtgcaaattggcatagaggaggcccttcccgacgaccctggaatcctgagcattgcagaaactcttcggacggatgttgggaaggcagtgaagctggccctcaacgaccttgaaggctcggattacatgaccagagatccttctatatgcaatgtggacaagtatgctagcattgaggtctctgtgttgctttgtgatgatgatttcatcaggaagctcaacaaagaatggagggatgaggatcatgctactgatgttctgtcaatgtctcagcatatcccagagcttgatattcccattctcgacggcaagcagaagaaaggggacacacacttgttgatgagataagaatcctcatggtgcatgggctattgcatttattgggctttgaccatgaagtcagcaaggtggctgaagaagagatggagaaggaagaagaacatattttaaatactcttgaatggagaggaaagggattaattaagagtgcttatgatattgctactgttatggaacatttacaaaattctgttgaggctgatagcaatatagagaaagtgatcctacaagagaaacatcaacccaaactaagccatatcatctgtgatatagatggtactatcatggattatgaaggtggtctgcatgaaaaatcaataggatctttgagagaggcaattgcaacaggagtaaatgttatcatggttactggaaagggttcacttatctatggaagggatggcaaaaaagttcatagagcagaattggatttagatgtctgcaaggaggcattgctgtactccttgaagcatagaattcctcttgttgcgtactgtgaggaacaatgtctaacattgtttgaacacccatttgttgaattgttgcacactgtacataatgaaaacaaggtaaaagtgatgcattcaattgaggaccttttggaatattcatctattcagaaattacttctttttgatagtaccaaagaggattcatctgtcctaaggcagcatttttcagaactgagcagagggaaagcacatgttatcaaaatgcattcaaatacaattgatattgttcccctcaatacttcaaaaggtggtggtttaagaattctacttgatcatcttggaataacaaaagattgcgatcttgattctattggagactataccagatggctaagcaataaatgattcaactgacatgattactgggtcgttcttaagaaaaaaatgtggaatcgtaggcgcgccaaaggaacaaaactattgctctgaaggttgcaaaaattgtatgtttgtagcaccatctcttttagttggcaattcatgtgtttttatatttcgaaaaggattgggtggtgaatgtcagcttagatatttccttcagatcattttgttgagatacatgtgaagagaattgaatgggccacatccttgtgcaactggagcttaccatgtgacatttgcttttgtccaaagtcatctgcaacaccatttttaactctacatagatttttttgtagttttgttttgtgtagcatagcattgataaatgttgctaaataaacgagttaatggtttctccacgttgttgatatttgttcgaatgaaactaatgctgaagtataatttatggtcaggaattcaatggatgcattgtgatgacgataactgtattttctgccatgttgggctttgtttattatgactcaccgttactcattacatccatttgattgatcgatctttttatttatcatgaaatgaagcacataagaaatcaggttgattgtagaaacaaatattgttcagattttcatgcataaagcacacacgaagcacagctcgtcaatggaaagtggaggcttgtcaccctagttttccctttgttacagatcaatatgtgttgcaactctcttgttctggtgggcatatgatttagtgctgatgttcaaattgctggtgttgctagttcctggcattactctagcaaatgaaccatttgagggcctctttgctatcatcttgttgcacggccttgatacaatgattgtccgttggttcatgtctaatcctactgaatagcttttgcttgctctcatcctcttactgtatgaaactttctttgcaaggtcttgaacacttgtagcatcagatatagacgtgaatgattgggccttcccttggtagtaattggacagccctttcctgtggaaatcgtgttaattgaacatgagttggaatgctttgcatctgaagtgaaatttatagaacgaggataactcatacaggggaccctcggcgtccagatgcaacgtgctcgaagatgctgaggatggctcagagcgatggccaggtggggaagaagttgcatcatcagacacgttggaagctgatgagcacaaggacccactggacgcgcccgagaaggaattgtaagactcggagctttcgtcacctggtttattgcaaatctccttgtgacacgagggtactccatgaggtgctaagttgtaaggctctgccattcaatgttttgacatcaaagggacgcagcttatgtggatatatataggagaaaaagggagagctatccaagtggttggataagcgtcttgtttagtcggagaaattttgtgaactcacggccggagagcgagtgatagttgcccttactccatgtgatcttgatagattagtacattaatatttcttcatttcttgtgctattttattacttatgaactccgtctcttcgttgttgacatgaagcaagaaatggacatctgtcacttatttggataaatcaatgataacttagctgatggggagcatgcggaacaacgcccttcgggctgagacagacaagcatgttacctccggccaagaaaaagagagttatcccagcggattaggaaggataaggtagattatggcggcaagaaggtgctttctgttagcctggggctcatgcctagggtgttaataatgttaaataagagtgagat

SEQ ID NO: 54522 - DNA, 2639 bp, Zea Mays
caaaaatctcggttaaacctatcttcccattttgttcctcgtcgagctcctcgctccgcagccaatcatcctcagccaaaatttctagaacctcgcgcagtcgcccgcaccacgccaatctgctgctgctctcgatggtgcgcctccatcagctcctctctcgcacgcttgcatctcaccaaatcctcgcttctgccacctccagcgtccgctccaccccgcggctgcttctccctctccggttgccgccgcctgctcctcctccccatggccgtactctgcttcccatcatcgtagccgcgtcgcgtcaatacgcctcgtcgaccttcgggaggcgagggcgctcgacgcggccgccgatgttgctgaggcgcaagagagccaggagtccgacgcggaagggccctggcgagctccgcgtgcaaattggcatagaggaggcccttcccgacgaccctggaatcctgagcattgcagaaactcttcggacggatgttgggaaggcagtgaagctggccctcaacgaccttgaaggctcggattacatgaccagagatccttctatatgcaatgtggacaagtatgctagcattgaggtctctgtgttgctttgtgatgatgatttcatcaggaagctcaacaaagaatggagggatgaggatcatgctactgatgttctgtcaatgtctcagcatatcccagagcttgatattcccattctcgacggcaagcagaagaaaggggacacacacttgttgatgagataagaatcctcatggtgcatgggctattgcatttattgggctttgaccatgaagtcagcaaggtggctgaagaagagatggagaaggaagaagaacatattttaaatactcttgaatggagaggaaagggattaattaagagtgcttatgatattgctactgttatggaacatttacaaaattctgttgaggctgatagcaatatagagaaagtgatcctacaagagaaacatcaacccaaactaagccatatcatctgtgatatagatggtactatcatggattatgaaggtggtctgcatgaaaaatcaataggatctttgagagaggcaattgcaacaggagtaaatgttatcatggttactggaaagagtcgggcttccactattagaaccttcaagcttcttgatttccgcgaaaaaggtgattttatttcagagacttcacctggtgtatttttgcagggttcacttatctatggaagggatggcaaaaaagttcatagagcagaattggatttagatgtctgcaaggaggcattgctgtactccttgaagcatagaattcctcttgttgcgtactgtgaggaacaatgtctaacattgtttgaacacccatttgttgaattgttgcacactgtacataatgaaaacaaggtaaaagtgatgcattcaattgaggaccttttggaatattcatctattcagaaattacttctttttgatagtaccaaagaggattcatctgtcctaaggcagcatttttcagaactgagcagagggaaagcacatgttatcaaaatgcattcaaatacaattgatattgttcccctcaatacttcaaaaggtggtggtttaagaattctacttgatcatcttggaataacaaaagattgcgatcttgattctattggagactataccagatggctaagcaataaatgattcaactgacatgattactgggtcgttcttaagaaaaaaatgtggaatcgtaggcgcgccaaaggaacaaaactattgctctgaaggttgcaaaaattgtatgtttgtagcaccatctcttttagttggcaattcatgtgtttttatatttcgaaaaggattgggtggtgaatgtcagcttagatatttccttcagcgaggataactcatacaggggaccctcggcgtccagatgcaacgtgctcgaagatgctgaggatggctcagagcgatggccaggtggggaagaagttgcatcatcagacacgttggaagctgatgagcacaaggacccactggacgcgcccgagaaggaattgtaagactcggagctttcgtcacctggtttattgcaaatctccttgtgacacgagggtactccatgaggtgctaagttgtaaggctctgccattcaatgttttgacatcaaagggacgcagcttatgtggatatatataggagaaaaagggagagctatccaagtggttggataagcgtcttgtttagtcggagaaattttgtgaactcacggccggagagcgagtgatagttgcccttactccatgtgatcttgatagattagtacattaatatttcttcatttcttgtgctattttattacttatgaactccgtctcttcgttgttgacatgaagcaagaaatggacatctgtcacttatttggataaatcaatgataacttagctgatggggagcatgcggaacaacgcccttcgggctgagacagacaagcatgttacctccggccaagaaaaagagagttatcccagcggattaggaaggataaggtagattatggcggcaagaaggtgctttctgttagcctggggctcatgcctagggtgttaataatgttaaataagagtgagat

SEQ ID NO: 54523 - DNA, 3571 bp, Zea Mays
ctataatcacaaaaatctcggttaaacctatcttcccattttgttcctcgtcgagctcctcgctccgcagccaatcatcctcagccaaaatttctagaacctcgcgcagtcgcccgcaccacgccaatctgctgctgctctcgatggtgcgcctccatcagctcctctctcgcacgcttgcatctcaccaaatcctcgcttctgccacctccagcgtccgctccaccccgcggctgcttctccctctccggttgccgccgcctgctcctcctccccatggccgtactctgcttcccatcatcgtagccgcgtcgcgtcaatacgcctcgtcgaccttcgggaggcgagggcgctcgacgcggccgccgatgttgctgaggcgcaagagagccaggagtccgacgcggaagggccctggcgagctccgcgtgcaaattggcatagaggaggcccttcccgacgaccctggaatcctgagcattgcagaaactcttcggacggatgttgggaaggcagtgaagctggccctcaacgaccttgaaggctcggattacatgaccagagatccttctatatgcaatgtggacaagtatgctagcattgaggtctctgtgttgctttgtgatgatgatttcatcaggaagctcaacaaagaatggagggatgaggatcatgctactgatgttctgtcaatgtctcagcatatcccagagcttgatattcccattctgcagttgggtgacatagtaatttctgttgacacagctcgacggcaagcagaagaaaggggacacacacttgttgatgagataagaatcctcatggtgcatgggctattgcatttattgggctttgaccatgaagtcagcaaggtggctgaagaagagatggagaaggaagaagaacatattttaaatactcttgaatggagaggaaagggattaattaagagtgcttatgatattgctactgttatggaacatttacaaaattctgttgaggctgatagcaatatagagaaagtgatcctacaagagaaacatcaacccaaactaagccatatcatctgtgatatagatggtactatcatggattatgaaggtggtctgcatgaaaaatcaataggatctttgagagaggcaattgcaacaggagtaaatgttatcatggttactggaaagagtcgggcttccactattagaaccttcaagcttcttgatttccgcgaaaaaggtgattttatttcagagacttcacctggtgtatttttgcagggttcacttatctatggaagggatggcaaaaaagttcatagagcagaattggatttagatgtctgcaaggaggcattgctgtactccttgaagcatagaattcctcttgttgcgtactgtgaggaacaatgtctaacattgtttgaacacccatttgttgaattgttgcacactgtacataatgaaaacaaggtaaaagtgatgcattcaattgaggaccttttggaatattcatctattcagaaattacttctttttgatagtaccaaagaggattcatctgtcctaaggcagcatttttcagaactgagcagagggaaagcacatgttatcaaaatgcattcaaatacaattgatattgttcccctcaatacttcaaaaggtggtggtttaagaattctacttgatcatcttggaataacaaaagattgcgatcttgattctattggagactataccagatggctaagcaataaatgattcaactgacatgattactgggtcgttcttaagaaaaaaatgtggaatcgtaggcgcgccaaaggaacaaaactattgctctgaaggttgcaaaaattgtatgtttgtagcaccatctcttttagttggcaattcatgtgtttttatatttcgaaaaggattgggtggtgaatgtcagcttagatatttccttcagatcattttgttgagatacatgtgaagagaattgaatgggccacatccttgtgcaactggagcttaccatgtgacatttgcttttgtccaaagtcatctgcaacaccatttttaactctacatagatttttttgtagttttgttttgtgtagcatagcattgataaatgttgctaaataaacgagttaatggtttctccacgttgttgatatttgttcgaatgaaactaatgctgaagtataatttatggtcaggaattcaatggatgcattgtgatgacgataactgtattttctgccatgttgggctttgtttattatgactcaccgttactcattacatccatttgattgatcgatctttttatttatcatgaaatgaagcacataagaaatcaggttgattgtagaaacaaatattgttcagattttcatgcataaagcacacacgaagcacagctcgtcaatggaaagtggaggcttgtcaccctagttttccctttgttacagatcaatatgtgttgcaactctcttgttctggtgggcatatgatttagtgctgatgttcaaattgctggtgttgctagttcctggcattactctagcaaatgaaccatttgagggcctctttgctatcatcttgttgcacggccttgatacaatgattgtccgttggttcatgtctaatcctactgaatagcttttgcttgctctcatcctcttactgtatgaaactttctttgcaaggtcttgaacacttgtagcatcagatatagacgtgaatgattgggccttcccttggtagtaattggacagccctttcctgtggaaatcgtgttaattgaacatgagttggaatgctttgcatctgaagtgaaatttatagaacgaggataactcatacaggggaccctcggcgtccagatgcaacgtgctcgaagatgctgaggatggctcagagcgatggccaggtggggaagaagttgcatcatcagacacgttggaagctgatgagcacaaggacccactggacgcgcccgagaaggaattgtaagactcggagctttcgtcacctggtttattgcaaatctccttgtgacacgagggtactccatgaggtgctaagttgtaaggctctgccattcaatgttttgacatcaaagggacgcagcttatgtggatatatataggagaaaaagggagagctatccaagtggttggataagcgtcttgtttagtcggagaaattttgtgaactcacggccggagagcgagtgatagttgcccttactccatgtgatcttgatagattagtacattaatatttcttcatttcttgtgctattttattacttatgaactccgtctcttcgttgttgacatgaagcaagaaatggacatctgtcacttatttggataaatcaatgataacttagctgatggggagcatgcggaacaacgcccttcgggctgagacagacaagcatgttacctccggccaagaaaaagagagttatcccagcggattaggaaggataaggtagattatggcggcaagaaggtgctttctgttagcctggggctcatgcctagggtgttaataatgttaaataagagtgagat

SEQ ID NO: 54524 - DNA, 2590 bp, Zea Mays
gttctataatcacaaaaatctcggttaaacctatcttcccattttgttcctcgtcgagctcctcgctccgcagccaatcatcctcagccaaaatttctagaacctcgcgcagtcgcccgcaccacgccaatctgctgctgctctcgatggtgcgcctccatcagctcctctctcgcacgcttgcatctcaccaaatcctcgcttctgccacctccagcgtccgctccaccccgcggctgcttctccctctccggttgccgccgcctgctcctcctccccatggccgtactctgcttcccatcatcgtagccgcgtcgcgtcaatacgcctcgtcgaccttcgggaggcgagggcgctcgacgcggccgccgatgttgctgaggcgcaagagagccaggagtccgacgcggaagggccctggcgagctccgcgtgcaaattggcatagaggaggcccttcccgacgaccctggaatcctgagcattgcagaaactcttcggacggatgttgggaaggcagtgaagctggccctcaacgaccttgaaggctcggattacatgaccagagatccttctatatgcaatgtggacaagtatgctagcattgaggtctctgtgttgctttgtgatgatgatttcatcaggaagctcaacaaagaatggagggatgaggatcatgctactgatgttctgtcaatgtctcagcatatcccagagcttgatattcccattctgcagttgggtgacatagtaatttctgttgacacagctcgacggcaagcagaagaaaggggacacacacttgttgatgagataagaatcctcatggtgcatgggctattgcatttattgggctttgaccatgaagtcagcaaggtggctgaagaagagatggagaaggaagaagaacatattttaaatactcttgaatggagaggaaagggattaattaagagtgcttatgatattgctactgttatggaacatttacaaaattctgttgaggctgatagcaatatagagaaagtgatcctacaagagaaacatcaacccaaactaagccatatcatctgtgatatagatggtactatcatggattatgaaggtggtctgcatgaaaaatcaataggatctttgagagaggcaattgcaacaggagtaaatgttatcatggttactggaaagagtcgggcttccactattagaaccttcaagcttcttgatttccgcgaaaaaggtgattttatttcagagacttcacctggtgtatttttgcagggttcacttatctatggaagggatggcaaaaaagttcatagagcagaattggatttagatgtctgcaaggaggcattgctgtactccttgaagcatagaattcctcttgttgcgtactgtgaggaacaatgtctaacattgtttgaacacccatttgttgaattgttgcacactgtacataatgaaaacaaggtaaaagtgatgcattcaattgaggaccttttggaatattcatctattcagaaattacttctttttgatagtaccaaagaggattcatctgtcctaaggcagcatttttcagaactgagcagagggaaagcacatgttatcaaaatgcattcaaatacaattgatattgttcccctcaatacttcaaaaggtggtggtttaagaattctacttgatcatcttggaataacaaaagattgcgatcttgattctattggagactataccagatggctaagcaataaatgattcaactgacatgattactgggtcgttcttaagaaaaaaatgtggaatcgtaggcgcgccaaaggaacaaaactattgctctgaaggttgcaaaaattcgaggataactcatacaggggaccctcggcgtccagatgcaacgtgctcgaagatgctgaggatggctcagagcgatggccaggtggggaagaagttgcatcatcagacacgttggaagctgatgagcacaaggacccactggacgcgcccgagaaggaattgtaagactcggagctttcgtcacctggtttattgcaaatctccttgtgacacgagggtactccatgaggtgctaagttgtaaggctctgccattcaatgttttgacatcaaagggacgcagcttatgtggatatatataggagaaaaagggagagctatccaagtggttggataagcgtcttgtttagtcggagaaattttgtgaactcacggccggagagcgagtgatagttgcccttactccatgtgatcttgatagattagtacattaatatttcttcatttcttgtgctattttattacttatgaactccgtctcttcgttgttgacatgaagcaagaaatggacatctgtcacttatttggataaatcaatgataacttagctgatggggagcatgcggaacaacgcccttcgggctgagacagacaagcatgttacctccggccaagaaaaagagagttatcccagcggattaggaaggataaggtagattatggcggcaagaaggtgctttctgttagcctggggctcatgcctagggtgttaataatgttaaataagagtgagat

SEQ ID NO: 54525 - DNA, 889 bp, Zea Mays
ccatggggcagccacgccatgggagagggaagtgttagagggctcgaccatcgaagtttgctggtcagccatggggacgggggtgcggccttggagctccggcgttcaaggtaagcagcgagagggagttgcagaccggagctcgaatggcatctagccagcgcgcgcagggggagatggtgagctgcacaaaaaaaaggggaaactcgatctgggaggatggcggccagatgggactgctcgagggaatccacggcaaggtggggatggccggacttgagaagggcaggaagccatatgggagagggagcgtacgtgcaggaagcgaacaaggagcccaggccatggggcgagctcacctgctcgagctcggacctagagaaatgccctgcgctaggagcctggggagggggatcgtacgtgcaggaagcgaacaaggagcccaggccatggggcgagctcacctgctcgagctcggacctagagaaatgccctgcgctaggagcctggggagggggatgctgtgcagggtgccggccagaggtaaggtgcgccagggagagctcacagccatggataacgcaggggcagagaagagctcgcagggaactcagacgtcgtgaccgctggccggatcacaggctgaggagaagttgcacccatggcgccgcttacctagagttggccgagcagaagagggcggctggccatggagttcctgctgggcaccatggaaaggggagcagaggtgctgcacggcagaaggatgaaggagagcgtggggaggaagaggaggctgttggtggcggctaggggtgggaatgaaaatttcccaaatgcaagtgagggggattcgtatttataggcatgagctagggttagggtttcc

SEQ ID NO: 54526 - DNA, 1364 bp, Zea Mays
atactgccaggtccaatcaggtactaggcttatcgattttaccatatttctcggtatgcgtttagtacgttcaaacgcttgacacacggtaccacaccttaatccttattccaattttcatctcgtagaccacgcgtccccatggacccgtgtccacagaccatcatcattctgttatcaaaggggatacaaccaattcctgacctcgcgcgagtgctagaaaaatcactcgacttctaccgagatccctaattagcaaagcagctactcgacctagcatactagtatccatctcaaagggaatcctgagttcatgcaactagggtttcagtcaactcctacacttaagtgcacagtacaagcctacaaacattaagtgcagtaaaatagcatatatataacggttatgcataaaaccggggcttgcttttaatttaacacttaggtagtgtttgctgggggaggtactcgctcggcgagcatccactggttaagtccaccatccttcagtacgtccaccaactgcatcttgtggttgtcaccacatcgcttgcacggtcgtcacctctcggtcctaaatgagatgcaggatgcatatgtatgaatacaatgaaaaatatcacaagctatataaatacatggtagcaaactaacatttaattgtaagacactgcaacgactatacgcaagcgctagctattcgtatgttatcggcgttcatcattaacaccattaacaagacgaccaaattttatttatttacgcaacacaaatacgatatgacaagtacacatattttctacgctcaccttaatcattcatttgttctactattgaccacacaagagcaaccaagacaacataagtttaaatcggacctaggcatcaatgtctatgaaactcctatatcacaatcaactagagaagaaatatataaaacatgacacacatgcattattaagcttagtcatggcaagtctatattacttaagagcaaaccaaatatttttagcgagaagggtgaactaaacaatcaaaagcgcactagcagaatttttagacagcaatacagcaatcacttgtttcagtcataactcacaagatatttacccaaaaatagtaaactaggactttctagaaagcttcaaaagtgctttacaactttggtattgtcatcacagcatgattaaacacttagcaaggtcaaaaggtgttaacacaacagcgctgtccagatttggacagattcagacttgtgactttaaaaattcataactgaagattcagacatccaaacaaaatgatttaagactttctggaaatctaattaaatgttctacaaattatttataaacatctcaaag

SEQ ID NO: 54527 - DNA, 3775 bp, Zea Mays
cgaccactagctgtgataacacaaaaaaaattgttggcggcagttcaccgatcattagaaaaacaacaaggacagcgggggttctcaccgagggtcgacgacgtcgtgggcggggctgtccccaacaccaagcctctcacgggcattttgtcgggcacctgcagcctgcccatgcgaggagggtgctagggaaatgggccctcggccatagagcagagaggatgctggtaaactggggcttcatccatggggcagccacgccatgggagagggaagtgttagagggctcgaccatcgaagtttgctggtcagccatggggacgggggtgcggccttggagctccggcgttcaaggtaagcagcgagagggagttgcagaccggagctcgaatggcatctagccagcgcgcgcagggggagatggtgagctgcacaaaaaaaaggggaaactcgatctgggaggatggcggccagatgggactgctcgagggaatccacggcaaggtggggatggccggacttgagaagggcaggaagccatatgggagagggagcgtacgtgcaggaagcgaacaaggagcccaggccatggggcgagctcacctgctcgagctcggacctagagaaatgccctgcgctaggagcctggggagggggatgctgtgcaggttgccggccagaggtaaggtgcgccagggagagctcgcagccatggataacgcaggggcagagaagagctcgcagggaactcagacgccgtgaccgctggtcggatcacagactgaggagaagttgcacccatggcgccgcttacccagagttggccgagcagaagaggggcggctggccatggagttcctgctaggcaccatggaaaggggagcagaggtgctgcacggcagaaggatgaaggagagcgtggggaggaagaggaggctgttggtggcggctaggggtgggaatgaaaatttcccaaatgcaagtgagggggattcgtatttataggcatgagctagggttagggtttccttagtgggctgggttgggctggcccaaacacgttattgggttgcgctaaacattttccggaataaaatgttcctgcggaatttgtctgtacacagaacagagcgaaatagatttcggcgaacggacggttgagcaattaattcggccgagagtctaattagatttcgctcgaaaataattccctacgcgtgattcgaaaataaaccgtcctgagatttgatcggctttggatttttagttggagaaggcaaatcgtgacattttaaaattgctagcaatacggggttttgaattcagttcggacttgagatatttggccgagtcggataaaattgattagaggacgacatactgagtattccgtcggagaatacggacccggataaaatagtcgaacatagatcaaggttcgaaaaattagactcgggctcagatcaattaacagttgtcgagagtttgattaaatgagcttcagatgagatttataattcgagaatgatttttgagtttgcatccgtgccgaggataaaagttttaacacgctccaaaaatggttgtttctcgcgatcaattaactctgaattcggtgaacttccaagagaaagcctgataaacagagataggcacgatcgagaaatagaaatttttattgaacatccgagattaggattaatctcccgacataacgcgaaattgacaccagggtgtcacagccttccccccttaaaaagaatctcgtcccgagattcgaatgaggatcttcaagggtggagaagcatgtaactcccaggatgaagatagatgcaaattcatgagagggtatctgacaagatactggagacagatttggatataatatcgcgacatatcgagacaaaatgcagcgatcattctgagagagtgtccacaaaagatagcacatcagtatagtctcgtaatggaccacgactattaaccgcgataccagcgcgtgccgagcagctcaaccatgtgtgcaccatagtaggctctcggtctcgtcgtggcactattggtcgttagtcataacaccattaccaaacgcaaccaatgaaaaattcacttggcataattagatggagcccatgagagtatggcccagaaaataagaatgtgaccggagttgaagcaagattgctgacaaaagagcatcacatgagaatttttctttaactcagagaaatattttatgatcaacatggagattatcagattagatattagcacgagatttgatatgaggatgaaccgaccatgagatcaaaatagattgttgagcttttagagacatgagagaaccaaggacaacaatcaaatccattgaaccaaatggatatgccatttagagataagttgataaaacaagcgtcatgatcctcggagaaggggtatgagaatgaccaaaattgagagattttggtatatcaacatctgatacttgagaacgagttagagcagatatccagataatagggtaggatcaataggggatccagagatttggatgataaggtcacaacatgattcacaaggaaaagattaccagatccaggtgaaaggagaggtagtcagatgagattgattaggatgggcaccagaaaggttatgaagatttgggacatgatctatggaaagaaacatgaccttgatagggtttgcgcaactagacaccaaacgatttttttgacgcaacaagtgcacaaggagactggggtagtctagcggtcaagctatgggcatctataggttgtgcaggtttaatttcaagggtaaaacactcaagggctagaaaataccaacaccagcagaattttcttttaaagaggtttcacttgctaaactcaaggttgtttggacggggggtctttttcatgagcagaacaaacaacacttttttttgcaacaagggttgaacaattaccctaccacctagatagccagacaagagaaacacatatcacaacataacaagacataaccatctgacacgagataaggcatttctaacatagcagtacatcacattattcacaagtttttattattggaataaaggtaagagaagcgtgttgatgcacaagagacaatgatgcgacaatcaggatgcatgctcattctagtcgtcttctcagacctgactaattttcgggtgcttctacaacatccttattaatagtagtagtagcctctatggcctatatacatagccacctagctacccatctatttcctaaggcttcacgtcctaagtctatccttatcgtcctgacttctatccaacttggtttctaagcaagttttacttttgaaaaggttggtaatcatgacttattgacttctctgtattggtattcgctccaataccagctgtggcggaaccgcccgaattattctagcttaagtgcccaagtcgcacccttaagggcagcaacgcacttaaacaggaataactcgtcagtccctcggatctagtccgataaagccacttaccaggatcgaataccactagctcactcgaaggtgaggcacagagaaatacaataaaacataataccacaaatttaataagtataattagtgattacattatcgaagttttataaataataaccataaattttaatgcagcggaaataactaacggagaaacccgagtaacatggcgaagcctggccacgctactcctcctggtcctctcctgcggaagcagtaacccactcgaccatct

SEQ ID NO: 54528 - DNA, 1026 bp, Zea Mays
cctcactgaccccgactgccgtcgtgcagtgaccgcacttgtacccaccataaccggaatgggagaccacgtcttaggtcgcgtgaggggcaaagtctactgccaggttcaatcaggtactaggcttaccgatttaccatatttctcggcatgcgtttagtacgttcaaacgcttgacacacggtaccacaccttaatccttattccaattttcatctcgtagaccacgcgtccccatggacccgtgtccacagaccatcatcattctgttatcaaaggggatacaaccaattcctgacctcgcgcgagtgctagaaaaatcactcgacttctaccgagatccctaattagcaaagcagctactcgacctagcatactagtatccatctcaaagggaatcctgagttcatgcaactagggtttcagtcaactcctacacttaagtgcacagtacaagcctacaaacattaagtgtagtgaaatagcatatatataacggttatgcataaaaccggagcttgcctttaatttaacacttaggtagtgtttgctgggggaggtactcgctcggcgagcatccactggttaagtccaccatccttcagtacgtccaccaactgcatcttgtggttgtcgccacatcgcttgcacggtcgtcacctctcggtcctaaatgagatgcaggatgcatatgtatgaatacaatgaaaaatatcacaagctatataaatacatggtagcaaactaacatttaattgtaagacactgcaacgactatacacaagcgctagctattcgtatgttatcggcgttcatcattaacaccattaacaagacgaccaaattttatttatttacgcaacacaaatacgatatgacaagtacacacattttctacgctcaccttaatcattcatttgttctactattgaccacacaagagcaaccaagacaacataagtttaaatcggacctaggcatcaatgtctatgaaactcctatatcacaatcaactagagaagaaat

SEQ ID NO: 54529 - DNA, 1474 bp, Zea Mays
ctcgttcattgcgttgtgcctggcaccccttctcccctccatttgaggtagctccgaatcgtggttagcacacctccgccgccgctgttgaattgaatccccaccattgctccggcctctttgttgggtcgtggaggtccgccgaggctcatggatcgcatattggaatctgggagggctcgagggtcatcgttcagttcggaattcgtcgccaatgtacgtcgtcgccgcggagccgcttcgtgtcgtggtccgagtctatgaatgctctatggccgcgcaaggttacgagtcacctgaagagcaagttggtatctggaatctcaagtcccaggcaagttgtgcccttgatcacttctttttacccaatcatgttcttattaatcataatgatctgcataggttaattttgatggaacccaataggtcaccctagtttggctatctttataccttgtttaccactgaatttttgggtagtacctgctattgctttatgtggttttgggtatgaagatatacattattcatgatcatacttttattatcagtttattatttactactcatgataagatcattatgttaattggaacatggagaaccacccgggaaaacagtgctaccacaaggatggtatggacgcccttggctgactaattaggacagctagtggatgactaccttactcgaaaggggcaagggcagtgtaggaagacccttgggttgattttgatgtgatggcggtcaggcgaggggtccctgtattaaagcttcctagaaattgtagcgggttttctgaagctagtggaactttataaaggcctcgtagtgttaccctgcctcgcctcctcggtagatgtatatgggaagtcgtgatcccttgggcagatgggtaacatgacttgtgggtaaagatgtgcaacctctgcagagtgtaaaactggtatatcagtcgtgctcacggtcatgagcagctcggacactcacatgagtaatttatggaactaaattcaatttgtcatacgcattgcatcgcatgtgttgttatcacttttattctactacttaattgggttggtatctacttatacttagtaattgctaataaaattttgaccaactttaaaagcaatgctcagctttaaccatcctctttggtaagccttacacttcacatgagctctcaactttggcgagctcaagcacattattccccacaacttgttgagcgatgaacgtatgtgagctcactcttgctgtctcacaccccccccacaggtcaagaacaggtaccgcatgatgaggcgcatggaggatgatgtgatgagttcgtgagaggtctaggccatcatctcctagtcaactctgggttgctggatcgttgtctccttatgatgtaattatttatttattttgtatagaactcctattatataataaagatgtgacattcatttctataccactattc

SEQ ID NO: 54530 - DNA, 2856 bp, Zea Mays
cgagacccttttgcgttgctctctctcccgcagcagtatataggatgggcgccaacgtctagccattgctgcatctgtttgggagaagcaaagcagggtccctccgtatttcccatggtttttgtgacttgtgagagagaacaaggccaaacactgaaacacatctctgaagtctgagccctgacccagcagcgccaagatccgggaccgggagagggacctgctccctggggggtgccctttttgaggtttgtgtgttctttgcctccctcccctttaattttcttttaatttcccatgtcatgcattgttgcctgagaagtgatggcgtctcccgctgccgtgccctgcccccctttgctatcctgctccttgcaggcgttccatttggaagtgttcatctttccattttagaggacgtccatggggggtcatggggagctcaatcttcgagttttgatatattttttttcttgacgtctgccttggttcttgtgttcgtcttatattttatcgcttctgcttgctgtctcctctcaatccgtcaatctttgtcctactacttgtttacttccatcgaggtccttggctccttgcccattacttgtctgtttatctccatcaccgataattacttcgccagtcattgcacttacacacagtgggtttatctgttcatgcactttcgtatgcttgaattcagtttggctctatgtgccttccaataatgacagtagtagttatcaaaccctcctttttttccttcccaatgaatcatttcgcaatcaccatggggatctttttagcgtgctgaaatcactacaaactttacaagattcccctacaatggcgagcgatccgtcgacgttctcgccaatcggggtggacgccatgggcggcggctacttcatggccggcagcagcagctacggaggcggcggcattatgagcgccgaggtgccgcacttccaccaccccggcgtgcttcttgaccagggcggcttcgggttcggcggcctcggcaacgcggcggtcgtcggcggcgccgcgacggcggcggatctgggcgcgcactacgcggcgaacaacatcgtgctggcctccttcgccagccagctcctcgctaacgcccccgcgccgccgcgggatgatcgtgccggcgggaggacgccgccggacgagatggacgaagagctgtacggcgtcgccggctgcgacagccgcgtcgcggcgagcttgcggtgccccagccaatccggggccatggcggtctggtcgtcgccatcgtcgtccaagaagccgtacggcatctggaccagcgccggcggaccagctcatgaaccataccacctcgccgcggccgggctctccgacgcgggaggcctccgctacccgctcgccgcctgcagtggcggcaacgcgtccgcggcggcggcgagcgagctgtcgctgactctgtgctccaactccatcgcttcctcggacagcgcgctgaacgcgacggagcagtgctcctcgggagcgagccggtccgccctgaccgagctgccgcgggcgcggtcccggatggcgctgcacttcgccgcggtggtggcgcgctcgcggtacgcggccgtggtccaggatttgctcaacgacgtcgtcggccacatgctggacggcgtcgccgacgtgaccgacgactcgtgcagcggcatcggctcggttggcgcgccgtccgcggtgagctccaacaggttcatggcctcgaccgaagacgccggcgcgcgctggggccaggcccagagggtccggagcaacctcctcaagacgcttcagctgatggacgagaagtacaaccagtgcttggacgagatccagagcacgacggccaggttcaacaccctgatgcactcgcccccgggcggcggcggcggcggcggcggcatctgcgcgccgttcgcgcaccgcgccgtgtcgacgatgtaccgtgggctgaggcggcggctcgccggcgagatcatggctgcggcgagcagggccagctgctggggcgagtcgtcgtcgtcggtgacggtggccgcgggcggcgacgtggagcggagctgggagtcggccttcatacagaagcactggtcggcgcagcagctgcggcgcaccgagcagcagtgctggcggccccagcgcggcctgccggagaagtccgtcgccgtgctcaaggcgtggatgttcgagaacttcctgcacccgtatcccaaggaccatgagaaggacgtgctggcggcaaggagcggcctcaccaggaaccaggtgtcgaattggttcataaacgcgcgggttcgtctatggaagccgatgatcgaggagatgtaccaggacctcaagaggagctcgggtgcaggaggaggagggcacggcccggcgatggagccacagcagcacttgagcaagcgtcgaatttgcgagctggaagatggtggccagtgaaccatccagctccatagctgcctgccgtggatttaccattggcccttgtagtttccctgtgctatgtttatgtacatatcattgccaacgccagcatttaacatctgcgcatcttttatcctgggttgactgggaagggccaagagcagcggcggcggatactgctggatcagggttctggatgctctattcgtccgctcagcattccgatggttgcccgtttcagatatagcggatttcatgctttgtttcttgtcatgtcagcttgcattgcagtagtcaatttcagcaaaacaatttttttttggagatttgattctttctaggatcatgagcggatttcattgcagtagtcagttataaaatggttcatcctgaggtccaaaaagc

SEQ ID NO: 54531 - DNA, 2250 bp, Zea Mays
aacacaggcctcagcaatcaactcaagccatgccaatgccacgagacccttttgcgttgctctctctcccgcagcagtatataggatgggcgccaacgtctagccattgctgcatctgtttgggagaagcaaagcagggtccctccgtatttcccatggtttttgtgacttgtgagagagaacaaggccaaacactgaaacacatctctgaagtctgagccctgacccagcagcgccaagatccgggaccgggagagggacctgctccctggggggtgccctttttgaggcgtgctgaaatcactacaaactttacaagattcccctacaatggcgagcgatccgtcgacgttctcgccaatcggggtggacgccatgggcggcggctacttcatggccggcagcagcagctacggaggcggcggcattatgagcgccgaggtgccgcacttccaccaccccggcgtgcttcttgaccagggcggcttcgggttcggcggcctcggcaacgcggcggtcgtcggcggcgccgcgacggcggcggatctgggcgcgcactacgcggcgaacaacatcgtgctggcctccttcgccagccagctcctcgctaacgcccccgcgccgccgcgggatgatcgtgccggcgggaggacgccgccggacgagatggacgaagagctgtacggcgtcgccggctgcgacagccgcgtcgcggcgagcttgcggtgccccagccaatccggggccatggcggtctggtcgtcgccatcgtcgtccaagaagccgtacggcatctggaccagcgccggcggaccagctcatgaaccataccacctcgccgcggccgggctctccgacgcgggaggcctccgctacccgctcgccgcctgcagtggcggcaacgcgtccgcggcggcggcgagcgagctgtcgctgactctgtgctccaactccatcgcttcctcggacagcgcgctgaacgcgacggagcagtgctcctcgggagcgagccggtccgccctgaccgagctgccgcgggcgcggtcccggatggcgctgcacttcgccgcggtggtggcgcgctcgcggtacgcggccgtggtccaggatttgctcaacgacgtcgtcggccacatgctggacggcgtcgccgacgtgaccgacgactcgtgcagcggcatcggctcggttggcgcgccgtccgcggtgagctccaacaggttcatggcctcgaccgaagacgccggcgcgcgctggggccaggcccagagggtccggagcaacctcctcaagacgcttcagctgatggacgagaagtacaaccagtgcttggacgagatccagagcacgacggccaggttcaacaccctgatgcactcgcccccgggcggcggcggcggcggcggcggcatctgcgcgccgttcgcgcaccgcgccgtgtcgacgatgtaccgtgggctgaggcggcggctcgccggcgagatcatggctgcggcgagcagggccagctgctggggcgagtcgtcgtcgtcggtgacggtggccgcgggcggcgacgtggagcggagctgggagtcggccttcatacagaagcactggtcggcgcagcagctgcggcgcaccgagcagcagtgctggcggccccagcgcggcctgccggagaagtccgtcgccgtgctcaaggcgtggatgttcgagaacttcctgcacccgtatcccaaggaccatgagaaggacgtgctggcggcaaggagcggcctcaccaggaaccaggtgtcgaattggttcataaacgcgcgggttcgtctatggaagccgatgatcgaggagatgtaccaggacctcaagaggagctcgggtgcaggaggaggagggcacggcccggcgatggagccacagcagcacttgagcaagcgtcgaatttgcgagctggaagatggtggccagtgaaccatccagctccatagctgcctgccgtggatttaccattggcccttggccaagagcagcggcggcggatactgctggatcagggttctggatgctctattcgtccgctcagcattccgatggttgcccgtttcagatatagcggatttcatgctttgtttcttgtcatgtcagcttgcattgcagtagtcaatttcagcaaaacaatttttttttggagatttgattctttctaggatcatgagcggatttcattgcagtagtcagttataaaatggttcatcctgaggtccaaaaagc

SEQ ID NO: 54532 - DNA, 2645 bp, Zea Mays
tgcagctgttgagcacagctgccaaacgaaccaacgcttcctaaaccgagaacatgcatcagcaatatttttttttgtttttgttttgaagcataacagtataacacaggcctcagcaatcaactcaagccatgccaatgccacgagacccttttgcgttgctctctctcccgcagcagtatataggatgggcgccaacgtctagccattgctgcatctgtttgggagaagcaaagcagggtccctccgtatttcccatggtttttgtgacttgtgagagagaacaaggccaaacactgaaacacatctctgaagtctgagccctgacccagcagcgccaagatccgggaccgggagagggacctgctccctggggggtgccctttttgaggcgttccatttggaagtgttcatctttccattttagaggacgtccatggggggtcatggggagctcaatcttcgagttttgatatattttttttcttgacgtctgccttggttcttgtgttcgtcttatattttatcgcttctgcttgctgtctcctctcaatccgtcaatctttgtcctactacttgtttacttccatcgaggcgtgctgaaatcactacaaactttacaagattcccctacaatggcgagcgatccgtcgacgttctcgccaatcggggtggacgccatgggcggcggctacttcatggccggcagcagcagctacggaggcggcggcattatgagcgccgaggtgccgcacttccaccaccccggcgtgcttcttgaccagggcggcttcgggttcggcggcctcggcaacgcggcggtcgtcggcggcgccgcgacggcggcggatctgggcgcgcactacgcggcgaacaacatcgtgctggcctccttcgccagccagctcctcgctaacgcccccgcgccgccgcgggatgatcgtgccggcgggaggacgccgccggacgagatggacgaagagctgtacggcgtcgccggctgcgacagccgcgtcgcggcgagcttgcggtgccccagccaatccggggccatggcggtctggtcgtcgccatcgtcgtccaagaagccgtacggcatctggaccagcgccggcggaccagctcatgaaccataccacctcgccgcggccgggctctccgacgcgggaggcctccgctacccgctcgccgcctgcagtggcggcaacgcgtccgcggcggcggcgagcgagctgtcgctgactctgtgctccaactccatcgcttcctcggacagcgcgctgaacgcgacggagcagtgctcctcgggagcgagccggtccgccctgaccgagctgccgcgggcgcggtcccggatggcgctgcacttcgccgcggtggtggcgcgctcgcggtacgcggccgtggtccaggatttgctcaacgacgtcgtcggccacatgctggacggcgtcgccgacgtgaccgacgactcgtgcagcggcatcggctcggttggcgcgccgtccgcggtgagctccaacaggttcatggcctcgaccgaagacgccggcgcgcgctggggccaggcccagagggtccggagcaacctcctcaagacgcttcagctgatggacgagaagtacaaccagtgcttggacgagatccagagcacgacggccaggttcaacaccctgatgcactcgcccccgggcggcggcggcggcggcggcggcatctgcgcgccgttcgcgcaccgcgccgtgtcgacgatgtaccgtgggctgaggcggcggctcgccggcgagatcatggctgcggcgagcagggccagctgctggggcgagtcgtcgtcgtcggtgacggtggccgcgggcggcgacgtggagcggagctgggagtcggccttcatacagaagcactggtcggcgcagcagctgcggcgcaccgagcagcagtgctggcggccccagcgcggcctgccggagaagtccgtcgccgtgctcaaggcgtggatgttcgagaacttcctgcacccgtatcccaaggaccatgagaaggacgtgctggcggcaaggagcggcctcaccaggaaccaggtgtcgaattggttcataaacgcgcgggttcgtctatggaagccgatgatcgaggagatgtaccaggacctcaagaggagctcgggtgcaggaggaggagggcacggcccggcgatggagccacagcagcacttgagcaagcgtcgaatttgcgagctggaagatggtggccagtgaaccatccagctccatagctgcctgccgtggatttaccattggcccttgtagtttccctgtgctatgtttatgtacatatcattgccaacgccagcatttaacatctgcgcatcttttatcctgggttgactgggaagggccaagagcagcggcggcggatactgctggatcagggttctggatgctctattcgtccgctcagcattccgatggttgcccgtttcagatatagcggatttcatgctttgtttcttgtcatgtcagcttgcattgcagtagtcaatttcagcaaaacaatttttttttggagatttgattctttctaggatcatgagcggatttcattgcagtagtcagttataaaatggttcatcctgaggtccaaaaagc

SEQ ID NO: 54533 - DNA, 1730 bp, Zea Mays
gtgggccccgcgctgcctgattggcctgattcccttccgccttcaattcctacgcgcggtctcccttctcttccacctcaattcgtgtcgcctacgcctctcgctctcctcccgccgcgcgcgcgagaggagggaaagggaggggaggaagccggcggggggcgcgcggcatggacgcgcgggccagggaggctgcagagaccagcggccccgggttgccgctcgccgtgcgggagctcctcgccggaggggtcgccgggggagtcgccaagaccgctgtcgcgccgctcgagcgcgtcaagatcctgttccagacaagaagagcggagttccatggttctggattgattggatccttccgaacaatctatcggacagaaggtcttttagggttttacaggggaaatggagctagtgttgctcgaattgtcccgtatgcagctttgcattatatggcctatgaagaataccgccggtggatcattcttggctttcctaatgttgagcaagggcctgttcttgatctcgtggctggctctatagctggagggacagctgtcatatgcacataccctcttgatctagtccgcacaaagttggcttatcaggtgaaaggtgcagtcagtgtgggtttcagagaatctaagccctctgaacaggtttacaaaggaatcatggattgtgtgaaaacaatatacagacaaaatggattgaaaggcatataccgtggcatggctccttcactatatggaatcttcccttactctggtcttaaattctacttctacgagaagatgaagagccacgttcctgaagagcacagaaaaggtatcatagcaaagctcggttgcggatcagttgcaggtttgctaggtcagacaataacataccccctagatgttgttaggcgacaaatgcaggttcaagccctttcgtcatccagccttgtgggtaggggaacatttgaaagcctggttatgatagcgaaacagcaaggctggcgacaacttttctcaggattatctatcaactatttaaagctcctggcataaaaggcataaaagaaaagaagaagaaaaaaaagagagtgccctacatgttctgcatatattcatggcacagttatgactcgagtactgcatgtggtgccatcagtagccataggatttactgtttacgactcgatgaaggtctgtctaaaagttccgtcgagggaggaaactgctgttgctgtcttggcagaggagcgaagcaatacagctcctatcccctccagttaggcaggagtgtaggatagcattctttcttggatcttatcttctccaacgcgttggagacaataattcgacgaccatcaataagcgcataagcaagcagtcgaaaagtaattcctggcggattagcatttctgtgtacaggctcttgtgtgtgtatatgtatatatagctgatgaataaataggttgcgccccctccctattctatcgcgacgagtacaaaagaatctatgcgccttgcattccccaccctgttggattgttgcgggctgcgcgcgcagcacgacatctaggattttttggtcagatcctcgcatatctcagattccttgcctatagcctgtactggtcctatggattgttcttcccagatcgaattcaaattcacattttacggttggagactgactgagggcatatatatgcttgggagagagagccatttgtatgcctc

SEQ ID NO: 54534 - DNA, 1638 bp, Zea Mays
gtgggccccgcgctgcctgattggcctgattcccttccgccttcaattcctacgcgcggtctcccttctcttccacctcaattcgtgtcgcctacgcctctcgctctcctcccgccgcgcgcgcgagaggagggaaagggaggggaggaagccggcggggggcgcgcggcatggacgcgcgggccagggaggctgcagagaccagcggccccgggttgccgctcgccgtgcgggagctcctcgccggaggggtcgccgggggagtcgccaagaccgctgtcgcgccgctcgagcgcgtcaagatcctgttccagacaagaagagcggagttccatggttctggattgattggatccttccgaacaatctatcggacagaaggtcttttagggttttacaggggaaatggagctagtgttgctcgaattgtcccgtatgcagctttgcattatatggcctatgaagaataccgccggtggatcattcttggctttcctaatgttgagcaagggcctgttcttgatctcgtggctggctctatagctggagggacagctgtcatatgcacataccctcttgatctagtccgcacaaagttggcttatcaggtgaaaggtgcagtcagtgtgggtttcagagaatctaagccctctgaacaggtttacaaaggaatcatggattgtgtgaaaacaatatacagacaaaatggattgaaaggcatataccgtggcatggctccttcactatatggaatcttcccttactctggtcttaaattctacttctacgagaagatgaagagccacgttcctgaagagcacagaaaaggttcaagccctttcgtcatccagccttgtgggtaggggaacatttgaaagcctggttatgatagcgaaacagcaaggctggcgacaacttttctcaggattatctatcaactatttaaagctcctggcataaaaggcataaaagaaaagaagaagaaaaaaaagagagtgccctacatgttctgcatatattcatggcacagttatgactcgagtactgcatgtggtgccatcagtagccataggatttactgtttacgactcgatgaaggtctgtctaaaagttccgtcgagggaggaaactgctgttgctgtcttggcagaggagcgaagcaatacagctcctatcccctccagttaggcaggagtgtaggatagcattctttcttggatcttatcttctccaacgcgttggagacaataattcgacgaccatcaataagcgcataagcaagcagtcgaaaagtaattcctggcggattagcatttctgtgtacaggctcttgtgtgtgtatatgtatatatagctgatgaataaataggttgcgccccctccctattctatcgcgacgagtacaaaagaatctatgcgccttgcattccccaccctgttggattgttgcgggctgcgcgcgcagcacgacatctaggattttttggtcagatcctcgcatatctcagattccttgcctatagcctgtactggtcctatggattgttcttcccagatcgaattcaaattcacattttacggttggagactgactgagggcatatatatgcttgggagagagagccatttgtatgcctc

SEQ ID NO: 54535 - DNA, 1709 bp, Zea Mays
gtgggccccgcgctgcctgattggcctgattcccttccgccttcaattcctacgcgcggtctcccttctcttccacctcaattcgtgtcgcctacgcctctcgctctcctcccgccgcgcgcgcgagaggagggaaagggaggggaggaagccggcggggggcgcgcggcatggacgcgcgggccagggaggctgcagagaccagcggccccgggttgccgctcgccgtgcgggagctcctcgccggaggggtcgccgggggagtcgccaagaccgctgtcgcgccgctcgagcgcgtcaagatcctgttccagacaagaagagcggagttccatggttctggattgattggatccttccgaacaatctatcggacagaaggtcttttagggttttacaggggaaatggagctagtgttgctcgaattgtcccgtatgcagctttgcattatatggcctatgaagaataccgccggtggatcattcttggctttcctaatgttgagcaagggcctgttcttgatctcgtggctggctctatagctggagggacagctgtcatatgcacataccctcttgatctagtccgcacaaagttggcttatcaggtgaaaggtgcagtcagtgtgggtttcagagaatctaagccctctgaacaggtttacaaaggaatcatggattgtgtgaaaacaatatacagacaaaatggattgaaaggcatataccgtggcatggctccttcactatatggaatcttcccttactctggtcttaaattctacttctacgagaagatgaagagccacgttcctgaagagcacagaaaaggtatcatagcaaagctcggttgcggatcagttgcaggtttgctaggtcagacaataacataccccctagatgttgttaggcgacaaatgcaggttcaagccctttcgtcatccagccttgtgggtaggggaacatttgaaagcctggttatgatagcgaaacagcaaggctggcgacaacttttctcaggattatctatcaactatttaaagctcctggcataaaaggcataaaagaaaagaagaagaaaaaaaagagagtgccctacatgttctgcatatattcatggcacagtggtgccatcagtagccataggatttactgtttacgactcgatgaaggtctgtctaaaagttccgtcgagggaggaaactgctgttgctgtcttggcagaggagcgaagcaatacagctcctatcccctccagttaggcaggagtgtaggatagcattctttcttggatcttatcttctccaacgcgttggagacaataattcgacgaccatcaataagcgcataagcaagcagtcgaaaagtaattcctggcggattagcatttctgtgtacaggctcttgtgtgtgtatatgtatatatagctgatgaataaataggttgcgccccctccctattctatcgcgacgagtacaaaagaatctatgcgccttgcattccccaccctgttggattgttgcgggctgcgcgcgcagcacgacatctaggattttttggtcagatcctcgcatatctcagattccttgcctatagcctgtactggtcctatggattgttcttcccagatcgaattcaaattcacattttacggttggagactgactgagggcatatatatgcttgggagagagagccatttgtatgcctc

SEQ ID NO: 54536 - DNA, 1617 bp, Zea Mays
gtgggccccgcgctgcctgattggcctgattcccttccgccttcaattcctacgcgcggtctcccttctcttccacctcaattcgtgtcgcctacgcctctcgctctcctcccgccgcgcgcgcgagaggagggaaagggaggggaggaagccggcggggggcgcgcggcatggacgcgcgggccagggaggctgcagagaccagcggccccgggttgccgctcgccgtgcgggagctcctcgccggaggggtcgccgggggagtcgccaagaccgctgtcgcgccgctcgagcgcgtcaagatcctgttccagacaagaagagcggagttccatggttctggattgattggatccttccgaacaatctatcggacagaaggtcttttagggttttacaggggaaatggagctagtgttgctcgaattgtcccgtatgcagctttgcattatatggcctatgaagaataccgccggtggatcattcttggctttcctaatgttgagcaagggcctgttcttgatctcgtggctggctctatagctggagggacagctgtcatatgcacataccctcttgatctagtccgcacaaagttggcttatcaggtgaaaggtgcagtcagtgtgggtttcagagaatctaagccctctgaacaggtttacaaaggaatcatggattgtgtgaaaacaatatacagacaaaatggattgaaaggcatataccgtggcatggctccttcactatatggaatcttcccttactctggtcttaaattctacttctacgagaagatgaagagccacgttcctgaagagcacagaaaaggttcaagccctttcgtcatccagccttgtgggtaggggaacatttgaaagcctggttatgatagcgaaacagcaaggctggcgacaacttttctcaggattatctatcaactatttaaagctcctggcataaaaggcataaaagaaaagaagaagaaaaaaaagagagtgccctacatgttctgcatatattcatggcacagtggtgccatcagtagccataggatttactgtttacgactcgatgaaggtctgtctaaaagttccgtcgagggaggaaactgctgttgctgtcttggcagaggagcgaagcaatacagctcctatcccctccagttaggcaggagtgtaggatagcattctttcttggatcttatcttctccaacgcgttggagacaataattcgacgaccatcaataagcgcataagcaagcagtcgaaaagtaattcctggcggattagcatttctgtgtacaggctcttgtgtgtgtatatgtatatatagctgatgaataaataggttgcgccccctccctattctatcgcgacgagtacaaaagaatctatgcgccttgcattccccaccctgttggattgttgcgggctgcgcgcgcagcacgacatctaggattttttggtcagatcctcgcatatctcagattccttgcctatagcctgtactggtcctatggattgttcttcccagatcgaattcaaattcacattttacggttggagactgactgagggcatatatatgcttgggagagagagccatttgtatgcctc

SEQ ID NO: 54537 - DNA, 1308 bp, Zea Mays
ccgctttataaatcataccaccttgcttcccaagaactaatttaattttatcaaacaattataattcctcaatagtaatactaacaatattattgtctagacattttaaaatactacatttaacctacgcttcaccgaaatactatattctacaaaatagaactagttcgaatatattcggcaactaaactccgcgaagcacacttcgccttactggtatttctaacttaatcgtacacgcaaacgtagcgtcttattttacgatcataaaattgatagtaaaaatagcgaatcgactcaccacattacaacccgatttggtagttgcctgacgacggccctcagctgaagtccttgatcgaacccttggcaagcattaaactaagcttcacttcgacgacaaccagatcaatatcgggactcgacgacagcgcaacaccaccacgagatggaggcaaactggctacaacggcttaggacatgtgctgagactgacagcaggggacttcgcgaagggtagcgagactcgatggcgaacggcgcgacgacgaactaagtcgcggcgagattgacgacaagataggaattttaaagccgaacgagccgagagggcacgctggcgagctagaaaaagatttggcgcgcgagcccaacgcgcacagatttttttgtttcattgctctacgcacgacgcaggaaaccggccacagcgagcatagggacacaactgcgcgcggcgtgtgcgcagagagctcgaccgggcacggcgagctgggggactgaacgcggtctgagctaggaaaagccgggataccacggcgcgcagggagacggcaaggcggaacgcgcgtcaaggagaaacgcaggctgcgcgcggcaaacggagggcaacgccggtgacctgcgcgacaacagagctggagcgagctgggcagaaaatcgagatccgagcagagggaggggttccgagcagggcgcggctatagctatagagctgggcgagcgcacggcacggcgagctgcaccaggaagagagacacgccagccacagtgagcagaggctaggcgtgcggcagaagaaaaatggaaagcaggtaggggctcggacggccatggctgggttccgagcgagcaagcacagggaaatggagaggagagagggagctgggcgcggtctgctgggaatccgcgacgaaggagctcagccggcagagaaggactagtccggcgagcaggaggccggggcgagctccatggccgggagctgagggcgagcggccgctgagaattggcctggagaaaaaaaat

SEQ ID NO: 54538 - DNA, 1110 bp, Zea Mays
acctgtcaggttgttagtggggattaactttagaagaagggattaacttcctctggcccacacgtcagccaccacgtgcatcgtccggccggtgagggaccaccgcggcagctatcctcggcgccgcgctcacgattccggaatcactccccacgcgattcgatcctctcgccggcccaggcatcgtagaatccccccaccgaaaaaaatcaagcgggcatacaaagagcgcgtgcgcagtgcttggaataggtgggtcgaacttcgaaggggttcgaggacttcagctatggcatctgtgggacgtgcaggacgaggagggaaaggagatggagggaagggagaagggtcgctggctcgcagggcgtggaggcagtacctgctccagctccagcaacatcctctccgcacaaagatgatcacggcggggtgcctcgccggcgtcagtgactccgtggcgcagaagctctctgggttccagaagattgagaaacgcagactcctgctcaagatgctctttggttttgcgtatggtggcccatttggacatttcttgcacaaaattttggattacatcttccaagggaagaaggataccaaaaccatagcaaagaaggtgttgctggagcaagtgacatcttctccctggaataacatattgttcttgttctattatggatatgttgttgagaggaggcctttgaaggaggtgacgaccagggtgaagaaacaatacccttctgtgcaactcagcgcttggatggtattttttttttcctcccttccagcatcgatacttggcttttgagtttctctctgcggacgcttcataaatctgattgaaacgcagttttggccgatagttagttggataaaccaccagtacatgcctttacaattccgagtgatcttccacagctttgtcgcatgttgttgggggattttcctgaaccttcgtgcaagggccatgtctctgaagcaggcctagatggtttagaaggaacgtatagcatcgtagctcctgcccggtgctaactaaagcagccgaagaaggaggacgctggatgcttacatatggactcaaaacatccaagtaccatcattgtgacc

SEQ ID NO: 54539 - DNA, 1525 bp, Zea Mays
acctgtcaggttgttagtggggattaactttagaagaagggattaacttcctctggcccacacgtcagccaccacgtgcatcgtccggccggtgagggaccaccgcggcagctatcctcggcgccgcgctcacgattccggaatcactccccacgcgattcgatcctctcgccggcccaggcatcgtagaatccccccaccgaaaaaaatcaagcgggcatacaaagagcgcgtgcgcagtgcttggaataggtgggtcgaacttcgaaggggttcgaggacttcagctatggcatctgtgggacgtgcaggacgaggagggaaaggagatggagggaagggagaagggtcgctggctcgcagggcgtggaggcagtacctgctccagctccagcaacatcctctccgcacaaagatgatcacggcggggtgcctcgccggcgtcagtgactccgtggcgcagaagctctctgggttccagaagattgagaaacgcagactcctgctcaagatgctctttggttttgcgtatggtggcccatttggacatttcttgcacaaaattttggattacatcttccaagggaagaaggataccaaaaccatagcaaagaaggtgttgctggagcaagtgacatcttctccctggaataacatattgttcttgttctattatggatatgttgttgagaggaggcctttgaaggaggtgacgaccagggtgaagaaacaatacccttctgtgcaactcagcgcttggatgctccattcagacattggaccttgaaggattcagaacttcacactgggcgactggctgcaattcgccgtgcaggaccgcctgcaattcaaactggttgtcacagcagacaccacaagagacctaattaaaccagacaagttcataccaactttcgtgaaaaacattctaacttccttagcagtcaaaatatattatatctgatcaaaattatagaaactacaacagcataattaattatacttatttcatgttataaatgttattatttcatcatatgaatttggttaaaccggagatgctttgacttttagtagagtttgggtaattcataattagagatggatggaccgatggagtatatcgttctgtttgttttttttttttttggtcgttgaaaccgttaacgtggactgaccgtgccgccgtctctgaaccgaagcaagaacaagtcgttgcccagatggctgctggctgctcgtaatgggcaaccgtaggcttgacaattcaattacactacaaatgaacatcggctttcaaggcgttcgtttgcaacgtcgtcgctcgtcagcctgtcttgccaagaacccgcgtgaaaaccggactgtcttgccaagaacccgtctgaaaaccggactgaaccagctccggactgaaccagctgaggctttgttcggctattgatattacatgtgtattggagtgtattgggtgtgattgtcatgtattttgacttattatggatttaaatcgtttcaatcccac

SEQ ID NO: 54540 - DNA, 1130 bp, Zea Mays
acctgtcaggttgttagtggggattaactttagaagaagggattaacttcctctggcccacacgtcagccaccacgtgcatcgtccggccggtgagggaccaccgcggcagctatcctcggcgccgcgctcacgattccggaatcactccccacgcgattcgatcctctcgccggcccaggcatcgtagaatccccccaccgaaaaaaatcaagcgggcatacaaagagcgcgtgcgcagtgcttggaataggtgggtcgaacttcgaaggggttcgaggacttcagctatggcatctgtgggacgtgcaggacgaggagggaaaggagatggagggaagggagaagggtcgctggctcgcagggcgtggaggcagtacctgctccagctccagcaacatcctctccgcacaaagctctttggttttgcgtatggtggcccatttggacatttcttgcacaaaattttggattacatcttccaagggaagaaggataccaaaaccatagcaaagaaggtgttgctggagcaagtgacatcttctccctggaataacatattgttcttgttctattatggatatgttgttgagaggaggcctttgaaggaggtgacgaccagggtgaagaaacaatacccttctgtgcaactcagcgcttggatgttttggccgatagttagttggataaaccaccagtacatgcctttacaattccgagtgatcttccacagctttgtcgcatgttgttgggggattttcctgaaccttcgtgcaagggccatgtctctgaagcaggcctagatggtttagaaggaacgtatagcatcgtagctcctgcccggtgctaactaaagcagccgaagaaggaggacgctggatgctgtatcctgtactgttacaaaaaccgttgtttatttcctggtagtagtcggtttatttgattgtcaacgcatgcgaagacagattatgcttttgtaaaaaaaaaaattgtgatgggagcaaagtatggtgaattcggttagctttgaggaccagttcgtattcgttcattcattgttcagctaaatggtcatgggactgttccagcgtccaccgttcttgctttgctggtaatcaaacctgttgcctg

SEQ ID NO: 54541 - DNA, 953 bp, Zea Mays
  misc_feature (953)..(953): n is a, c, g, or t
aggaagggcaacaaaagggaggggagagagaggggtggggcgccgaggagagagagagaacggtgcgcccgcctgctcctcctcctcccccttccgtcatttataagcgacggcaacacaggcgacgaagccggggagaggggggcgcacgaggcaatttatagcgaggagaagaggagcggccgggcccgagcagagcaggccgggccagccatctctcctctgcggcgtcggcgcccgggatgggggactctggcggctccgttgtgtcggtcgacgtcgagcgcatctccttcggcggcaaggaacaccatatacaaacgaatcatggacctgtatctgttgcagtgtatggtgaccatgacaagcctgcccttgttacttatcccgatattgctttaaaccatatgtcctgcttccaaggactattgttctgtcctgaagccgcttcactgctgcttcataatttttgtatttaccatatcagccccccagggcatgagttaggagctgctccaatttcaccgaatgctcctataccgtctgttgacgatttggcagatcaggttgtggatgtcctcgatttctttggattaggctctgttatgtgctttggtgtcactgcaggtgcctacattctaactctgtttgcgtcaaagtatagggagcgggtactaggtctcatccttgtttcacctctgtgtaaaggccccacttggactgagtggttatacagtaaggtgatatccaatctgctgtattactatggcatgtgtgggttggtgaaggagtgcctacttcagcggtacttcagcaaggaagtgcaaggattctctgaattgcccgagtcagacatagtgcaggcttgtagaagcttgctagatcagcggcagagcatgaatgtgtggcgctttgtacaaacaatgaatcagagatatgacttgactgaacan

SEQ ID NO: 54542 - DNA, 1705 bp, Zea Mays
caactataatttctgttggtgttggcggattcttttcttgccaaatatatgctgttattatgttgcttgttatggtggaggaatgaggaatcatctgtagttcgaatcatgttttgtaatcacttctctttgctgtcctgcaaggccacggctgtggaaccataacttttgcaccacttcatcatgatgaaactattatattctccttctcttttggtagcatcttgtcagccttttagtattgtatacggaaaacagagatccttccatcatgaagtcatcacctttgcgtcatttgggagacatgcttgccttcaagcgtcagtggaggactgctaataagtttgctcccctgaaacaactattggaaacagtcacctaatttctttcttgacatggtttaaaggacaatttctctttgcatggtgtttctgggctgtgtaccacagcttccaccgacagcttagttgtattacgaagtatgaactatggacacagaaagtgcgtgacagcctaactgttaagcgttatatggatttaaatagctttggtttgattgatgcactgctggtcatggtataatctacatccacatcatcaatagactgccatatggtgcatttactagcctcaaacaatagatgatgggcatgtttggttcagcttttttctgaccagcttttctgaaaatctggctgtgaggagaatctggctgtgtagagaatctaggtattattaggattacgtgcggagaaagataaagttgtccatagggcttagaatctagaaagcgatggatttctattattgaaacgactcaaccgattttgtgtttatgttgattttaaatggtttttactcaaacgaattttataaaagctggctgaaaagctgagcgtttggcagcccgcagtagcttctggtggccagaagctgcagaaagccgaaacaaacaggggcgatgtcttctgccagcatcaggggtgcctacaactgtaaacaagaacaccatatacaaacgaatcatggacctgtatctgttgcagtgtatggtgaccatgacaagcctgcccttgttacttatcccgatattgctttaaaccatatgtcctgcttccaaggactattgttctgtcctgaagccgcttcactgctgcttcataatttttgtatttaccatatcagccccccagggcatgagttaggagctgctccaatttcaccgaatgctcctataccgtctgttgacgatttggcagatcaggttgtggatgtcctcgatttctttggattaggctctgttatgtgctttggtgtcactgcaggtgcctacattctaactctgtttgcgtcaaagtatagggagcgggtactaggtctcatccttgtttcacctctgtgtaaaggccccacttggactgagtggttatacagtaaggtgatatccaatctgctgtattactatggcatgtgtgggttggtgaaggagtgcctacttcagcggtacttcagcaaggaagtgcaaggattctctgaattgcccgagtcagacatagtgcaggcttgtagaagcttgctagatcagcggcagagcatgaatgtgtggcgctttgtacaaacaatgaatcagtacgtaaacatctcacacctgtatactaatgatgattgtgcggtggaaaaactcggaggtgaagttaccgcgtac

SEQ ID NO: 54543 - DNA, 1697 bp, Zea Mays
caactataatttctgttggtgttggcggattcttttcttgccaaatatatgctgttattatgttgcttgttatggtggaggaatgaggaatcatctgtagttcgaatcatgttttgtaatcacttctctttgctgtcctgcaaggccacggctgtggaaccataacttttgcaccacttcatcatgatgaaactattatattctccttctcttttggtagcatcttgtcagccttttagtattgtatacggaaaacagagatccttccatcatgaagtcatcacctttgcgtcatttgggagacatgcttgccttcaagcgtcagtggaggactgctaataagtttgctcccctgaaacaactattggaaacagtcacctaatttctttcttgacatggtttaaaggacaatttctctttgcatggtgtttctgggctgtgtaccacagcttccaccgacagcttagttgtattacgaagtatgaactatggacacagaaagtgcgtgacagcctaactgttaagcgttatatggatttaaatagctttggtttgattgatgcactgctggtcatggtataatctacatccacatcatcaatagactgccatatggtgcatttactagcctcaaacaatagatgatgggcatgtttggttcagcttttttctgaccagcttttctgaaaatctggctgtgaggagaatctggctgtgtagagaatctaggtattattaggattacgtgcggagaaagataaagttgtccatagggcttagaatctagaaagcgatggatttctattattgaaacgactcaaccgattttgtgtttatgttgattttaaatggtttttactcaaacgaattttataaaagctggctgaaaagctgagcgtttggcagcccgcagtagcttctggtggccagaagctgcagaaagccgaaacaaacaggggcgatgtcttctgccagcatcaggggtgcctacaactgaacaccatatacaaacgaatcatggacctgtatctgttgcagtgtatggtgaccatgacaagcctgcccttgttacttatcccgatattgctttaaaccatatgtcctgcttccaaggactattgttctgtcctgaagccgcttcactgctgcttcataatttttgtatttaccatatcagccccccagggcatgagttaggagctgctccaatttcaccgaatgctcctataccgtctgttgacgatttggcagatcaggttgtggatgtcctcgatttctttggattaggctctgttatgtgctttggtgtcactgcaggtgcctacattctaactctgtttgcgtcaaagtatagggagcgggtactaggtctcatccttgtttcacctctgtgtaaaggccccacttggactgagtggttatacagtaaggtgatatccaatctgctgtattactatggcatgtgtgggttggtgaaggagtgcctacttcagcggtacttcagcaaggaagtgcaaggattctctgaattgcccgagtcagacatagtgcaggcttgtagaagcttgctagatcagcggcagagcatgaatgtgtggcgctttgtacaaacaatgaatcagtacgtaaacatctcacacctgtatactaatgatgattgtgcggtggaaaaactcggaggtgaagttaccgcgtac

SEQ ID NO: 54544 - DNA, 1816 bp, Zea Mays
caactataatttctgttggtgttggcggattcttttcttgccaaatatatgctgttattatgttgcttgttatggtggaggaatgaggaatcatctgtagttcgaatcatgttttgtaatcacttctctttgctgtcctgcaaggccacggctgtggaaccataacttttgcaccacttcatcatgatgaaactattatattctccttctcttttggtagcatcttgtcagccttttagtattgtatacggaaaacagagatccttccatcatgaagtcatcacctttgcgtcatttgggagacatgcttgccttcaagcgtcagtggaggactgctaataagtttgctcccctgaaacaactattggaaacagtcacctaatttctttcttgacatggtttaaaggacaatttctctttgcatggtgtttctgggctgtgtaccacagcttccaccgacagcttagttgtattacgaagtatgaactatggacacagaaagtgcgtgacagcctaactgttaagcgttatatggatttaaatagctttggtttgattgatgcactgctggtcatggtataatctacatccacatcatcaatagactgccatatggtgcatttactagcctcaaacaatagatgatgggcatgtttggttcagcttttttctgaccagcttttctgaaaatctggctgtgaggagaatctggctgtgtagagaatctaggtattattaggattacgtgcggagaaagataaagttgtccatagggcttagaatctagaaagcgatggatttctattattgaaacgactcaaccgattttgtgtttatgttgattttaaatggtttttactcaaacgaattttataaaagctggctgaaaagctgagcgtttggcagcccgcagtagcttctggtggccagaagctgcagaaagccgaaacaaacaggggcgatgtcttctgccagcatcaggggtgcctacaactgtaaacaagttgtttcttttttttcctcttgcgtaaattacattgtgggaaatttaaaccttcctgctggatgaaattctatttaggaactctcactagctttttctcctttttttcttttgacatgttttacttgtctattcaggaacaccatatacaaacgaatcatggacctgtatctgttgcagtgtatggtgaccatgacaagcctgcccttgttacttatcccgatattgctttaaaccatatgtcctgcttccaaggactattgttctgtcctgaagccgcttcactgctgcttcataatttttgtatttaccatatcagccccccagggcatgagttaggagctgctccaatttcaccgaatgctcctataccgtctgttgacgatttggcagatcagattaggctctgttatgtgctttggtgtcactgcaggtgcctacattctaactctgtttgcgtcaaagtatagggagcgggtactaggtctcatccttgtttcacctctgtgtaaaggccccacttggactgagtggttatacagtaaggtgatatccaatctgctgtattactatggcatgtgtgggttggtgaaggagtgcctacttcagcggtacttcagcaaggaagtgcaaggattctctgaattgcccgagtcagacatagtgcaggcttgtagaagcttgctagatcagcggcagagcatgaatgtgtggcgctttgtacaaacaatgaatcagtacgtaaacatctcacacctgtatactaatgatgattgtgcggtggaaaaactcggaggtgaagttaccgcgtac

SEQ ID NO: 54545 - DNA, 822 bp, Zea Mays
gttagttgagttcctcgatcgctcgtactgtcccgcagtagcttctggtggccagaagctgcagaaagccgaaacaaacaggggcgatgtcttctgccagcatcaggggtgcctacaactgaacaccatatacaaacgaatcatggacctgtatctgttgcagtgtatggtgaccatgacaagcctgcccttgttacttatcccgatattgctttaaaccatatgtcctgcttccaaggactattgttctgtcctgaagccgcttcactgctgcttcataatttttgtatttaccatatcagccccccagggcatgagttaggagctgctccaatttcaccgaatgctcctataccgtctgttgacgatttggcagatcaggttgtggatgtcctcgatttctttggattaggctctgttatgtgctttggtgtcactgcaggtgcctacattctaactctgtttgcgtcaaagtatagggagcgggtactaggtctcatccttgtttcacctctgtgtaaaggccccacttggactgagtggttatacagtaaggtgatatccaatctgctgtattactatggcatgtgtgggttggtgaaggagtgcctacttcagcggtacttcagcaaggaagtgcaaggattctctgaattgcccgagtcagacatagtgcaggcttgtagaagcttgctagatcagcggcagagcatgaatgtgtggcgctttgtacaaacaatgaatcagtacgtaaacatctcacacctgtatactaatgatgattgtgcggtggaaaaactcggaggtgaagttaccgcgtac

SEQ ID NO: 54546 - DNA, 830 bp, Zea Mays
cttgcacttgctcttgctcttgcgcccccgccattcgtgaagctgcattttcgtcggccgctgaagcagcacgacacgagatggcgggctcctcgccgccgcgtctccggcggccttcgtctgcctacgaacaccatatacaaacgaatcatggacctgtatctgttgcagtgtatggtgaccatgacaagcctgcccttgttacttatcccgatattgctttaaaccatatgtcctgcttccaaggactattgttctgtcctgaagccgcttcactgctgcttcataatttttgtatttaccatatcagccccccagggcatgagttaggagctgctccaatttcaccgaatgctcctataccgtctgttgacgatttggcagatcaggttgtggatgtcctcgatttctttggattaggctctgttatgtgctttggtgtcactgcaggtgcctacattctaactctgtttgcgtcaaagtatagggagcgggtactaggtctcatccttgtttcacctctgtgtaaaggccccacttggactgagtggttatacagtaaggtgatatccaatctgctgtattactatggcatgtgtgggttggtgaaggagtgcctacttcagcggtacttcagcaaggaagtgcaaggattctctgaattgcccgagtcagacatagtgcaggcttgtagaagcttgctagatcagcggcagagcatgaatgtgtggcgctttgtacaaacaatgaatcagtacgtaaacatctcacacctgtatactaatgatgattgtgcggtggaaaaactcggaggtgaagttaccgcgtac

SEQ ID NO: 54547 - DNA, 865 bp, Zea Mays
gaggagagagagagaacggtgcgcccgcctgctcctcctcctcccccttccgtcatttataagcgacggcaacacaggcgacgaagccggggagaggggggcgcacgaggcaatttatagcgaggagaagaggagcggccgggcccgagcagagcaggccgggccagccatctctcctctgcggcgtcggcgcccgggatgggggactctggcggctccgttgtgtcggtcgacgtcgagcgcatctccttcggcggcaaggaacaccatatacaaacgaatcatggacctgtatctgttgcagtgtatggtgaccatgacaagcctgcccttgttacttatcccgatattgctttaaaccttaggagctgctccaatttcaccgaatgctcctataccgtctgttgacgatttggcagatcaggttgtggatgtcctcgatttctttggattaggctctgttatgtgctttggtgtcactgcaggtgcctacattctaactctgtttgcgtcaaagtatagggagcgggtactaggtctcatccttgtttcacctctgtgtaaaggccccacttggactgagtggttatacagtaaggtgatatccaatctgctgtattactatggcatgtgtgggttggtgaaggagtgcctacttcagcggtacttcagcaaggaagtgcaaggattctctgaattgcccgagtcagacatagtgcaggcttgtagaagcttgctagatcagcggcagagcatgaatgtgtggcgctttgtacaaacaatgaatcagtacgtaaacatctcacacctgtatactaatgatgattgtgcggtggaaaaactcggaggtgaagttaccgcgtac

SEQ ID NO: 54548 - DNA, 958 bp, Zea Mays
gaggagagagagagaacggtgcgcccgcctgctcctcctcctcccccttccgtcatttataagcgacggcaacacaggcgacgaagccggggagaggggggcgcacgaggcaatttatagcgaggagaagaggagcggccgggcccgagcagagcaggccgggccagccatctctcctctgcggcgtcggcgcccgggatgggggactctggcggctccgttgtgtcggtcgacgtcgagcgcatctccttcggcggcaaggaacaccatatacaaacgaatcatggacctgtatctgttgcagtgtatggtgaccatgacaagcctgcccttgttacttatcccgatattgctttaaaccatatgtcctgcttccaaggactattgttctgtcctgaagccgcttcactgctgcttcataatttttgtatttaccatatcagccccccagggcatgagttaggagctgctccaatttcaccgaatgctcctataccgtctgttgacgatttggcagatcaggttgtggatgtcctcgatttctttggattaggctctgttatgtgctttggtgtcactgcaggtgcctacattctaactctgtttgcgtcaaagtatagggagcgggtactaggtctcatccttgtttcacctctgtgtaaaggccccacttggactgagtggttatacagtgatatccaatctgctgtattactatggcatgtgtgggttggtgaaggagtgcctacttcagcggtacttcagcaaggaagtgcaaggattctctgaattgcccgagtcagacatagtgcaggcttgtagaagcttgctagatcagcggcagagcatgaatgtgtggcgctttgtacaaacaatgaatcagtacgtaaacatctcacacctgtatactaatgatgattgtgcggtggaaaaactcggaggtgaagttaccgcgtac

SEQ ID NO: 54549 - DNA, 1060 bp, Zea Mays
gaggagagagagagaacggtgcgcccgcctgctcctcctcctcccccttccgtcatttataagcgacggcaacacaggcgacgaagccggggagaggggggcgcacgaggcaatttatagcgaggagaagaggagcggccgggcccgagcagagcaggccgggccagccatctctcctctgcggcgtcggcgcccgggatgggggactctggcggctccgttgtgtcggtcgacgtcgagcgcatctccttcggcggcaagcccgcagtagcttctggtggccagaagctgcagaaagccgaaacaaacaggggcgatgtcttctgccagcatcaggggtgcctacaactgtaaacaagaacaccatatacaaacgaatcatggacctgtatctgttgcagtgtatggtgaccatgacaagcctgcccttgttacttatcccgatattgctttaaaccatatgtcctgcttccaaggactattgttctgtcctgaagccgcttcactgctgcttcataatttttgtatttaccatatcagccccccagggcatgagttaggagctgctccaatttcaccgaatgctcctataccgtctgttgacgatttggcagatcaggttgtggatgtcctcgatttctttggattaggctctgttatgtgctttggtgtcactgcaggtgcctacattctaactctgtttgcgtcaaagtatagggagcgggtactaggtctcatccttgtttcacctctgtgtaaaggccccacttggactgagtggttatacagtaaggtgatatccaatctgctgtattactatggcatgtgtgggttggtgaaggagtgcctacttcagcggtacttcagcaaggaagtgcaaggattctctgaattgcccgagtcagacatagtgcaggcttgtagaagcttgctagatcagcggcagagcatgaatgtgtggcgctttgtacaaacaatgaatcagtacgtaaacatctcacacctgtatactaatgatgattgtgcggtggaaaaactcggaggtgaagttaccgcgtac

SEQ ID NO: 54550 - DNA, 1822 bp, Zea Mays
aatcaattcgaatcctattcgttgggctcgctttcttcagttgcattacttggcccacacaaactcttcccaataaattacgacccccagccaagctttggagtgcggttcccaaccatggcggcctcccccacttcctccctcgccccgccggtggtgcctatggagcttcacgccggcaaccgcgaccgcctcgtcgccgcgctccgcggccacatctccgcctccgcgcgcccgctccacggcctcgtcctccttcagggcggggaggagaagacacggtactgcaccgatcacctcgagctcttcaggcaggagagctacttcgcctatctctttggagtgcaggaaccagggttctacggcgcaattgatacatacaaggttgatatggtcttctatgttgatgagattgcaagggttgtgcaagatcatttcgggaaccatggaaagcctcttctgtttctgctacatgggaggaatactgactctggaaatttctcaaagcctgctagttttgaggggatggagaactttgatactgatttaattacacttcatccaattttaaccgaatgtcgtgtgattaaatctgatctggagcttgctctcatccggtatgctaatgatgtcagttctgaagctcacattgaggttatgagacgagcaaggccaggcatgaaggaatatcaattagaaagtatcttccttcaccatgtttatatgtatggaggttgccgacattgctcttatacatgtatatgtgctactggagataatagtgctgttctacattatggacatgcggcagctccaaatgaccggactttgaatgatggagacatggcactaatggatatgggagctgaataccatttctatggatctgatatcacatgctcataccctataaatgggaaattcaacagaagtcagacaataatatacaatgctgtgcttaaggctcataatgctgttatatcagacatgcggcctggagttaattggatggatatgcacaaattagcagaacgggcaatacttgaatctctcaggaaggaacaaattgtacaaggggatgttgatgatatgatggctcaaaggttaggggctgttttcatgcctcatggtcttggccacttacttggtattgacacccatgatccaggaggctaccctgagggattggagaggcccaaggatccaggactgaactccttgcggaccacaagagaactgaaagaaggaatggttatcacagtggagccaggctgctatttcattgatgctttgctaactaaaacaagggatgatccaatttcctcaaagttcttcaactggcaagaggttgaaaagtataaaagctttggtggcgttcgcattgaaagtgatgtgtatgtgacggctcaaggatgccggaacctcacaaactgcccgagagagacctgggagatcgaggctgtaatggctggcgcaccatggcctctgccggcttcaagttctatggtggtagcagcagagaatagcaatgacatatctaaagcgtcgtaattttctctatgctcaatccatatcccgagttgaaacaaattcgacctggattcttatattcaataaatagtgaggctgaggcgcaaaacattgttggattgatggctggaaaacatttcatacgctcacttaatttgtaagctttctgttatgtgtttgagatcgatggggaaacgtttagctattcaaatgtcttgtttttgtggagagtttcaaatgccttagaattaactcatcctggaccggaagaagattggacaaaaagatgttt

SEQ ID NO: 54551 - DNA, 1774 bp, Zea Mays
aatcaattcgaatcctattcgttgggctcgctttcttcagttgcattacttggcccacacaaactcttcccaataaattacgacccccagccaagctttggagtgcggttcccaaccatggcggcctcccccacttcctccctcgccccgccggtggtgcctatggagcttcacgccggcaaccgcgaccgcctcgtcgccgcgctccgcggccacatctccgcctccgcgcgcccgctccacggcctcgtcctccttcagggcggggaggagaagacacggtactgcaccgatcacctcgagctcttcaggcaggagagctacttcgcctatctctttggagtgcaggaaccagggttctacggcgcaattgacatcgcctctggacagtcaattttgttcgctccaagattgccagctgactatgctgtttggatgggtgaaataaaacctttgtcgtacttcagggatacatacaaggttgatatggtcttctatgttgatgagattgcaagggttgtgcaagatcatttcgggaaccatggaaagcctcttctgtttctgctacatgggaggaatactgactctggaaatttctcaaagcctgctagttttgaggggatggagaactttgatactgatttaattacacttcatccaattttaaccgaatgtcgtgtgattaaatctgatctggagcttgctctcatccggtatgctaatgatgtcagttctgaagctcacattgaggttatgagacgagcaaggccaggcatgaaggaatatcaattagaaagtatcttccttcaccatgtttatatgtatggaggttgccgacattgctcttatacatgtatatgtgctactggagataatagtgctgttctacattatggacatgcggcagctccaaatgaccggactttgaatgatggagacatggcactaatggatatgggagctgaataccatttctatggatctgatatcacatgctcataccctataaatgggaaattcaacagaagtcagacaataatatacaatgctgtgcttaaggctcataatgctgttatatcagacatgcggcctggagttaattggatggatatgcacaaattagcagaacgggcaatacttgaatctctcaggaaggaacaaattgtacaaggggatgttgatgatatgatggctcaaaggttaggggctgttttcatgcctcatggtcttggccacttacttggtattgacacccatgatccaggaggctaccctgagggattggagaggcccaaggatccaggactgaactccttgcggaccacaagagaactgaaagaaggaatgtatgtgacggctcaaggatgccggaacctcacaaactgcccgagagagacctgggagatcgaggctgtaatggctggcgcaccatggcctctgccggcttcaagttctatggtggtagcagcagagaatagcaatgacatatctaaagcgtcgtaattttctctatgctcaatccatatcccgagttgaaacaaattcgacctggattcttatattcaataaatagtgaggctgaggcgcaaaacattgttggattgatggctggaaaacatttcatacgctcacttaatttgtaagctttctgttatgtgtttgagatcgatggggaaacgtttagctattcaaatgtcttgtttttgtggagagtttcaaatgccttagaattaactcatcctggaccggaagaagattggacaaaaagatgttt

SEQ ID NO: 54552 - DNA, 1914 bp, Zea Mays
aatcaattcgaatcctattcgttgggctcgctttcttcagttgcattacttggcccacacaaactcttcccaataaattacgacccccagccaagctttggagtgcggttcccaaccatggcggcctcccccacttcctccctcgccccgccggtggtgcctatggagcttcacgccggcaaccgcgaccgcctcgtcgccgcgctccgcggccacatctccgcctccgcgcgcccgctccacggcctcgtcctccttcagggcggggaggagaagacacggtactgcaccgatcacctcgagctcttcaggagagctacttcgcctatctctttggagtgcaggaaccagggttctacggcgcaattgacatcgcctctggacagtcaattttgttcgctccaagattgccagctgactatgctgtttggatgggtgaaataaaacctttgtcgtacttcagggatacatacaaggttgatatggtcttctatgttgatgagattgcaagggttgtgcaagatcatttcgggaaccatggaaagcctcttctgtttctgctacatgggaggaatactgactctggaaatttctcaaagcctgctagttttgaggggatggagaactttgatactgatttaattacacttcatccaattttaaccgaatgtcgtgtgattaaatctgatctggagcttgctctcatccggtatgctaatgatgtcagttctgaagctcacattgaggttatgagacgagcaaggccaggcatgaaggaatatcaattagaaagtatcttccttcaccatgtttatatgtatggaggttgccgacattgctcttatacatgtatatgtgctactggagataatagtgctgttctacattatggacatgcggcagctccaaatgaccggactttgaatgatggagacatggcactaatggatatgggagctgaataccatttctatggatctgatatcacatgctcataccctataaatgggaaattcaacagaagtcagacaataatatacaatgctgtgcttaaggctcataatgctgttatatcagacatgcggcctggagttaattggatggatatgcacaaattagcagaacgggcaatacttgaatctctcaggaaggaacaaattgtacaaggggatgttgatgatatgatggctcaaaggttaggggctgttttcatgcctcatggtcttggccacttacttggtattgacacccatgatccaggaggctaccctgagggattggagaggcccaaggatccaggactgaactccttgcggaccacaagagaactgaaagaaggaatggttatcacagtggagccaggctgctatttcattgatgctttgctaactaaaacaagggatgatccaatttcctcaaagttcttcaactggcaagaggttgaaaagtataaaagctttggtggcgttcgcattgaaagtgatgtgtatgtgacggctcaaggatgccggaacctcacaaactgcccgagagagacctgggagatcgaggctgtaatggctggcgcaccatggcctctgccggcttcaagttctatggtggtagcagcagagaatagcaatgacatatctaaagcgtcgtaattttctctatgctcaatccatatcccgagttgaaacaaattcgacctggattcttatattcaataaatagtgaggctgaggcgcaaaacattgttggattgatggctggaaaacatttcatacgctcacttaatttgtaagctttctgttatgtgtttgagatcgatggggaaacgtttagctattcaaatgtcttgtttttgtggagagtttcaaatgccttagaattaactcatcctggaccggaagaagattggacaaaaagatgttt

SEQ ID NO: 54553 - DNA, 671 bp, Zea Mays
ccgggcagtcttcttcaggcgggtggatctctagcgctccttgagctggagcaggcaggcgtgccggtcttctctaggcatcttctccaggcaggcgtgccggtcttctccaacgcatcttcagcgtctctcgagctggagcaggctctatgctccgatgtactcatccctgctccacaccggctcaactgcatccaggtgggttcgacctttgcttatggtcatggaagaggcgacgatgccaaaactcttgcagagctcggattccaaatcggtgattacttgagcgttgcaatcatgtagacagtgcccgcaccggatgtaattgctgaaatgtcaaaaggtctctggttgcaacagtaaggtgtgattctctgttagcagtagaaactggaaccagaattggtctgtaatactggtagtatcaaatgtcaaaagggctcgggttcctatgaagtcaaacacaggaaagtttgcatcttggagccaaaccaattgggcaaatttttgttcggtacccaattttgtttcgccatttctaaatttagagcattatgcaaaagtgtgaatataggtgcttcacaaacggacacatatctcacgaagtttcatgtcattggactacaactacatggtttgagctacatttcttagttttgtttgttttattc

SEQ ID NO: 54554 - DNA, 632 bp, Zea Mays
ccgggcagtcttcttcaggcgggtggatctctagcgctccttgagctggagcaggcaggcgtgccggtcttctctaggcatcttctccaggcaggcgtgccggtcttctccaacgcatcttcagcgtctctcgagctggagcaggctctatgctccgatgtgggttcgacctttgcttatggtcatggaagaggcgacgatgccaaaactcttgcagagctcggattccaaatcggtgattacttgagcgttgcaatcatgtagacagtgcccgcaccggatgtaattgctgaaatgtcaaaaggtctctggttgcaacagtaaggtgtgattctctgttagcagtagaaactggaaccagaattggtctgtaatactggtagtatcaaatgtcaaaagggctcgggttcctatgaagtcaaacacaggaaagtttgcatcttggagccaaaccaattgggcaaatttttgttcggtacccaattttgtttcgccatttctaaatttagagcattatgcaaaagtgtgaatataggtgcttcacaaacggacacatatctcacgaagtttcatgtcattggactacaactacatggtttgagctacatttcttagttttgtttgttttattc

SEQ ID NO: 54555 - DNA, 2756 bp, Zea Mays
ccctcaaccgcgcattcccctctcccacacccgcctcgttcgcccctaccgcgccatcaacgcgcctcccccgccgcacaccccgtcctccccatgccgaatcgtgatggttatgctccccacccacgcgccacgtgcctcctccttccccgccgctcccacccgagatggttagctcccctccttcttctggtcccttcccctgcctcactgccagccagcgatggagcaaggccaagggattcgccggattcaccgagcgggctctggtggcggccggcgctgccgtcgtgtccgccattcttgtcaacccccttgacgtcgccaaggtacgccggtgaccctgtcgttgcctctttcgcttcctctcaactgccgcccctcaaccctcgacacttgcccacaactgtcgccattgcccgctcgccatggcactaaaataaaccccctctgtggccgccccgtatcctctcgctgcggccgcgggctggggagcacgggccttggcatcgtcatagccgcgggagtcttcggcgccgccgcctcgttgctcctcgcctacttcttctagcagtgcaccgggaagggcaaaggaggccgccgtcgccacaggcgcggcaccagcgagtcgggcggtggggaagacgggagctggtggaccgagaggctgcgggcggcgcacaaccgcctggtcccggtctcgctgttccagaagcccatcgtgaaggtcaagctcgctgacctgatggccgccacccatgacttcagcactagccacatcgtggtcgccgggagctcgcgggcggccggggacagcttaccgagccgtgctacgggacgggtctgcactgacggtcaagcgcctgcactcgtgcccactttcggagaaggcgttcagggcagagatgggtcgtatggggcagctgcggcatcctaacatcgtgccactgctgggcttctgtgttgtcgaggacgagaggctgctggtgtataagcatatggagagtggggctctttcatcggtgatgaagaagccaggggaagcgccgctggattgggcaacgcgacttaggatcgccgtgggggcagcaagggggcttgcgtggctgcaccatgggttccaggttccgcagattcaccagaatttgagctcgagtgcagtgcttctcgacgaggattatgatgctcggatcacgaatgttgggctcacaaggttggtccggatggcgcctggcgagggtggtgataccagtcctttcctgaacggggactttggggagtttggctatgttgctccagagtatgctagcaatccagttggtacgatgaaaggcgatgcgtatgcatttggggtgatattgtttgagcttgttagcgggcaggaggctgctgctgtggttactgacgtgacaggtgaaggattcaaggggacattagtggactgggttaaccagctcaaggcttctagtcgaatcagtgatgctattgataaaccattgcgtggaaagggccatgaggcagagattcaggagttcttgaagatagcttttgcttgcacccagccccgtgtgacggagaggcattcaatgtatcgggttttccacgctctgaagagcatcggagagggctgcgatgtcacggagcagtttgatgagttcccattggcctataacaaggatgattcagacgctatttagctgatgatgctgattgccaattcgattgtggaaatgtttggtcaggcttattgatgatatatatatttagccttgctatggacagaccggaagcataaatgagtgataagagaacaatatcgaggcaccaaatctagcgccggatgccgggtggtcaattacatcgttgcatcgacaggggatgtgataaccataagtaatattgctcgaaaatgtagagctgactcttgaagcctttgactacatgcagctgccattcacgctgaaaggacaaattaggaagctaagcatctagataggagaatttgattggttcgtgtcaatatttaatttcttagctcactctgttcatgcctttgtggttcatggacaactgctgctacgtgctcccttccccgacagcgcattctaacacgacatgatacaccagcaattggaatgttgtcaacatcagcggcaacgacgacaacgccacatcgagaaacaacaactgtgggccagggagcacaatcccgtggtgcggtgacttgcccacgtttgccatgctgccttgatgcatggcacatcaacaagaagagcaccagtttggaaggctaattccgaaggaattgagatgtgcagagggagatgaagaatgtggagaaagacatcagggtagctaccaagcgcaatgacatgttatctgcaaagggtaccatcaggtccgcatgcaccaagcagatgtggagaagccggcttttcgcacccaccatggacattttgaattcctggttatggcttttggattgtgtaatgctccttctaccttctaggccttaatgaatgaggtgctctctaagttccttcgcaaattcgtcttggtcttcttcgacgatattcttgtatacagtatatcctgggaggatcatctagagcaccttgctttagttttagctcaacttcgtcatcatcagttgtatcttaaacattccaagtgtgcctttgctcaagatacaatgggttatcttggccatgttatttcaaccaagggagtggaggctgacccgaacaaagttcaag

SEQ ID NO: 54556 - DNA, 1194 bp, Zea Mays
ccctcaaccgcgcattcccctctcccacacccgcctcgttcgcccctaccgcgccatcaacgcgcctcccccgccgcacaccccgtcctccccatgccgaatcgtgatggttatgctccccacccacgcgccacgtgcctcctccttccccgccgctcccacccgagatggttagctcccctccttcttctggtcccttcccctgcctcactgccagccagcgatggagcaaggccaagggattcgccggattcaccgagcgggctctggtggcggccggcgctgccgtcgtgtccgccattcttgtcaacccccttgacgtcgccaagaagtaatattgctcgaaaatgtagagctgactcttgaagcctttgactacatgcagctgccattcacgctgaaaggacaaattaggaagctaagcatctagataggagaatttgattggttcgtgtcaatatttaatttcttagctcactctgttcatgcctttgtggttcatggacaactgctgctacgtgctcccttccccgacagcgcattctaacacgacatgatacaccagcaattggaatgttgtcaacatcagcggcaacgacgacaacgccacatcgagaaacaacaactgtgggccagggagcacaatcccgtggtgcggtgacttgcccacgtttgccatgctgccttgatgcatggcacatcaacaagaagagcaccagtttggaaggctaattccgaaggaattgagatgtgcagagggagatgaagaatgtggagaaagacatcagggtagctaccaagcgcaatgacatgttatctgcaaagggtaccatcaggtccgcatgcaccaagcagatgtggagaagccggcttttcgcacccaccatggacattttgaattcctggttatggcttttggattgtgtaatgctccttctaccttctaggccttaatgaatgaggtgctctctaagttccttcgcaaattcgtcttggtcttcttcgacgatattcttgtatacagtatatcctgggaggatcatctagagcaccttgctttagttttagctcaacttcgtcatcatcagttgtatcttaaacattccaagtgtgcctttgctcaagatacaatgggttatcttggccatgttatttcaaccaagggagtggaggctgacccgaacaaagttcaag

SEQ ID NO: 54557 - DNA, 1282 bp, Zea Mays
cacccacacaaaccaccatgccaccgcggaatccacccactattttgcactgtttgtttttagttccctttaaaatgccgcggccggcgcggcgcatccggctgcgtaccggcccccttttccacccacccgcccacccctcgtttcctgcaattcgccgccatcgttcgctgaacttgagcgcgtctgccgcctgccaccaccgctctctgcctctctgctgctctgttctttctcccgccggggcagaggagggcggggaggcccgttgagcgagcctcggtcggtatggggatctgcgcctcgtccaagcgcgtgcggcaggaggagcaggactccgacgagaacgtggtgtacgtgatggacgagcagggcggcgggggagaaggcgaggacggccgtggcgcccgcgcggcggcatcccgcaaggtggcctccctcttctcgcagaagggcaagaaggggcccaaccaggacgccgtcatactctgccagaggaggctgagcgtatcaagcgctgcaacggccgcgtgttcgcgctcaaggacgagccgtcggtgctgcgcgtgtggcttcccgacgaggactgcccgggcctcgccatggcgcgctctctgggcgactaccgcctcaagcgccacggcgtggtgtcggagccggaggtgacgcaccgccgcgtcgcgccgggggacctgttcatcatcctggccacggacggcgtgtgggacgtgctcagcaacgaggaggtcgtgtccatcgtctgcgccacgccgcggaagcagcacgcgtccaaggccgtcgccgaggccgcggcgcagcgctggcggaccaggtacccgacgtcccgcgtcgacgactgctccgccgtctgcctcttcctgcgggaccaggactgggccagcagcgtcgccgcggccagggccaaggcggccgctagccgctagtgctagtgctagccggggcggacggcggacgaagctcgctccgacgataagcctgcggacggcgatccataacggcagctaatgtactgggagtgtaattaagtgctgtaacatagtgttaattaagctctgatgtttttgcgaggagagaaaaaagtcgtttaattctcagttttgagttttgactcctgatcggtgaccagctgaccttgcatgttatggtgtcggacgaagcgaatggctggcaggaacgccgtttgtactctgtgtggcatgtaaattgttaccggttgaagaagagttaccagtccaagtgcctttttttgtcgatataaatg

SEQ ID NO: 54558 - DNA, 2413 bp, Zea Mays
cacccacacaaaccaccatgccaccgcggaatccacccactattttgcactgtttgtttttagttccctttaaaatgccgcggccggcgcggcgcatccggctgcgtaccggcccccttttccacccacccgcccacccctcgtttcctgcaattcgccgccatcgttcgctgaacttgagcgcgtctgccgcctgccaccaccgctctctgcctctctgctgctctgttctttctcccgccggggcagaggagggcggggaggcccgttgagcgagcctcggtcggtatggggatctgcgcctcgtccaagcgcgtgcggcaggaggagcaggactccgacgagaacgtggtgtacgtgatggacgagcagggcggcgggggagaaggcgaggacggccgtggcgcccgcgcggcggcatcccgcaaggtggcctccctcttctcgcagaagggcaagaaggggcccaaccaggacgccgtcatactctgccaggtccgcgctcgcaccaccacccctcctgctgctgccttgcccgaggaattctctcgatgtctcagctttttcttcttcttcttctctcctatatctgtttgtttatttattttgctacacagcgctggtagatgtagatctgtactgatacagattttgtttggtactccaccgactgtactgcactgctccgtatagtctcttgcagaggaaaaccactagttttttttcctcctgggtactctgtccttgcaagggactttgacgtggtgggaggtcatgaaattccaggaactgtcctctgtattctgcaattattatcaggacatacgtacacagctgccaccccaccacaaccaattcaccatacagcgggggggaaatcgtgatggttcactttccaaaccacggaaacgagtttcgtcgtcctacggatttcctcgcggttttggtttgctacgacagcggaacagatcagaattatcattagttccctgttcttgccccctttattttcagaccctttttttaaaattcccccaagaaccaaccagtctcatctgccgtttgggctcaattgtcaacgatggccactgatgctatcatttgatattcatcacaagctgtcggcttgttgctcgagtccatgcaatctgaatgcgtgtaatcaagctattcggttcggaccacgattctgacgcccaccgtgcgctccacgtctccagggattcggcatggaggacggcgtgttctgcggcgtgttcgacgggcacggccggtgcgggcagttcatcagcaagctggtgagggactacctcccgttcatgatcctgagccaccggaacgcgctcctcatgggctccgacgacgacgacgatgatccggcgcagctgctggaggagtggcgggaggcctgcgccaacgcgttcgaggccatggacaaggagctcaagctccaggccaacgtggactgcaacttcagcggcaccaccgccgtgtgcgccatcaagcaggggaaggacctcatcgtcgccaacctcggcgactccagggccgtgctggcgaccatgtcggacacgggctacctcaaggccgtgcagctcaccaccgaccagaagcccaacgtgccccaggaggctgagcgtatcaagcgctgcaacggccgcgtgttcgcgctcaaggacgagccgtcggtgctgcgcgtgtggcttcccgacgaggactgcccgggcctcgccatggcgcgctctctgggcgactaccgcctcaagcgccacggcgtggtgtcggagccggaggtgacgcaccgccgcgtcgcgccgggggacctgttcatcatcctggccacggacggcgtgtgggacgtgctcagcaacgaggaggtcgtgtccatcgtctgcgccacgccgcggaagcagcacgcgtccaaggccgtcgccgaggccgcggcgcagcgctggcggaccaggtacccgacgtcccgcgtcgacgactgctccgccgtctgcctcttcctgcgggaccaggactgggccagcagcgtcgccgcggccagggccaaggcggccgctagccgctagtgctagtgctagccggggcggacggcggacgaagctcgctccgacgataagcctgcggacggcgatccataacggcagctaatgtactgggagtgtaattaagtgctgtaacatagtgttaattaagctctgatgtttttgcgaggagagaaaaaagtcgtttaattctcagttttgagttttgactcctgatcggtgaccagctgaccttgcatgttatggtgtcggacgaagcgaatggctggcaggaacgccgtttgtactctgtgtggcatgtaaattgttaccggttgaagaagagttaccagtccaagtgcctttttttgtcgatataaatg

SEQ ID NO: 54559 - DNA, 1556 bp, Zea Mays
cacccacacaaaccaccatgccaccgcggaatccacccactattttgcactgtttgtttttagttccctttaaaatgccgcggccggcgcggcgcatccggctgcgtaccggcccccttttccacccacccgcccacccctcgtttcctgcaattcgccgccatcgttcgctgaacttgagcgcgtctgccgcctgccaccaccgctctctgcctctctgctgctctgttctttctcccgccggggcagaggagggcggggaggcccgttgagcgagcctcggtcggtatggggatctgcgcctcgtccaagcgcgtgcggcaggaggagcaggactccgacgagaacgtggtgtacgtgatggacgagcagggcggcgggggagaaggcgaggacggccgtggcgcccgcgcggcggcatcccgcaaggtggcctccctcttctcgcagaagggcaagaaggggcccaaccaggacgccgtcatactctgccagggattcggcatggaggacggcgtgttctgcggcgtgttcgacgggcacggccggtgcgggcagttcatcagcaagctggtgagggactacctcccgttcatgatcctgagccaccggaacgcgctcctcatgggctccgacgacgacgacgatgatccggcgcagctgctggaggagtggcgggaggcctgcgccaacgcgttcgaggccatggacaaggagctcaagctccaggccaacgtggactgcaacttcagcggcaccaccgccgtgtgcgccatcaagcaggggaaggacctcatcgtcgccaacctcggcgactccagggccgtgctggcgaccatgtcggacacgggctacctcaaggccgtgcagctcaccaccgaccagaagcccaacgtgccccaggaggctgagcgtatcaagcgctgcaacggccgcgtgttcgcgctcaaggacgagccgtcggtgctgcgcgtgtggcttcccgacgaggactgcccgggcctcgccatggcgcgctctctgggcgactaccgcctcaagcgccacggcgtggtgtcggagccggaggtgacgcaccgccgcgtcgcgccgggggacctgttcatcatcctggccacggacggcgtgtgggacgtgctcagcaacgaggaggtcgtgtccatcgtctgcgccacgccgcggaagcagcacgcgtccaaggcggccgctagccgctagtgctagtgctagccggggcggacggcggacgaagctcgctccgacgataagcctgcggacggcgatccataacggcagctaatgtactgggagtgtaattaagtgctgtaacatagtgttaattaagctctgatgtttttgcgaggagagaaaaaagtcgtttaattctcagttttgagttttgactcctgatcggtgaccagctgaccttgcatgttatggtgtcggacgaagcgaatggctggcaggaacgccgtttgtactctgtgtggcatgtaaattgttaccggttgaagaagagttaccagtccaagtgcctttttttgtcgatataaatg

SEQ ID NO: 54560 - DNA, 922 bp, Zea Mays
atgagcgactcccaagcccaaatcaccgtccgccgccgtgagtgtgctcttagcggcgtcggtcagaccatccgcctctctccttccagcatcaagggattaagtggttgtaatgacattggggtagatcgtgctaattttgatttgattttttctactttttcagtacttgatgatgaggccgtcatgaggaaacaactccacgaggcgagagaacagctgtttggaggaaggaacttagaatttgctaatcctgaagaaagcttattgtttttttcgactgaaccaacaattatatttggtgctgatgtcactcaccctgctgctctagatgatacttcctcgttgttgcctcccaagactggccctaggtggctaactataatggcattatccgtgcacaaggtcaccgtcaagagctcatcgatgggctggaaaacattgtcaaggaactcctacttgcattcgtggaacggtctaagcagagacccaagcagctgatcttctacagggatggcgtaagtgagggccaattcaaacaagtgctggagcaagaaatccatgagatagagaaggcatggacagctctttacaatgagaagccaaagatcaccttcgtagtggtgcagaagaggcaccacacaaggctcttccccagcaaaccaaaggatcgccaatacgcggacaagagtgggaatattcgagctggcaccgtagttgataataatatctgccacccaacagaatttgatttcttcctgtgcggccatgctggggccaagggaacaagccgtcctacgcattaccatgtgctacgagatgacaacaagttcaccgcagatgctctgtagtctctaacatataacttgtgctacatgtaagcatgcccttcccttccttatgttactacggtaggtgtcca

SEQ ID NO: 54561 - DNA, 1285 bp, Zea Mays
agtggactaatgaactatgacctctcacctgtcaaaagaaaggacgggcaaagagccggagccgcgaccgacgactcatcagacatggcgaagccggcggcggcgaggaagccctctgcggcgtcgaccgtcgcactgacactggttctggccctggcttcggctgtcctcctcttcctcctgctccgcttctctccctcctccccgtcccccaacccgcacccgcaccgccgcctccgcctccgcccccgcgcgcatgcgcaccaccaccagatcccattcgaccctgtcgtcgcggacatagagcgccgcctcgaagaccgcgagtgggagcgcctcgccgctgcagggctgcacgctccgggcatggaggcggcgccagtcccagaggatctcaccgacggtgaggtcgacgccgacgaggactacatcaatgacgctgcgcgcttcaacgtcacgcttcgcgtggaggcgctgttcccaaagatcgacgtcgaccctgccgatggcgccgtcacgggcgctgagctggccgcgtggaacctcgcaaatgcgcggcgggaggtgctacaccgcaccgcccgggagctcgagctgcacgaccgcgatcacgacggccgggtcgcctacggcgaatacgagcggcccagctgggcctggcgtttcgacgatcataactcaaccgatgacggagtgggatggtggaaggaggagcattttagtgctgcagatatggatggtgatggctttctaaatcttactgagtttaatgactttttacatccagctgatactaccaacccaaagctaatacattggttgtgcaaagaagaagtcagggaaagagataaagacaatgatgggaagctcaatttccaagagttcttcaacggattattttactcaattcgacactatgatgatgaaggcttaacagatgacaccggtggctctgatgcaccagctaaaaagtcattttcacaccttgatctggataatgatgggctcttatcagcagatgagctaaagcctgtaattggtaatctccatccatcagaatacttctatgccaagcaacaagccgactatgtaatatctcaggctgacacgaacaaagatggacaattgagcatgaatgagatgatcgagaacccctatgtcttttacaatgctttattcacagaagatgattatggctttcatgacgagctccgttagttcccaattcaattgctttgtctacgggcaaccaattttgcaatgaaccatccctgtcatgtatgat

SEQ ID NO: 54562 - DNA, 927 bp, Zea Mays
ctcgtaatctaccaacgacagctgctttttacatccagctgatactaccaacccaaagctaatacattggttgtgcaaagaagaagtcagggaaagagataaagacaatgatgggaagctcaatttccaagagttcttcaacggattattttactcaattcgacactatgatgatgaaggcttaacagatgacaccggtggctctgatgcaccagctaaaaagtcattttcacaccttgatctggataatgatgggctcttatcagcagatgagctaaagcctgtaattggtaatctccatccatcagaatacttctatgccaagcaacaagccgactatgtaatatctcaggctgacacgaacaaagatggacaattgagcatgaatgagatgatcgagaacccctatgtcttttacaatgctttattcacagaagatgattatggctttcatgacgagctccgttagttcccaattcaacagcacaaagctttatggaatcaccactgtaggaagtcggaagactttgttatgcactgctaagaccatttccgttttctgtctgaaatcatccatcatttgacggtgattccatgtaaaacaagcatgtttttagatgcacctattctagaagctgtgttcttttgtactacccttgagccttttttatagtttgttgtttttttaatcatatatgtacggtgaggatgtgagtgagttttgttctttcaacttcttgaatcttgatacgatacaaaactagcgtcttccagaatcacaatttgtaaaccatacaaacccaggaaagcattactgtaagccatgaattgacgttatctgtaatgattgtgcaaatcatgaaatctgccaaattcatgctttagtccctatacaaattcttctaatgaagttatctacaacacgtc

SEQ ID NO: 54563 - DNA, 1716 bp, Zea Mays
agtggactaatgaactatgacctctcacctgtcaaaagaaaggacgggcaaagagccggagccgcgaccgacgactcatcagacatggcgaagccggcggcggcgaggaagccctctgcggcgtcgaccgtcgcactgacactggttctggccctggcttcggctgtcctcctcttcctcctgctccgcttctctccctcctccccgtcccccaacccgcacccgcaccgccgcctccgcctccgcccccgcgcgcatgcgcaccaccaccagatcccattcgaccctgtcgtcgcggacatagagcgccgcctcgaagaccgcgagtgggagcgcctcgccgctgcagggctgcacgctccgggcatggaggcggcgccagtcccagaggatctcaccgacggtgaggtcgacgccgacgaggactacatcaatgacgctgcgcgcttcaacgtcacgcttcgcgtggaggcgctgttcccaaagatcgacgtcgaccctgccgatggcgccgtcacgggcgctgagctggccgcgtggaacctcgcaaatgcgcggcgggaggtgctacaccgcaccgcccgggagctcgagctgcacgaccgcgatcacgacggccgggtcgcctacggcgaatacgagcggcccagctgggcctggcgtttcgacgatttgaagttcattggatactcgtaatctaccaacgacagctgatcataactcaaccgatgacggagtgggatggtggaaggaggagcattttagtgctgcagatatggatggtgatggctttctaaatcttactgagtttaatgactttttacatccagctgatactaccaacccaaagctaatacattggttgtgcaaagaagaagtcagggaaagagataaagacaatgatgggaagctcaatttccaagagttcttcaacggattattttactcaattcgacactatgatgatgaaggcttaacagatgacaccggtggctctgatgcaccagctaaaaagtcattttcacaccttgatctggataatgatgggctcttatcagcagatgagctaaagcctgtaattggtaatctccatccatcagaatacttctatgccaagcaacaagccgactatgtaatatctcaggctgacacgaacaaagatggacaattgagcatgaatgagatgatcgagaacccctatgtcttttacaatgctttattcacagaagatgattatggctttcatgacgagctccgttagttcccaattcaacacaaagctttatggaatcaccactgtaggaagtcggaagactttgttatgcactgctaagaccatttccgttttctgtctgaaatcatccatcatttgacggtgattccatgtaaaacaagcatgtttttagatgcacctattctagaagctgtgttcttttgtactacccttgagccttttttatagtttgttgtttttttaatcatatatgtacggtgaggatgtgagtgagttttgttctttcaacttcttgaatcttgatacgatacaaaactagcgtcttccagaatcacaatttgtaaaccatacaaacccaggaaagcattactgtaagccatgaattgacgttatctgtaatgattgtgcaaatcatgaaatctgccaaattcatgctttagtccctatacaaattcttctaatgaagttatctacaacacgtc

SEQ ID NO: 54564 - DNA, 1695 bp, Zea Mays
agtggactaatgaactatgacctctcacctgtcaaaagaaaggacgggcaaagagccggagccgcgaccgacgactcatcagacatggcgaagccggcggcggcgaggaagccctctgcggcgtcgaccgtcgcactgacactggttctggccctggcttcggctgtcctcctcttcctcctgctccgcttctctccctcctccccgtcccccaacccgcacccgcaccgccgcctccgcctccgcccccgcgcgcatgcgcaccaccaccagatcccattcgaccctgtcgtcgcggacatagagcgccgcctcgaagaccgcgagtgggagcgcctcgccgctgcagggctgcacgctccgggcatggaggcggcgccagtcccagaggatctcaccgacggtgaggtcgacgccgacgaggactacatcaatgacgctgcgcgcttcaacgtcacgcttcgcgtggaggcgctgttcccaaagatcgacgtcgaccctgccgatggcgccgtcacgggcgctgagctggccgcgtggaacctcgcaaatgcgcggcgggaggtgctacaccgcaccgcccgggagctcgagctgcacgaccgcgatcacgacggccgggtcgcctacggcgaatacgagcggcccagctgggcctggcgtttcgacgatcataactcaaccgatgacggagtgggatggtggaaggaggagcattttagtgctgcagatatggatggtgatggctttctaaatcttactgagtttaatgactttttacatccagctgatactaccaacccaaagctaatacattggttgtgcaaagaagaagtcagggaaagagataaagacaatgatgggaagctcaatttccaagagttcttcaacggattattttactcaattcgacactatgatgatgaaggcttaacagatgacaccggtggctctgatgcaccagctaaaaatttaaggaaggccttctctgactgacatgggaggcttttctccattttgaaggctcttatcagcagatgagctaaagcctgtaattggtaatctccatccatcagaatacttctatgccaagcaacaagccgactatgtaatatctcaggctgacacgaacaaagatggacaattgagcatgaatgagatgatcgagaacccctatgtcttttacaatgctttattcacagaagatgattatggctttcatgacgagctccgttagttcccaattcaacagcacaaagctttatggaatcaccactgtaggaagtcggaagactttgttatgcactgctaagaccatttccgttttctgtctgaaatcatccatcatttgacggtgattccatgtaaaacaagcatgtttttagatgcacctattctagaagctgtgttcttttgtactacccttgagccttttttatagtttgttgtttttttaatcatatatgtacggtgaggatgtgagtgagttttgttctttcaacttcttgaatcttgatacgatacaaaactagcgtcttccagaatcacaatttgtaaaccatacaaacccaggaaagcattactgtaagccatgaattgacgttatctgtaatgattgtgcaaatcatgaaatctgccaaattcatgctttagtccctatacaaattcttctaatgaagttatctacaacacgtc

SEQ ID NO: 54565 - DNA, 3248 bp, Zea Mays
gtcaacagtgagcaactcatttcggccgtcgtcctcgagacgacagcgaccctagctagctagatctccgccgccggtgccgggtggcacgcgcctcctcgtcgtcgtcggatccagcccaaccgcgcggcgccgaattcgtcgtcgtcgtcgtccctagctcacgctgcttcttgctctcgcgaggagtggagacgggacgggagactagagagcaagcgaagttggacgtaggcgcacccgctttgctgcgtgagggcatgcatctggtttcggagatgactgacgcacgtgtttcatcacaagttgtggaagataggggcactgaaaagactatgccagaagaacaactatctgttactttatctgatggaaaggggtgctttgcttgcaatgagagatcacacaacttggagcagtgcaagacaaagtacaaacttgttcctgcagcacatcaatttggctatgctacaaaattcccatttaccgttattcagccttccaatgagatggttgaaaagaagaaatttttccaacactgccttctcatcgaatccaatcttgcaaacttggacgagagtatgctgaaagatgaactcaagaagctttggaaccttcctggcgattgggagttaaggagagaatgcagtacgactttcctggcctccttcagctcggaggatgacctaacaagttgtttaaagaaccctgagatccaaacattactggataacaaggaggtgaaattgactgtaacgaggtggaatgaaagcgacgatggaagccctggcttggttgaagagtggcttttagtgtctggggtcccaagaatgtatagaaactggaaggagctatatgaggttgcttctgcacttggtgtgctgatcgacgtcgatgaggaaagtttgcaagtcggagataaggagcctattaggctgaagctgaagacagcattcaggagttttgatgctgctcccttttcttactactttgcatttggatgttggtcgtcaagactagtaatggtcacagcagtacaagacaaaacacaaggtatggaacataaaattaaggagttagactgcaaggagcataaaaaggaactgaatgtggcaaaaagtataatgctggaagagccgaatagcactgaagaatcaagatcaaatggaaaggccaaagtaaacaaaataagtgctccagcagccacaataacagactctgaggtaatagcagcaatagaaagttcaaaacctgaaggggtgcaatccatagcccaaagtccacgaagcatgactggagaagagaacttcagaggtatacaaaaaccgcctatcaaacatgtattcaaaagaagaggtaagaaacagccagttactactgaagcaataaacaagagcccgtcaaataaaatggataaagaagtggctccacatagccagagtaatgccacaagaactggagcttcaactgggtgtgatatgctggatcaaaaggaatgctcaaaaatggaacccaagagggaactgaatatggaaggaataaccccagcaggggaaagtaaaaaggccgaaaagattggagcatgcagaaattctgaatacagtaaggtagcgtcctctacaatcaagtcaaagaagacacaaatattaggagacacatcaagagctccgagagatgagttgatcactaaatatcccaaaggtgacgggatggatcaaatgggatcaagcgcccaaggtgacgaaaaagaagatgcatccataatagacacagggctacttccaaattccgaggaagttggtgtctatgacagtttcagtgagatgggtcttcaggagaatctactcaagggaatatatcaatatggtctggagaagccttccgcggtccaccaaagaggaatcgtcccactatgcaagggctttgatgtgctccatcgatctctgtctggaacaactgagacgatctgctccggcgtacttcagcgagttgactacggatctgcagaatgccaggctttgatccttgtaccgacacccgacttggcacaagagactctgaaagttcttgaggcacttggtgagttccttggtgttacagctcaaacttgcacaggaggaactagtgcccatgcagaccagcaagccctgctaagtggagctcaggttctagttggcacccctgattgcattcttgacatgttgcaaaagcatgcagtatgcccagaccatgttagaatgcttttcttggatgaagcagatgaactactcacaggaggttccaaggatcagatctataagatcatcgtgcatctcccagacaagattcaggttgggctcttctccgctacctactccaccgaagctatagagagcagccgcagactcatggataagcccgtggcggtcattgtcccgagagacgaagagctaaagaacgtcaagcagtactatctggcagtcgaaaacgaaggactgaagctacgaaaactgttggctcttttcaagaccacagggacggagcagctcgtcatcttcgcgaacacgcgggacaaggtgctgtccctcgcagaagacgtcggcaagcgttacgccgtctcggcaagccatgacggcatggaccagcgcgccagggacgcggccgtccagaagttcaggtctgggtcgtccagcatcctcatcgccactgaccacggaggcaccaccaacgcgatgccgcaggttcccatcatcatcaactatgatcttccgacagagtccatgcggtacgtccgtcgtctccagcagcagaacaggcagttcaggaggtcggtcagtgtggccatcagtttcgtgactcctgctgaccgacgcaccctctccgccatcacgagcttttgcaagtgctacatgggggagctgcccaccgacttgaaatgaccgtacctctttggtgagctatggaatgcagaagtagaactggtcagcatgcatgcatgcacaggttcttctggctgcaaggaagcggcatgcatgttcgtttcctcttgagatactttgcgcttgttgaaatttgaatactcatggaaggtttaacttcctatcactcagaaccttgagttccccagtatcttatctttgatgtaatattgttatttactggatgtggtcgtttgacagttgaatgttatatgatgacttatcttgtttttcaactttttcatgtgaattgtagtaggggttgtttggttctcatgattaaagtttagt

SEQ ID NO: 54566 - DNA, 3161 bp, Zea Mays
agtcaacagtgagcaactcatttcggccgtcgtcctcgagacgacagcgaccctagctagctagatctccgccgccggtgccgggtggcacgcgcctcctcgtcgtcgtcggatccagcccaaccgcgcggcgccgaattcgtcgtcgtcgtcgtccctagctcacgctgcttcttgctctcgcgaggagtggagacgggacgggagactagagagcaagcgaagttggacgtaggcgcacccgctttgctgcttcttacctgagctttgaagaagtagcataacataacatggcaggacagcgtgagggcatgcatctggtttcggagatgactgacgcacgtgtttcatcacaagttgtggaagataggggcactgaaaagactatgccagaagaacaactatctgttactttatctgatggaaaggggtgctttgcttgcaatgagagatcacacaacttggagcagtgcaagacaaagtacaaacttgttcctgcagcacatcaatttggctatgctacaaaattcccatttaccgttattcagccttccaatgagatggttgaaaagaagaaatttttccaacactgccttctcatcgaatccaatcttgcaaacttggacgagagtatgctgaaagatgaactcaagaagctttggaaccttcctggcgattgggagttaaggagagaatgcagtacgactttcctggcctccttcagctcggaggatgacctaacaagttgtttaaagaaccctgagatccaaacattactggataacaaggaggtgaaattgactgtaacgaggtggaatgaaagcgacgatggaagccctggcttggttgaagagtggcttttagtgtctggggtcccaagaatgtatagaaactggaaggagctatatgaggttgcttctgcacttggtgtgctgatcgacgtcgatgaggaaagtttgcaagtcggagataaggagcctattaggctgaagctgaagacagcattcaggagttttgatgctgctcccttttcttactactttgcatttggatgttggtcgtcaagactagtaatggtcacagcagtacaagacaaaacacaaggtatggaacataaaattaaggagttagactgcaaggagcataaaaaggaactgaatgtggcaaaaagtataatgctggaagagccgaatagcactgaagaatcaagatcaaatggaaaggccaaagtaaacaaaataagtgctccagcagccacaataacagactctgaggtaatagcagcaatagaaagttcaaaacctgaaggggtgcaatccatagcccaaagtccacgaagcatgactggagaagagaacttcagaggtatacaaaaaccgcctatcaaacatgtattcaaaagaagaggtaagaaacagccagttactactgaagcaataaacaagagcccgtcaaataaaatggataaagaagtggctccacatagccagagtaatgccacaagaactggagcttcaactgggtgtgatatgctggatcaaaaggaatgctcaaaaatggaacccaagagggaactgaatatggaaggaataaccccagcaggggaaagtaaaaaggccgaaaagattggagcatgcagaaattctgaatacagtaaggtagcgtcctctacaatcaagtcaaagaagacacaaatattaggagacacatcaagagctccgagagatgagttgatcactaaatatcccaaaggtgacgggatggatcaaatgggatcaagcgcccaaggtgacgaaaaagaagatgcatccataatagacacagggctacttccaaattccgaggaagttggtgtctatgacagtttcagtgagatgggtcttcaggagaatctactcaagggaatatatcaatatggtctggagaagccttccgcggtccaccaaagaggaatcgtcccactatgcaagggctttgatgtgctccatcgatctctgtctggaacaactgagacgatctgctccggcgtacttcagcgagttgactacggatctgcagaatgccaggctttgatccttgtaccgacacccgacttggcacaagagactctgaaagttcttgaggcacttgtatgcccagaccatgttagaatgcttttcttggatgaagcagatgaactactcacaggaggttccaaggatcagatctataagatcatcgtgcatctcccagacaagattcaggttgggctcttctccgctacctactccaccgaagctatagagagcagccgcagactcatggataagcccgtggcggtcattgtcccgagagacgaagagctaaagaacgtcaagcagtactatctggcagtcgaaaacgaaggactgaagctacgaaaactgttggctcttttcaagaccacagggacggagcagctcgtcatcttcgcgaacacgcgggacaaggtgctgtccctcgcagaagacgtcggcaagcgttacgccgtctcggcaagccatgacggcatggaccagcgcgccagggacgcggccgtccagaagttcaggtctgggtcgtccagcatcctcatcgccactgaccacggaggcaccaccaacgcgatgccgcaggttcccatcatcatcaactatgatcttccgacagagtccatgcggtacgtccgtcgtctccagcagcagaacaggcagttcaggaggtcggtcagtgtggccatcagtttcgtgactcctgctgaccgacgcaccctctccgccatcacgagcttttgcaagtgctacatgggggagctgcccaccgacttgaaatgaccgtacctctttggtgagctatggaatgcagaagtagaactggtcagcatgcatgcatgcacaggttcttctggctgcaaggaagcggcatgcatgttcgtttcctcttgagatactttgcgcttgttgaaatttgaatactcatggaaggtttaacttcctatcactcagaaccttgagttccccagtatcttatctttgatgtaatattgttatttactggatgtggtcgtttgacagttgaatgttatatgatgacttatcttgtttttcaactttttcatgtgaattgtagtaggggttgtttggttctcatgattaaagtttagt

SEQ ID NO: 54567 - DNA, 3376 bp, Zea Mays
cgtcgaggcagtcaacagtgagcaactcatttcggccgtcgtcctcgagacgacagcgaccctagctagctagatctccgccgccggtgccgggtggcacgcgcctcctcgtcgtcgtcggatccagcccaaccgcgcggcgccgaattcgtcgtcgtcgtcgtccctagctcacgctgcttcttgctctcgcgaggagtggagacgggacgggagactagagagcaagcgaagttggacgtaggcgcacccgctttgctgctatacttagcaaagaagtaccaaatttatagttcaagtacacattgcgtgtggttagagccaagaagcttcttacctgagctttgaagaagtagcataacataacatggcaggacagcgtgagggcatgcatctggtttcggagatgactgacgcacgtgtttcatcacaagttgtggaagataggggcactgaaaagactatgccagaagaacaactatctgttactttatctgatggaaaggggtgctttgcttgcaatgagagatcacacaacttggagcagtgcaagacaaagtacaaacttgttcctgcagcacatcaatttggctatgctacaaaattcccatttaccgttattcagccttccaatgagatggttgaaaagaagaaatttttccaacactgccttctcatcgaatccaatcttgcaaacttggacgagagtatgctgaaagatgaactcaagaagctttggaaccttcctggcgattgggagttaaggagagaatgcagtacgactttcctggcctccttcagctcggaggatgacctaacaagttgtttaaagaaccctgagatccaaacattactggataacaaggaggtgaaattgactgtaacgaggtggaatgaaagcgacgatggaagccctggcttggttgaagagtggcttttagtgtctggggtcccaagaatgtatagaaactggaaggagctatatgaggttgcttctgcacttggtgtgctgatcgacgtcgatgaggaaagtttgcaagtcggagataaggagcctattaggctgaagctgaagacagcattcaggagttttgatgctgctcccttttcttactactttgcatttggatgttggtcgtcaagactagtaatggtcacagcagtacaagacaaaacacaaggtatggaacataaaattaaggagttagactgcaaggagcataaaaaggaactgaatgtggcaaaaagtataatgctggaagagccgaatagcactgaagaatcaagatcaaatggaaaggccaaagtaaacaaaataagtgctccagcagccacaataacagactctgaggtaatagcagcaatagaaagttcaaaacctgaaggggtgcaatccatagcccaaagtccacgaagcatgactggagaagagaacttcagaggtatacaaaaaccgcctatcaaacatgtattcaaaagaagaggtaagaaacagccagttactactgaagcaataaacaagagcccgtcaaataaaatggataaagaagtggctccacatagccagagtaatgccacaagaactggagcttcaactgggtgtgatatgctggatcaaaaggaatgctcaaaaatggaacccaagagggaactgaatatggaaggaataaccccagcaggggaaagtaaaaaggccgaaaagattggagcatgcagaaattctgaatacagtaaggtagcgtcctctacaatcaagtcaaagaagacacaaatattaggagacacatcaagagctccgagagatgagttgatcactaaatatcccaaaggtgacgggatggatcaaatgggatcaagcgcccaaggtgacgaaaaagaagatgcatccataatagacacagggctacttccaaattccgaggaagttggtgtctatgacagtttcagtgagatgggtcttcaggagaatctactcaagggaatatatcaatatggtctggagaagccttccgcggtccaccaaagaggaatcgtcccactatgcaagggctttgatgtgctccatcgatctctgtctggaacaactgagacgatctgctccggcgtacttcagcgagttgactacggatctgcagaatgccaggctttgatccttgtaccgacacccgacttggcacaagagactctgaaagttcttgaggcacttggtgagttccttggtgttacagctcaaacttgcacaggaggaactagtgcccatgcagaccagcaagccctgctaagtggagctcaggttctagttggcacccctgattgcattcttgacatgttgcaaaagcatgcagtatgcccagaccatgttagaatgcttttcttggatgaagcagatgaactactcacaggaggttccaaggatcagatctataagatcatcgtgcatctcccagacaagattcaggttgggctcttctccgctacctactccaccgaagctatagagagcagccgcagactcatggataagcccgtggcggtcattgtcccgagagacgaagagctaaagaacgtcaagcagtactatctggcagtcgaaaacgaaggactgaagctacgaaaactgttggctcttttcaagaccacagggacggagcagctcgtcatcttcgcgaacacgcgggacaaggtgctgtccctcgcagaagacgtcggcaagcgttacgccgtctcggcaagccatgacggcatggaccagcgcgccagggacgcggccgtccagaagttcaggtctgggtcgtccagcatcctcatcgccactgaccacggaggcaccaccaacgcgatgccgcaggttcccatcatcatcaactatgatcttccgacagagtccatgcggtacgtccgtcgtctccagcagcagaacaggcagttcaggaggtcggtcagtgtggccatcagtttcgtgactcctgctgaccgacgcaccctctccgccatcacgagcttttgcaagtgctacatgggggagctgcccaccgacttgaaatgaccgtacctctttggtgagctatggaatgcagaagtagaactggtcagcatgcatgcatgcacaggttcttctggctgcaaggaagcggcatgcatgttcgtttcctcttgagatactttgcgcttgttgaaatttgaatactcatggaaggtttaacttcctatcactcagaaccttgagttccccagtatcttatctttgatgtaatattgttatttactggatgtggtcgtttgacagttgaatgttatatgatgacttatcttgtttttcaactttttcatgtgaattgtagtaggggttgtttggttctcatgattaaagtttagt

SEQ ID NO: 54568 - DNA, 249 bp, Zea Mays
tcaccgtttatatatgtcttacctggttgggagggttctgcacatgacgggcgtgtgctttgagatgccatcttgaggccggatggattacgtgtccctcaaggttgctattatcttgttgatgctggttacacaaatgcaaatggtttcttagcaccatatcgaggacagaggtatcatctaggaggtttcactactcaaaacccaccacatagtgctgaggagtacttcaacttgtgccatgctaga

SEQ ID NO: 54569 - DNA, 2167 bp, Zea Mays
cccacacgtcatcctcccctaaaccctccgccaccttttcccgaaagccctgccctttttatgccagcccgaaccatccgggtccggggcatcggcattcagcacagcagccacctcttaccacgccccacggcaccaccccaacgtgatggcggtgagcaacaacatcacggcatgcgtgacgctgctggcgctgatctgcgcggtgcccgtgatcgcgtcgggggtgtggttcgcgtcggcgcagggcgaggagtgcgcgcgcctggcgcggtggcccgtggccatcctgggcgggctgctcctgctggccgcgctggcgggcttcgtgggcgcgtactggaaccggcgcggcctgcttgccttctacctcttcgccatggcgtcgctcgtcgtgctcctcatcgcgctcctcgccttcgccttcgccgtcacccgcgggtccggcgcctaccccgtgctcggccgcgcctacgacgactaccgcctcgacggcttctccatgtggctccgcgggtacgtctccgacgaccccgggcgctgggacaaggtcagggcctgcctcgccgtctccgacacctgcaagaagctcgcgcgccaggccgccttcaccagcgcagaccagttctatcagtcgcacctctccccgctccagtccgggtgctgcaagccgccgtcggtgtgcgggttcagctacgtgagcccgacggtgtggtccgccccggcggcgcggccggcggcggacgcggactgcgggctgtggagcaacgacccggggcagctgtgctacgggtgcgagtcctgcaaggcgggcctcctggaggcgctccgggaccagtggcacaaggccaacgtcgccctcgtcgtcgccaccgtcgccctcgtcatcctctacctcgtcggctgcagcgcctacaagaacgcgcaggccgccgccatcttcggacgccgcaagtattagctagctagctgccatgttagtttttttttgcgcttttttttctttattgtcatgtgggttgtggattatggattgcgtatgtgtgtcccccctggtggagagaagcatttgtagcggtggcgtggtgtgtgtttccggacttggttcatcatggtagtgtgatacatgtgtaagattagttactttaattactaattgtgctgttttcctctttccctgttcgccgacgagtaatgtatctggtttgaagattagttactttactaatggtttgaagacgactaagggcttgttcgttttgctctcaatccatgtggattgggtgggattggatgggtttcaatcccaaacaagtcaaaatcgttcacaattttttccaatcccatccaatccatatgggataggaataaccgaacaagccctaatagattatagatgtgggttgggcctgtggaaagatcaccgatggccttggtagacggcagtagtaatacacaggggagcaggatgttatttgtttggcaatggaatggagacacgccttgccgtcagtagtgctacacccgttgctcctcgtcccgtgcgtgcttgggcggctggccgtcagcgtcaggcggcgggtggcacctgctgctgaacaccctgaaggcggagacgagtgagagcgcggcgaagcaggccagcgcggcggcgtgcagcgccagcgacaccgtggccttcccgcagaaccggccgaagtaggagcacgcctcgccccacgacacgccccggtcgccgtgccgcgccagctgcagcagctccgccgccgccgaggccgacgtcaccagcaggtatgccgacgcctgaatccggagagatcggagaacttgacctccccgtaggtgtcgtctgcctgcgcgttggtggccatctcccacagggaggccaaggagagcgggacgacgcagagcctgagcgccatctcggggaccttgaggcccgccgccatgatcctggactcagcgtgtgcgcgtgccgtgctgtggaggaaggggaataagaagaagaagaagacgacgacgaccgagagaggaccagggcttgactggtgcacgcacgcaccaactccataccactagcgtacaaagcgatgaatgcgcatgggctggcccatggaatgtattgagagagtgagatggaatgatctcaaagtttatctaacttttt

SEQ ID NO: 54570 - DNA, 2587 bp, Zea Mays
cccacacgtcatcctcccctaaaccctccgccaccttttcccgaaagccctgccctttttatgccagcccgaaccatccgggtccggggcatcggcattcagcacagcagccacctcttaccacgccccacggcaccaccccaacgtgatggcggtgagcaacaacatcacggcatgcgtgacgctgctggcgctgatctgcgcggtgcccgtgatcgcgtcgggggtgtggttcgcgtcggcgcagggcgaggagtgcgcgcgcctggcgcggtggcccgtggccatcctgggcgggctgctcctgctggccgcgctggcgggcttcgtgggcgcgtactggaaccggcgcggcctgcttgccttctacctcttcgccatggcgtcgctcgtcgtgctcctcatcgcgctcctcgccttcgccttcgccgtcacccgcgggtccggcgcctaccccgtgctcggccgcgcctacgacgactaccgcctcgacggcttctccatgtggctccgcgggtacgtctccgacgaccccgggcgctgggacaaggtcagggcctgcctcgccgtctccgacacctgcaagaagctcgcgcgccaggccgccttcaccagcgcagaccagttctatcagtcgcacctctccccgctccagtccgggtgctgcaagccgccgtcggtgtgcgggttcagctacgtgagcccgacggtgtggtccgccccggcggcgcggccggcggcggacgcggactgcgggctgtggagcaacgacccggggcagctgtgctacgggtgcgagtcctgcaaggcgggcctcctggaggcgctccgggaccagtggcacaaggccaacgtcgccctcgtcgtcgccaccgtcgccctcgtcatcctctacctcgtcggctgcagcgcctacaagaacgcgcaggccgccgccatcttcggacgccgcaagtattagctagctagctgccatgttagtttttttttgcgcttttttttctttattgtcatgtgggttgtggattatggattgcgtatgtgtgtcccccctggtggagagaagcatttgtagcggtggcgtggtgtgtgtttccggacttggttcatcatggtagtgtgatacatgtgtaagattagttactttaattactaattgtgctgttttcctctttccctgttcgccgacgagtaatgtatctggtttgaagattagttactttactaatggtttgaagacgactaagggcttgttcgttttgctctcaatccatgtggattgggtgggattggatgggtttcaatcccaaacaagtcaaaatcgttcacaattttttccaatcccatccaatccatatgggataggaataaccgaacaagccctaatagattatagatgtgggttgggcctgtggaaagatcaccgatggccttggtagacggcagtagtaatacacaggggagcaggatgttatttgtttggcaatggaatggagacacgccttgccgtcagtagtgctacacccgttgctcctcgtcccgtgcgtgcttgggcggctggccgtcagcgtcaggcggcgggtggcacctgctgctgaacaccctgaaggcggagacgagtgagagcgcggcgaagcaggccagcgcggcggcgtgcagcgccagcgacaccgtggccttcccgcagaaccggccgaagtaggagcacgcctcgccccacgacacgccccggtcgccgtgccgcgccagctgcagcagctccgccgccgccgaggccgacgtcaccagcagagaggaagaggagaagctaagatggtgtgctgggcgggcgagacagagcgacctgatccatgacgagaaccacccagtcgtagcgcgcggcgaggggccgcttgaaggacgacgccaagacggaggctacagcgtaggcggctgtgacggcgttgacgccaaccaaatagctagcaaaacgacatcgatttcttttttttagctgctagcatcatgcatgacgatgcgctctctctcaaggagagaactaataatccaacacaaaaaaaaaattatgctacagattcgagcagggtggagaggaaatcaaacgagagtgctagcagtccaataatgaagggttcagttgtaatgcttactactggaaggccggtctaaataaactacacaccaattgatgccggcggcggcggatcgatgctttgtacagacctgaatccggagagatcggagaacttgacctccccgtaggtgtcgtctgcctgcgcgttggtggccatctcccacagggaggccaaggagagcgggacgacgcagagcctgagcgccatctcggggaccttgaggcccgccgccatgatcctggactcagcgtgtgcgcgtgccgtgctgtggaggaaggggaataagaagaagaagaagacgacgacgaccgagagaggaccagggcttgactggtgcacgcacgcaccaactccataccactagcgtacaaagcgatgaatgcgcatgggctggcccatggaatgtattgagagagtgagatggaatgatctcaaagtttatctaacttttt

SEQ ID NO: 54571 - DNA, 2630 bp, Zea Mays
cccacacgtcatcctcccctaaaccctccgccaccttttcccgaaagccctgccctttttatgccagcccgaaccatccgggtccggggcatcggcattcagcacagcagccacctcttaccacgccccacggcaccaccccaacgtgatggcggtgagcaacaacatcacggcatgcgtgacgctgctggcgctgatctgcgcggtgcccgtgatcgcgtcgggggtgtggttcgcgtcggcgcagggcgaggagtgcgcgcgcctggcgcggtggcccgtggccatcctgggcgggctgctcctgctggccgcgctggcgggcttcgtgggcgcgtactggaaccggcgcggcctgcttgccttctacctcttcgccatggcgtcgctcgtcgtgctcctcatcgcgctcctcgccttcgccttcgccgtcacccgcgggtccggcgcctaccccgtgctcggccgcgcctacgacgactaccgcctcgacggcttctccatgtggctccgcgggtacgtctccgacgaccccgggcgctgggacaaggtcagggcctgcctcgccgtctccgacacctgcaagaagctcgcgcgccaggccgccttcaccagcgcagaccagttctatcagtcgcacctctccccgctccagtccgggtgctgcaagccgccgtcggtgtgcgggttcagctacgtgagcccgacggtgtggtccgccccggcggcgcggccggcggcggacgcggactgcgggctgtggagcaacgacccggggcagctgtgctacgggtgcgagtcctgcaaggcgggcctcctggaggcgctccgggaccagtggcacaaggccaacgtcgccctcgtcgtcgccaccgtcgccctcgtcatcctctacctcgtcggctgcagcgcctacaagaacgcgcaggccgccgccatcttcggacgccgcaagtattagctagctagctgccatgttagtttttttttgcgcttttttttctttattgtcatgtgggttgtggattatggattgcgtatgtgtgtcccccctggtggagagaagcatttgtagcggtggcgtggtgtgtgtttccggacttggttcatcatggtagtgtgatacatgtgtaagattagttactttaattactaattgtgctgttttcctctttccctgttcgccgacgagtaatgtatctggtttgaagattagttactttactaatggtttgaagacgactaagggcttgttcgttttgctctcaatccatgtggattgggtgggattggatgggtttcaatcccaaacaagtcaaaatcgttcacaattttttccaatcccatccaatccatatgggataggaataaccgaacaagccctaatagattatagatgtgggttgggcctgtggaaagatcaccgatggccttggtagacggcagtagtaatacacaggggagcaggatgttatttgtttggcaatggaatggagacacgccttgccgtcagtagtgctacacccgttgctcctcgtcccgtgcgtgcttgggcggctggccgtcagcgtcaggcggcgggtggcacctgctgctgaacaccctgaaggcggagacgagtgagagcgcggcgaagcaggccagcgcggcggcgtgcagcgccagcgacaccgtggccttcccgcagaaccggccgaagtaggagcacgcctcgccccacgacacgccccggtcgccgtgccgcgccagctgcagcagctccgccgccgccgaggccgacgtcaccagcagggtataagtaactaataaagagcatgtactgtacgtcgaatagagaggaagaggagaagctaagatggtgtgctgggcgggcgagacagagcgacctgatccatgacgagaaccacccagtcgtagcgcgcggcgaggggccgcttgaaggacgacgccaagacggaggctacagcgtaggcggctgtgacggcgttgacgccaaccaaatagctagcaaaacgacatcgatttcttttttttagctgctagcatcatgcatgacgatgcgctctctctcaaggagagaactaataatccaacacaaaaaaaaaattatgctacagattcgagcagggtggagaggaaatcaaacgagagtgctagcagtccaataatgaagggttcagttgtaatgcttactactggaaggccggtctaaataaactacacaccaattgatgccggcggcggcggatcgatgctttgtacagacctgaatccggagagatcggagaacttgacctccccgtaggtgtcgtctgcctgcgcgttggtggccatctcccacagggaggccaaggagagcgggacgacgcagagcctgagcgccatctcggggaccttgaggcccgccgccatgatcctggactcagcgtgtgcgcgtgccgtgctgtggaggaaggggaataagaagaagaagaagacgacgacgaccgagagaggaccagggcttgactggtgcacgcacgcaccaactccataccactagcgtacaaagcgatgaatgcgcatgggctggcccatggaatgtattgagagagtgagatggaatgatctcaaagtttatctaacttttt

SEQ ID NO: 54572 - DNA, 2629 bp, Zea Mays
cccacacgtcatcctcccctaaaccctccgccaccttttcccgaaagccctgccctttttatgccagcccgaaccatccgggtccggggcatcggcattcagcacagcagccacctcttaccacgccccacggcaccaccccaacgtgatggcggtgagcaacaacatcacggcatgcgtgacgctgctggcgctgatctgcgcggtgcccgtgatcgcgtcgggggtgtggttcgcgtcggcgcagggcgaggagtgcgcgcgcctggcgcggtggcccgtggccatcctgggcgggctgctcctgctggccgcgctggcgggcttcgtgggcgcgtactggaaccggcgcggcctgcttgccttctacctcttcgccatggcgtcgctcgtcgtgctcctcatcgcgctcctcgccttcgccttcgccgtcacccgcgggtccggcgcctaccccgtgctcggccgcgcctacgacgactaccgcctcgacggcttctccatgtggctccgcgggtacgtctccgacgaccccgggcgctgggacaaggtcagggcctgcctcgccgtctccgacacctgcaagaagctcgcgcgccaggccgccttcaccagcgcagaccagttctatcagtcgcacctctccccgctccagtccgggtgctgcaagccgccgtcggtgtgcgggttcagctacgtgagcccgacggtgtggtccgccccggcggcgcggccggcggcggacgcggactgcgggctgtggagcaacgacccggggcagctgtgctacgggtgcgagtcctgcaaggcgggcctcctggaggcgctccgggaccagtggcacaaggccaacgtcgccctcgtcgtcgccaccgtcgccctcgtcatcctctacctcgtcggctgcagcgcctacaagaacgcgcaggccgccgccatcttcggacgccgcaagtattagctagctagctgccatgttagtttttttttgcgcttttttttctttattgtcatgtgggttgtggattatggattgcgtatgtgtgtcccccctggtggagagaagcatttgtagcggtggcgtggtgtgtgtttccggacttggttcatcatggtagtgtgatacatgtgtaagattagttactttaattactaattgtgctgttttcctctttccctgttcgccgacgagtaatgtatctggtttgaagattagttactttactaatggtttgaagacgactaagggcttgttcgttttgctctcaatccatgtggattgggtgggattggatgggtttcaatcccaaacaagtcaaaatcgttcacaattttttccaatcccatccaatccatatgggataggaataaccgaacaagccctaatagattatagatgtgggttgggcctgtggaaagatcaccgatggccttggtagacggcagtagtaatacacaggggagcaggatgttatttgtttggcaatggaatggagacacgccttgccgtcagtagtgctacacccgttgctcctcgtcccgtgcgtgcttgggcggctggccgtcagcgtcaggcggcgggtggcacctgctgctgaacaccctgaaggcggagacgagtgagagcgcggcgaagcaggccagcgcggcggcgtgcagcgccagcgacaccgtggccttcccgcagaaccggccgaagtaggagcacgcctcgccccacgacacgccccggtcgccgtgccgcgccagctgcagcagctccgccgccgccgaggccgacgtcaccagcaggtataagtaactaataaagagcatgtactgtacgtcgaatagagaggaagaggagaagctaagatggtgtgctgggcgggcgagacagagcgacctgatccatgacgagaaccacccagtcgtagcgcgcggcgaggggccgcttgaaggacgacgccaagacggaggctacagcgtaggcggctgtgacggcgttgacgccaaccaaatagctagcaaaacgacatcgatttcttttttttagctgctagcatcatgcatgacgatgcgctctctctcaaggagagaactaataatccaacacaaaaaaaaaattatgctacagattcgagcagggtggagaggaaatcaaacgagagtgctagcagtccaataatgaagggttcagttgtaatgcttactactggaaggccggtctaaataaactacacaccaattgatgccggcggcggcggatcgatgctttgtacagacctgaatccggagagatcggagaacttgacctccccgtaggtgtcgtctgcctgcgcgttggtggccatctcccacagggaggccaaggagagcgggacgacgcagagcctgagcgccatctcggggaccttgaggcccgccgccatgatcctggactcagcgtgtgcgcgtgccgtgctgtggaggaaggggaataagaagaagaagaagacgacgacgaccgagagaggaccagggcttgactggtgcacgcacgcaccaactccataccactagcgtacaaagcgatgaatgcgcatgggctggcccatggaatgtattgagagagtgagatggaatgatctcaaagtttatctaacttttt

SEQ ID NO: 54573 - DNA, 1192 bp, Zea Mays
cccacacgtcatcctcccctaaaccctccgccaccttttcccgaaagccctgccctttttatgccagcccgaaccatccgggtccggggcatcggcattcagcacagcagccacctcttaccacgccccacggcaccaccccaacgtgatggcggtgagcaacaacatcacggcatgcgtgacgctgctggcgctgatctgcgcggtgcccgtgatcgcgtcgggggtgtggttcgcgtcggcgcagggcgaggagtgcgcgcgcctggcgcggtggcccgtggccatcctgggcgggctgctcctgctggccgcgctggcgggcttcgtgggcgcgtactggaaccggcgcggcctgcttgccttctacctcttcgccatggcgtcgctcgtcgtgctcctcatcgcgctcctcgccttcgccttcgccgtcacccgcgggtccggcgcctaccccgtgctcggccgcgcctacgacgactaccgcctcgacggcttctccatgtggctccgcgggtacgtctccgacgaccccgggcgctgggacaaggtcagggcctgcctcgccgtctccgacacctgcaagaagctcgcgcgccaggccgccttcaccagcgcagaccagttctatcagtcgcacctctccccgctccaggtcttacttatcgatgaccgacaaaagtgtggcaagatttacttatacgtgacaaactgtggcgcagaatttgaatgtttaatcttaggcaacttagacaagtgtgatataaaattatatggcaatttttgatactataggtatagaaccgaagtctagttctctctggggacgcgcgaggaccctggtcggaggcaggcaggggtctcatgggacggtgcattgggagtgatacagatactgtttttttttccttctagttttcttaactgcggctctctatgcaatttccgtttccttaaactcgatttgggggtagattgtcgctgcgagtacagacatctagcgtgggcaggcacacacagcgataggatggatagtagtactggtgtgtcctcctcctcctctacgcagagtttgtctgtcagacagacagattagcaaattacacactggcacactgcactgcactatctctcagggaaaggaaaaaaaaagaagtacatctgacgaccgacgctctgcattatattatta

SEQ ID NO: 54574 - DNA, 2263 bp, Zea Mays
aacaatgacgcctcgcgctcccacctactgacccaccccacgccgcctcctctcccagtgggtcctccgcatctcccatctcccgtctcccctcttcctcctcccctgcgatctccaccgcatcacctccctcgaaccctagacccacccacgcgcccattgccttcggtcgccatgtccgccgctcagcttctccgtcactcgcgcaagctgcggagtttgcaaaatcctgtaggttgtgagaattttagttttgttcggcatttctccagcggttctgggtcctttatcgccagggaaaatggtattggaaaaagaaccagaggtaccagattttcccagcataaccagcctgcaaaacagctcgagacattctcagcaggagtaaatggaagctgcacatggagaatagcatccaacagccttaccccaagtgctgctagctggctcagtggttcattctcatgtggacaggtagtctcagcacggccattctcaagtagtgcagacctgcctccacatcaagaaattgggatgccgtctctttcacctacaatgactgagggaaacattgccaagtggcttaagaaggaaggagacaaggtctcccctggtgaggttctctgcgaagtggaaactgacaaagccactgtggagatggagtgcatggaagagggctatcttgctaagattattcatggagatggtgcgaaggagattaaagttggtgaggtcattgctataactgtagaagaagagggtgacatcgagaagttgaaggattataagccgtcatcttcagctgaacctgtagctcctgctgaaccaaaggctgaaccagaaccctcacagccgaaggcggaggaaaaaaagcctacgcaggctcctgaggcgaagaccccgaagattgaagaagcttctcaatctggagatcgtatatttgccagccctcttgcccgtaaattggctgaagataacaatgtcccactatcaagtgtgaaaggtactggtcctgatggtcgtattttgaaggcagacattgaagattacttggccaagggtgggctgagggagtcttttgcagatccagggttaggttatgttgatattccaaatgcacagataagaaaggttactgcaaatcgcttgctagcatcgaaacagaccattcctcattactacttgacagtagatgcacgtgttgacaaacttgtccagttgcgaggtgaactgaacccactgcaggatgcttctggtggaaagaaaatatcaattaatgatcttgtcatcaaggctgcagctttggcccttcgaaaggtccctcagtgtaacagctcatggatgaatgattttattcggcaataccacaatgtgaacatcaacgtggctgtacagactgaacatggattgtttgttccagtaattagggatgcagacaagaagggactcggtgcaattgctgaggaggtgaagcagttggctcaaaaagcaagagataatagcctaaaaccagcagattacgagggcggcaccttcactgtatcaaatttgggaggtcccttcggaattaaacaattctgcgccatcataaatcctccccagtcagcaattttggccattggttctgctgagaagagggtgatacctggttccgctgatggccagtttgaatttggttcattcatgtcagctacactgagctgtgaccacagggttatagatggcgcaatcggtgcggaatttctgaaagcattcaagggatacatcgagaacccaacttcaatgctgctgtgaagttaggatggatgacctaacacaattttttgtcatgttaaataaccaggccaccaaagagtggcgtctccaaaccaagagcacagagccgtcttctccgttttgatattgccattgctaagtaggatcaacgtatacatgcattattggggtcatttttgggttttgtcctcacggataattgatggaaataaatatgaaagaagccaatcttggaaagtactctgattttgaggtcattgctatgcgtttaaaaaactgcagatccgttgatgctctcctcggtaagcgtgatttgatgttgatgatgatatcttgataggagggaggggtagtcaagaactcggttaatatgttacgatgcatggtcggaagttataatgtaagcagagtggaacgaaggtcgggaacatattttgtgcaatcgtgattgagtggttttgattttgtgcattcgttaaaattcaat

SEQ ID NO: 54575 - DNA, 2225 bp, Zea Mays
aacaatgacgcctcgcgctcccacctactgacccaccccacgccgcctcctctcccagtgggtcctccgcatctcccatctcccgtctcccctcttcctcctcccctgcgatctccaccgcatcacctccctcgaaccctagacccacccacgcgcccattgccttcggtcgccatgtccgccgctcagcttctccgtcactcgcgcaagctgcggagtttgcaaaatcctgtaggttgtgagaattttagttttgttcggcatttctccagcggttctgggtcctttatcgccagggaaaatggtattggaaaaagaaccagaggtaccagattttcccagcataaccagcctgcaaaacagctcgagacattctcagcaggagtaaatggaagctgcacatggagaatagcatccaacagccttaccccaagtgctgctagctggctcagtggttcattctcatgtggacaggtagtctcagcacggccattctcaagtagtgcagacctgcctccacatcaagaaattgggatgccgtctctttcacctacaatgactgagggaaacattgccaagtggcttaagaaggaaggagacaaggtctcccctggtgaggttctctgcgaagtggaaactgacaaagccactgtggagatggagtgcatggaagagggctatcttgctaagattattcatggagatggtgcgaaggagattaaagttggtgaggtcattgctataactgtagaagaagagggtgacatcgagaagttgaaggattataagccgtcatcttcagctgaacctgtagctcctgctgaaccaaaggctgaaccagaaccctcacagccgaaggcggaggaaaaaaagcctacgcaggctcctgaggcgaagaccccgaagattgaagaagcttctcaatctggagatcgtcccactatcaagtgtgaaaggtactggtcctgatggtcgtattttgaaggcagacattgaagattacttggcttctgtagccaagggtgggctgagggagtcttttgcagatccagggttaggttatgttgatattccaaatgcacagataagaaaggttactgcaaatcgcttgctagcatcgaaacagaccattcctcattactacttgacagtagatgcacgtgttgacaaacttgtccagttgcgaggtgaactgaacccactgcaggatgcttctggtggaaagaaaatatcaattaatgatcttgtcatcaaggctgcagctttggcccttcgaaaggtccctcagtgtaacagctcatggatgaatgattttattcggcaataccacaatgtgaacatcaacgtggctgtacagactgaacatggattgtttgttccagtaattagggatgcagacaagaagggactcggtgcaattgctgaggaggtgaagcagttggctcaaaaagcaagagataatagcctaaaaccagcagattacgagggcggcaccttcactgtatcaaatttgggaggtcccttcggaattaaacaattctgcgccatcataaatcctccccagtcagcaattttggccattggttctgctgagaagagggtgatacctggttccgctgatggccagtttgaatttggttcattcatgtcagctacactgagctgtgaccacagggttatagatggcgcaatcggtgcggaatttctgaaagcattcaagggatacatcgagaacccaacttcaatgctgctgtgaagttaggatggatgacctaacacaattttttgtcatgttaaataaccaggccaccaaagagtggcgtctccaaaccaagagcacagagccgtcttctccgttttgatattgccattgctaagtaggatcaacgtatacatgcattattggggtcatttttgggttttgtcctcacggataattgatggaaataaatatgaaagaagccaatcttggaaagtactctgattttgaggtcattgctatgcgtttaaaaaactgcagatccgttgatgctctcctcggtaagcgtgatttgatgttgatgatgatatcttgataggagggaggggtagtcaagaactcggttaatatgttacgatgcatggtcggaagttataatgtaagcagagtggaacgaaggtcgggaacatattttgtgcaatcgtgattgagtggttttgattttgtgcattcgttaaaattcaat

SEQ ID NO: 54576 - DNA, 2251 bp, Zea Mays
caaacaatgacgcctcgcgctcccacctactgacccaccccacgccgcctcctctcccagtgggtcctccgcatctcccatctcccgtctcccctcttcctcctcccctgcgatctccaccgcatcacctccctcgaaccctagacccacccacgcgcccattgccttcggtcgccatgtccgccgctcagcttctccgtcactcgcgcaagctgcggagtttgcaaaatcctgtaggttgtgagaattttagttttgttcggcatttctccagcggttctgggtcctttatcgccagggaaaatggtattggaaaaagaaccagaggtaccagattttcccagcataaccagcctgcaaaacagctcgagacattctcagcaggagtaaatggaagctgcacatggagaatagcatccaacagccttaccccaagtgctgctagctggctcagtggttcattctcatgtggacaggtagtctcagcacggccattctcaagtagtgcagacctgcctccacatcaagaaattgggatgccgtctctttcacctacaatgactgagggaaacattgccaagtggcttaagaaggaaggagacaaggtctcccctggtgaggttctctgcgaagtggaaactgacaaagccactgtggagatggagtgcatggaagagggctatcttgctaagattattcatggagatggtgcgaaggagattaaagttggtgaggtcattgctataactgtagaagaagagggtgacatcgagaagttgaaggattataagccgtcatcttcagctgaacctgtagctcctgctgaaccaaaggctgaaccagaaccctcacagccgaaggcggaggaaaaaaagcctacgcaggctcctgaggcgaagaccccgaagattgaagaagcttctcaatctggagatcgtatatttgccagccctcttgcccgtcccactatcaagtgtgaaaggtactggtcctgatggtcgtattttgaaggcagacattgaagattacttggcttctgtagccaagggtgggctgagggagtcttttgcagatccagggttaggttatgttgatattccaaatgcacagataagaaaggttactgcaaatcgcttgctagcatcgaaacagaccattcctcattactacttgacagtagatgcacgtgttgacaaacttgtccagttgcgaggtgaactgaacccactgcaggatgcttctggtggaaagaaaatatcaattaatgatcttgtcatcaaggctgcagctttggcccttcgaaaggtccctcagtgtaacagctcatggatgaatgattttattcggcaataccacaatgtgaacatcaacgtggctgtacagactgaacatggattgtttgttccagtaattagggatgcagacaagaagggactcggtgcaattgctgaggaggtgaagcagttggctcaaaaagcaagagataatagcctaaaaccagcagattacgagggcggcaccttcactgtatcaaatttgggaggtcccttcggaattaaacaattctgcgccatcataaatcctccccagtcagcaattttggccattggttctgctgagaagagggtgatacctggttccgctgatggccagtttgaatttggttcattcatgtcagctacactgagctgtgaccacagggttatagatggcgcaatcggtgcggaatttctgaaagcattcaagggatacatcgagaacccaacttcaatgctgctgtgaagttaggatggatgacctaacacaattttttgtcatgttaaataaccaggccaccaaagagtggcgtctccaaaccaagagcacagagccgtcttctccgttttgatattgccattgctaagtaggatcaacgtatacatgcattattggggtcatttttgggttttgtcctcacggataattgatggaaataaatatgaaagaagccaatcttggaaagtactctgattttgaggtcattgctatgcgtttaaaaaactgcagatccgttgatgctctcctcggtaagcgtgatttgatgttgatgatgatatcttgataggagggaggggtagtcaagaactcggttaatatgttacgatgcatggtcggaagttataatgtaagcagagtggaacgaaggtcgggaacatattttgtgcaatcgtgattgagtggttttgattttgtgcattcgttaaaattcaat

SEQ ID NO: 54577 - DNA, 586 bp, Zea Mays
gacacaccacatatcctggagtcctgtgtaactgtttgatcttggttgatattgtgatccgagaatattgcctagagtgagcatgacattttgtaatggggacgaggcacacaaattttataaacaatacatctaagaagttggttttctatcgaaaatatacatgaagaagtcatactgcaagtggttgaaatgttcaagggaagtcaaatgtgcaacaagggctgatgataacccaagggtccacaataaaaccacaggacatacgcaatgcaaggcaaggttaggatgaaggtgaaaaagatttatgatgacaacaagaagaataacatagttgttgctgattgatctggtgcacctagaacataaacacgagttcattacgcaagaaacagagaaacaacaccttcattgcaacaagaattgtaatctaaagttcatgaagtttgtgggtacaatgcatgatagcagggtaccacaacactgcattgtagacatgatttaagacagtcataatgggcctaagaatgttccagtaatggtgcaagacccgaagaacatgtaagacacactatacttgtttttt

SEQ ID NO: 54578 - DNA, 2205 bp, Zea Mays
gtgtcaccgagcgccaaaaacagaaaaaacccctgaactccgaagacgggcagggcaggcaccattggcatcagccatgccgccggcgccgccaccgcaacaacctaagaatcgcagccgtgttcccacgccgaccggagagaaccgtcggcctcagcgtcggatggagagccggaacgcgtcggagcgggccgcgttcttcgcgcggcgagaggcagcggcggtgctccggcgcgtgcttcgcggggacgccaccaggcgcgccgccggctccataaaatcccttgtatactccccaaccgtccgcaacaagcgcgccaccttcgctctcgtctgccagaccctcaagtacctaccaattcttaaagaggttttagcatcgagtgaaatactgagcagcaaatggaagaaacaagaggaattggtttatgtgactacctatgacattctctttggtcagggaattgcggtttctgggtcagtcgagcaattaattatgctacaaaaggattctcttaggactactcttgataaagtttgtgcgagaaagagagtccgctgcgttgaagacctattgagcaataaatcagccgtcaaaccaaagccccgatttcttcgtgttaacacactcaaggtcactacagagtctgtcattgaagaattgaacaaaatgcacatggttgacaaagatgaaatggttccagatatgttggtactcccacctggaactgatttgcataaccatccgttggttacagatgggaaagtgtttttacaggggagagctagttgtatggtagcagttgcattgtgccctaagccaggctggaaggttattgatgcatgtgcggctccagggaacaaaacagtccaccttgctgcactcatgaatggagaggggagtattatagcttgtgaacttaacaaagagagggccaagacattgcaacatactgtcagaagatctggagcaaacaatattcgaatagttaatggcgactttctggaagtagatagaaatgatccatcatatgctgaggtttgtagatacctccacttctattggtccatgctattctattggacccctcgtgctctggttctggaatatctacagagagacttgattatttgcttccctcacattctagagatagtcaggatgatgcgggtacaagctcaagggtcatgaaactctccgcttttcagaagaaagctctctcccatgctctatcatttccgtcagtggagagggtggtctacagtacttgctcaatccaccaggcagagaacgaggatgtcataaactctgtcttgcccttagctacatccctcggatttgagctcgctacaccgttccctcagtggcaccgccgtggccttccagttttccaaggatctgaacatttgcttcggacggatcctgaagatggcctggagggcttcttcattgcattgtttgtcaggaaagcaggccctacttcagaagagcctagcgaagatgccacggtagaagtaagaaccaaacaagtgcgcgggaggcgaaatggggtcagggcgttcagctccttgaggctgtccaggatgatcctctggtgaccaaaggcgttctggatttaatttgatgtatcattgctatttttggtagtcaatgtggtaacaggttgatattgtgatccgagaatattgcctagagtgagcatgacattttgtaatggggacgaggcacacaaattttataaacaatacatctaagaagttggttttctatcgaaaatatacatgaagaagtcatactgcaagtggttgaaatgttcaagggaagtcaaatgtgcaacaagggctgatgataacccaagggtccacaataaaaccacaggacatacgcaatgcaaggcaaggttaggatgaaggtgaaaaagatttatgatgacaacaagaagaataacatagttgttgctgattgatctggtgcacctagaacataaacacgagttcattacgcaagaaacagagaaacaacaccttcattgcaacaagaattgtaatctaaagttcatgaagtttgtgggtacaatgcatgatagcagggtaccacaacactgcattgtagacatgatttaagacagtcataatgggcctaagaatgttccagtaatggtgcaagacccgaagaacatgtaagacacactatacttgtttttt

SEQ ID NO: 54579 - DNA, 1710 bp, Zea Mays
gtgtcaccgagcgccaaaaacagaaaaaacccctgaactccgaagacgggcagggcaggcaccattggcatcagccatgccgccggcgccgccaccgcaacaacctaagaatcgcagccgtgttcccacgccgaccggagagaaccgtcggcctcagcgtcggatggagagccggaacgcgtcggagcgggccgcgttcttcgcgcggcgagaggcagcggcggtgctccggcgcgtgcttcgcggggacgccaccaggcgcgccgccggctccataaaatcccttgtatactccccaaccgtccgcaacaagcgcgccaccttcgctctcgtctgccagaccctcaagtacctaccaattcttaaagaggttttagcatcgagtgaaatactgagcagcaaatggaagaaacaagaggaattggtttatgtgactacctatgacattctctttggtcagggaattgcggtttctgggtcagtcgagcaattaattatgctacaaaaggattctcttaggactactcttgataaagtttgtgcgagaaagagagtccgctgcgttgaagacctattgagcaataaatcagccgtcaaaccaaagccccgatttcttcgtgttaacacactcaaggtcactacagagtctgtcattgaagaattgaacaaaatgcacatggttgacaaagatgaaatggttccagatatgttggtactcccacctggaactgatttgcataaccatccgttggttacagatgggaaagtgtttttacaggggagagctagttgtatggtagcagttgcattgtgccctaagccaggctggaaggttattgatgcatgtgcggctccagggaacaaaacagtccaccttgctgcactcatgaatggagaggggagtattatagcttgtgaacttaacaaagagagggccaagacattgcaacatactgtcagaagatctggagcaaacaatattcgaatagttaatggcgactttctggaagtagatagaaatgatccatcatatgctgaggtccatgctattctattggacccctcgtgctctggttctggaatatctacagagagacttgattatttgcttccctcacattctagagatagtcaggatgatgcgggtacaagctcaagggtcatgaaactctccgcttttcagaagaaagctctctcccatgctctatcatttccgtcagtggagagggtggtctacagtacttgctcaatccaccaggcagagaacgaggatgtcataaactctgtcttgcccttagctacatccctcggatttgagctcgctacaccgttccctcagtggcaccgccgtggccttccagttttccaaggatctgaacatttgcttcggacggatcctgaagatggcctggagggcttcttcattgcattgtttgtcaggaaagcaggccctacttcagaagagcctagcgaagatgccacggtagaagtaagaaccaaacaagtgcgcgggaggcgaaatggggtcagggcgttcagctccttgaggctgtccaggatgatcctctggtgaccaaaggcgttctggatttaatttgatgtatcattgctatttttggtagtcaatgtggtaacagggccgcggaccgtccaggccttagggccggaccgttcgtcacttttggtgctcaataatgagatcaacctagg

SEQ ID NO: 54580 - DNA, 1765 bp, Zea Mays
gtgtcaccgagcgccaaaaacagaaaaaacccctgaactccgaagacgggcagggcaggcaccattggcatcagccatgccgccggcgccgccaccgcaacaacctaagaatcgcagccgtgttcccacgccgaccggagagaaccgtcggcctcagcgtcggatggagagccggaacgcgtcggagcgggccgcgttcttcgcgcggcgagaggcagcggcggtgctccggcgcgtgcttcgcggggacgccaccaggcgcgccgccggctccataaaatcccttgtatactccccaaccgtccgcaacaagcgcgccaccttcgctctcgtctgccagaccctcaagtacctaccaattcttaaagaggttttagcatcgagtgaaatactgagcagcaaatggaagaaacaagaggaattggtttatgtgactacctatgacattctctttggtcagggaattgcggtttctgggtcagtcgagcaattaattatgctacaaaaggattctcttaggactactcttgataaagtttgtgcgagaaagagagtccgctgcgttgaagacctattgagcaataaatcagccgtcaaaccaaagccccgatttcttcgtgttaacacactcaaggtcactacagagtctgtcattgaagaattgaacaaaatgcacatggttgacaaagatgaaatggttccagatatgttggtactcccacctggaactgatttgcataaccatccgttggttacagatgggaaagtgtttttacaggggagagctagttgtatggtagcagttgcattgtgccctaagccaggctggaagggaacaaaacagtccaccttgctgcactcatgaatggagaggggagtattatagcttgtgaacttaacaaagagagggccaagacattgcaacatactgtcagaagatctggagcaaacaatattcgaatagttaatggcgactttctggaagtagatagaaatgatccatcatatgctgaggtccatgctattctattggacccctcgtgctctggttctggaatatctacagagagacttgattatttgcttccctcacattctagagatagtcaggatgatgcgggtacaagctcaagggtcatgaaactctccgcttttcagaagaaagctctctcccatgctctatcatttccgtcagtggagagggtggtctacagtacttgctcaatccaccaggcagagaacgaggatgtcataaactctgtcttgcccttagctacatccctcggatttgagctcgctacaccgttccctcagtggcaccgccgtggccttccagttttccaaggatctgaacatttgcttcggacggatcctgaagatggcctggagggcttcttcattgcattgtttgtcaggaaagcaggccctacttcagaagagcctagcgaagatgccacggtagaagtaagaaccaaacaagtgcgcgggaggcgaaatggggtcagggcgttcagctccttgaggctgtccaggatgatcctctggtgaccaaaggcgttctggatttaatttgatgtatcattgctatttttggtagtcaatgtggtaacaggtaggtttgaatctgttctgaattttggactcatttttttcttctactccagataatatgttgccatactccatgtccatttcagattataagacattttagctaatatatatatatatatatatatatatatttgtcatcgaaggtgatgta

SEQ ID NO: 54581 - DNA, 1826 bp, Zea Mays
gtgtcaccgagcgccaaaaacagaaaaaacccctgaactccgaagacgggcagggcaggcaccattggcatcagccatgccgccggcgccgccaccgcaacaacctaagaatcgcagccgtgttcccacgccgaccggagagaaccgtcggcctcagcgtcggatggagagccggaacgcgtcggagcgggccgcgttcttcgcgcggcgagaggcagcggcggtgctccggcgcgtgcttcgcggggacgccaccaggcgcgccgccggctccataaaatcccttgtatactccccaaccgtccgcaacaagcgcgccaccttcgctctcgtctgccagaccctcaagtacctaccaattcttaaagaggttttagcatcgagtgaaatactgagcagcaaatggaagaaacaagaggaattggtttatgtgactacctatgacattctctttggtcagggaattgcggtttctgggtcagtcgagcaattaattatgctacaaaaggattctcttaggactactcttgataaagtttgtgcgagaaagagagtccgctgcgttgaagacctattgagcaataaatcagccgtcaaaccaaagccccgatttcttcgtgttaacacactcaaggtcactacagagtctgtcattgaagaattgaacaaaatgcacatgtattgaataggttgacaaagatgaaatggttccagatatgttggtactcccacctggaactgatttgcataaccatccgttggttacagatgggaaagtgtttttacaggggagagctagttgtatggtagcagttgcattgtgccctaagccaggctggaaggttattgatgcatgtgcggctccagggaacaaaacagtccaccttgctgcactcatgaatggagaggggagtattatagcttgtgaacttaacaaagagagggccaagacattgcaacatactgtcagaagatctggagcaaacaatattcgaatagttaatggcgactttctggaagtagatagaaatgatccatcatatgctgaggtttgtagatacctccacttctattggtccatgctattctattggacccctcgtgctctggttctggaatatctacagagagacttgattatttgcttccctcacattctagagatagtcaggatgatgcgggtacaagctcaagggtcatgaaactctccgcttttcagaagaaagctctctcccatgctctatcatttccgtcagtggagagggtggtctacagtacttgctcaatccaccaggcagagaacgaggatgtcataaactctgtcttgcccttagctacatccctcggatttgagctcgctacaccgttccctcagtggcaccgccgtggccttccagttttccaaggatctgaacatttgcttcggacggatcctgaagatggcctggagggcttcttcattgcattgtttgtcaggaaagcaggccctacttcagaagagcctagcgaagatgccacggtagaagtaagaaccaaacaagtgcgcgggaggcgaaatggggtcagggcgttcagctccttgaggctgtccaggatgatcctctggtgaccaaaggcgttctggatttaatttgatgtatcattgctatttttggtagtcaatgtggtaacaggtaggtttgaatctgttctgaattttggactcatttttttcttctactccagataatatgttgccatactccatgtccatttcagattataagacattttagctaatatatatatatatatatatatatatatttgtcatcgaaggtgatgta

SEQ ID NO: 54582 - DNA, 888 bp, Zea Mays
tggtgttgctgctcctactgttcttggcatgagcgttggagatggggacagactactacaatgcgctcaaggtgagccgaaacgccacggcgcgatggaggaggacctcaagaagtcgtaacaccggctggacatgaagtggcacccaacaagaaccctggcaacgtcaaggatgaagttgaggccaaattcaagatctccaaggcctaaggggttttgagtgatccccagaagagggcggcatacgatcagtatggcaagaaagggctgaaggcctttgcagatatccaggagcgttgtgaggctgaatggatgaaggaaatacttggtgattatgatgctattcatgtgagagtggtgatctattgaaaaatacttggtgttgaacagagccttcatcctcatctagacagagacaccacacctgagtataacagaaaaagaattgcacaatggattccaccgggtcaaacttcattcattgcattaaatgaaagaactccatgcttcttttccactctgtcagacaggtctgtaagaacgaacctgcacattgaggcttatacgtggagagtgccataaattggttgttatattcttttctctattcctttaaaatataagttttgtgtgtcgcacaaagcacatagatctgttcttcccctcgcttctcacctaccagtaggtttttacatgagaaaccactcaagcctaacatgatagtaagtcacacgtagtgcagcgttcttacctaatactatcctgctagctgaagaaatatgagtattaggtaatcgtgctgaagaaagatgagaatatccttgatgttaactatatcttaactaggtatgatggcattaaggttcaattcagcataatcgttgaaac

SEQ ID NO: 54583 - DNA, 1634 bp, Zea Mays
tggtgttgctgctcctactgttcttggcatgagcgttggagatggggacagactactacaatgcgctcaaggtgagccgaaacgccacggcgcgatggaggaggacctcaagaagtcgtaacaccggctggacatgaagtggcacccaacaagaaccctggcaacgtcaaggatgaagttgaggccaaattcaagatctccaaggcctaaggggttttgagtgatccccagaagagggcggcatacgatcagtatggcaagaaagggctgaaggcctttgcagatatccaggagcgttgtgaggctgaatggatgaaggaaatacttggtgattatgatgctattcatgtgagagtggtgatctattgaaaaatacttggtgttgaacagagccttcatcctcatctagacagagacaccacacctgagtataacagaaaaagaattgcacaatggattccaccgggtcaaacttcattcattgcattaaatgaaagaactccatgcttcttttccactctgtcagacaggcaacaattcaggtacaagttagcgtactcgtgcaacttgagtagcatgttggagccaattattaaggaaaactatcagttattgacagtaagaggctcgtgatgcaaggagcaaagacatttatcaagacaatgagagaatttgacagtgatttaaccctttgtgatgatccaaaaagaacaccaatgattattataggtattaaatattgtctaattataaaacaaattacagatggagactaaaatacgagataaatttattaaacctaattaagtctatatttaatactcctaattgatatttaaatatttgatatgacccgaactaaactttagtcagggaacaaaacacttagacttggagagctgaatctttcagcaacttgacatcctgacatggacaactgattaaacctgaagctagcatggtagtgtttgctgttattgcagaagccagctaaaatcaacctgcaatggtggacaccacctatgtttcacttcagcgcatctgttcatactaccacgcgtacttataatctagaaaaagccaaaagtcttgacatgttttgtttgcaacacaaaagagaatttggttacaacacaaaagagaagatttatttgcagatttagaatgtatatacatgtcacatccttttgtacaacatgtgtaagaatgaagcagcaccatgaggcttatgcgtggagaatatcattaattggttattatcttttaatttgtataggtctgtaagaacgaacctgcacattgaggcttatacgtggagagtgccataaattggttgttatattcttttctctattcctttaaaatataagttttgtgtgtcgcacaaagcacatagatctgttcttcccctcgcttctcacctaccagtaggtttttacatgagaaaccactcaagcctaacatgatagtaagtcacacgtagtgcagcgttcttacctaatactatcctgctagctgaagaaatatgagtattaggtaatcgtgctgaagaaagatgagaatatccttgatgttaactatatcttaactaggtatgatggcattaaggttcaattcagcataatcgttgaaac

SEQ ID NO: 54584 - DNA, 1137 bp, Zea Mays
gggaattcgtgtggatcgaggaagggatttttgtgttggggtttggaaggtggtgttgctgctcctactgttcttggcatgagcgttggagatggggacagactactacaatgcgctcaaggtgagccgaaacgccacggcgcgatggaggaggacctcaagaagtcgtaacaccggctggacatgaagtggcacccaacaagaaccctggcaacgtcaaggatgaagttgaggccaaattcaagatctccaaggcctaaggggttttgagtgatccccagaagagggcggcatacgatcagtatggcaagaaagggctgaaggcctttgcagatatccaggagcgttgtgaggctgaatggatgaaggaaatacttggtgattatgatgctattcatgtgagagtggtgatctattgaaaaatacttggtgttgaacagagccttcatcctcatctagacagagacaccacacctgagtataacagaaaaagaattgcacaatggattccaccgggtcaaacttcattcattgcattaaatgaaagaactccatgcttcttttccactctgtcagacaggcaacaattcaggtacaagttagcgtactcgtgcaacttgagtagcatgttggagccaattattaaggaaaactatcagttattgacagtaagaggctcgtgatgcaaggagcaaagacatttatcaagacaatgagagaatttgacagtgatttaaccctttgtgatgatccaaaaagaacaccaatgattattataggtctgtaagaacgaacctgcacattgaggcttatacgtggagagtgccataaattggttgttatattcttttctctattcctttaaaatataagttttgtgtgtcgcacaaagcacatagatctgttcttcccctcgcttctcacctaccagtaggtttttacatgagaaaccactcaagcctaacatgatagtaagtcacacgtagtgcagcgttcttacctaatactatcctgctagctgaagaaatatgagtattaggtaatcgtgctgaagaaagatgagaatatccttgatgttaactatatcttaactaggtatgatggcattaaggttcaattcagcataatcgttgaaac

SEQ ID NO: 54585 - DNA, 2053 bp, Zea Mays
cttggggaattcgtgtggatcgaggaagggatttttgtgttggggtttggaaggtggtgttgctgctcctactgttcttggcatgagcgttggagatggggacagactactacaatgcgctcaaggtgagccgaaacgccacggcgcgatggaggaggacctcaagaagtcgtaacaccggctggacatgaagtggcacccaacaagaaccctggcaacgtcaaggatgaagttgaggccaaattcaagatctccaaggcctaaggggttttgagtgatccccagaagagggcggcatacgatcagtatggcaagaaagggctgaaggcctttgcagatatccaggagcgttgtgaggctgaatggatgaaggaaatacttggtgattatgatgctattcatgtgagagtggtgatctattgaaaaatacttggtgttgaacagagccttcatcctcatctagacagagacaccacacctgagtataacagaaaaagaattgcacaatggattccaccgggtcaaacttcattcattgcattaaatgaaagaactccatgcttcttttccactctgtcagacaggtactgtctactctgtttttcttatttctctgtccaactagaatttttggcgttgtttaaatagcatcaattttcttcttgcatcctaatgcattgcagagcacttcttggtaagggcacttagaaagatgtcctcattcttgttattattgaggattatttaaaagaattaagtttatatttctgtttactttccattttggcatggttaaacatttcttagcaataagatgttttgttgtggctagtcatgtcagttcttcaatctgtatgctgattaaatgctattcaggtttctacctctatgtgtgctaatatatcaagaaccactgtgtgcttactgaatgtgtttgctcattcattaggcaacaattcaggtacaagttagcgtactcgtgcaacttgagtagcatgttggagccaattattaaggaaaactatcagttattgacagtaagaggctcgtgatgcaaggagcaaagacatttatcaagacaatgagagaatttgacagtgatttaaccctttgtgatgatccaaaaagaacaccaatgattattataggtattaaatattgtctaattataaaacaaattacagatggagactaaaatacgagataaatttattaaacctaattaagtctatatttaatactcctaattgatatttaaatatttgatatgacccgaactaaactttagtcagggaacaaaacacttagacttggagagctgaatctttcagcaacttgacatcctgacatggacaactgattaaacctgaagctagcatggtagtgtttgctgttattgcagaagccagctaaaatcaacctgcaatggtggacaccacctatgtttcacttcagcgcatctgttcatactaccacgcgtacttataatctagaaaaagccaaaagtcttgacatgttttgtttgcaacacaaaagagaatttggttacaacacaaaagagaagatttatttgcagatttagaatgtatatacatgtcacatccttttgtacaacatgtgtaagaatgaagcagcaccatgaggcttatgcgtggagaatatcattaattggttattatcttttaatttgtataggtctgtaagaacgaacctgcacattgaggcttatacgtggagagtgccataaattggttgttatattcttttctctattcctttaaaatataagttttgtgtgtcgcacaaagcacatagatctgttcttcccctcgcttctcacctaccagtaggtttttacatgagaaaccactcaagcctaacatgatagtaagtcacacgtagtgcagcgttcttacctaatactatcctgctagctgaagaaatatgagtattaggtaatcgtgctgaagaaagatgagaatatccttgatgttaactatatcttaactaggtatgatggcattaaggttcaattcagcataatcgttgaaac

SEQ ID NO: 54586 - DNA, 1043 bp, Zea Mays
ctctagcgtagttcttggggaattcgtgtggatcgaggaagggatttttgtgttggggtttggaaggtggtgttgctgctcctactgttcttggcatgagcgttggagatggggacagactactacaatgcgctcaaggtgagccgaaacgccacggcgcgatggaggaggacctcaagaagtcgtaacaccggctggacatgaagtggcacccaacaagaaccctggcaacgtcaaggatgaagttgaggccaaattcaagatctccaaggcctaaggggttttgagtgatccccagaagagggcggcatacgatcagtatggcaagaaagggctgaaggcctttgcagatatccaggagcgttgtgaggctgaatggatgaaggaaatacttggtgattatgatgctattcatgtgagagtggtgatctattgaaaaatacttggtgttgaacagagccttcatcctcatctagacagagacaccacacctgagtataacagaaaaagaattgcacaatggattccaccgggtcaaacttcattcattgcattaaatgaaagaactccatgcttcttttccactctgtcagacaggcaacaattcaggtacaagttagcgtactcgtgcaacttgagtagcatgttggagccaattattaaggaaaactatcagttattgacagtctgtaagaacgaacctgcacattgaggcttatacgtggagagtgccataaattggttgttatattcttttctctattcctttaaaatataagttttgtgtgtcgcacaaagcacatagatctgttcttcccctcgcttctcacctaccagtaggtttttacatgagaaaccactcaagcctaacatgatagtaagtcacacgtagtgcagcgttcttacctaatactatcctgctagctgaagaaatatgagtattaggtaatcgtgctgaagaaagatgagaatatccttgatgttaactatatcttaactaggtatgatggcattaaggttcaattcagcataatcgttgaaac

SEQ ID NO: 54587 - DNA, 1408 bp, Zea Mays
ctctagcgtagttcttggggaattcgtgtggatcgaggaagggatttttgtgttggggtttggaaggtggtgttgctgctcctactgttcttggcatgagcgttggagatggggacagactactacaatgcgctcaaggtgagccgaaacgccacggcgcgatggaggaggacctcaagaagtcgtaacaccggctggacatgaagtggcacccaacaagaaccctggcaacgtcaaggatgaagttgaggccaaattcaagatctccaaggcctaaggggttttgagtgatccccagaagagggcggcatacgatcagtatggcaagaaagggctgaaggcctttgcagatatccaggagcgttgtgaggctgaatggatgaaggaaatacttggtgattatgatgctattcatgtgagagtggtgatctattgaaaaatacttggtgttgaacagagccttcatcctcatctagacagagacaccacacctgagtataacagaaaaagaattgcacaatggattccaccgggtcaaacttcattcattgcattaaatgaaagaactccatgcttcttttccactctgtcagacaggtactgtctactctgtttttcttatttctctgtccaactagaatttttggcgttgtttaaatagcatcaattttcttcttgcatcctaatgcattgcagagcacttcttggtaagggcacttagaaagatgtcctcattcttgttattattgaggattatttaaaagaattaagtttatatttctgtttactttccattttggcatggttaaacatttcttagcaataagatgttttgttgtggctagtcatgtcagttcttcaatctgtatgctgattaaatgctattcaggtttctacctctatgtgtgctaatatatcaagaaccactgtgtgcttactgaatgtgtttgctcattcattaggcaacaattcaggtacaagttagcgtactcgtgcaacttgagtagcatgttggagccaattattaaggaaaactatcagttattgacagtctgtaagaacgaacctgcacattgaggcttatacgtggagagtgccataaattggttgttatattcttttctctattcctttaaaatataagttttgtgtgtcgcacaaagcacatagatctgttcttcccctcgcttctcacctaccagtaggtttttacatgagaaaccactcaagcctaacatgatagtaagtcacacgtagtgcagcgttcttacctaatactatcctgctagctgaagaaatatgagtattaggtaatcgtgctgaagaaagatgagaatatccttgatgttaactatatcttaactaggtatgatggcattaaggttcaattcagcataatcgttgaaac

SEQ ID NO: 54588 - DNA, 1303 bp, Zea Mays
tcaggaacgtcgtgctcaagccgcaccgccatcatcgcccctagcacaccttccttcggcaaccttccatagacgcaatcacaggatccacgccccgcgtccgtgctccccctcgcgcaggtccaagcgcgtgccttcctccgccgacgaggccgaggttgctgagctcctcgccgacacctccacgcccccgcctctcgccctctcccacgtctcctgtgtgcccctgccccttcggctccatctggcaacgccatcctcgctcgcacgccctcgcctccgtgagccccaccccgctccggcgctcccatcgtgcccgaaccctgagatagccgccgccccaagcgtctgacgtcatgcccctcgcctgcctctcgacccacaagatagccgcccccaccccctctccgagcgtggataaggaagcatcgccgcacggaatcgttcaagtggcgcgcgatggaggacgaggggagcagcggcccgagcctgggcccggacagggaggcctcctcctcgccgctgcagaggccggagagaatgcgcggcgcgtccggcaccatgccactcaccgtgaagcaggttttgagtgatccccagaagagggcggcatacgatcagtatggcaagaaagggctgaaggcctttgcagatatccaggagcgttgtgaggctgaatggatgaaggaaatacttggtgattatgatgctattcatagccttcatcctcatctagacagagacaccacacctgagtataacagaaaaagaattgcacaatggattccaccgggtcaaacttcattcattgcattaaatgaaagaactccatgcttcttttccactctgtcagacaggcaacaattcaggtacaagttagcgtactcgtgcaacttgagtagcatgttggagccaattattaaggaaaactatcagttattgacagtctgtaagaacgaacctgcacattgaggcttatacgtggagagtgccataaattggttgttatattcttttctctattcctttaaaatataagttttgtgtgtcgcacaaagcacatagatctgttcttcccctcgcttctcacctaccagtaggtttttacatgagaaaccactcaagcctaacatgatagtaagtcacacgtagtgcagcgttcttacctaatactatcctgctagctgaagaaatatgagtattaggtaatcgtgctgaagaaagatgagaatatccttgatgttaactatatcttaactaggtatgatggcattaaggttcaattcagcataatcgttgaaac

SEQ ID NO: 54589 - DNA, 2003 bp, Zea Mays
tcaggaacgtcgtgctcaagccgcaccgccatcatcgcccctagcacaccttccttcggcaaccttccatagacgcaatcacaggatccacgccccgcgtccgtgctccccctcgcgcaggtccaagcgcgtgccttcctccgccgacgaggccgaggttgctgagctcctcgccgacacctccacgcccccgcctctcgccctctcccacgtctcctgtgtgcccctgccccttcggctccatctggcaacgccatcctcgctcgcacgccctcgcctccgtgagccccaccccgctccggcgctcccatcgtgcccgaaccctgagatagccgccgccccaagcgtctgacgtcatgcccctcgcctgcctctcgacccacaagatagccgcccccaccccctctccgagcgtggataaggaagcatcgccgcacggaatcgttcaagtggcgcgcgatggaggacgaggggagcagcggcccgagcctgggcccggacagggaggcctcctcctcgccgctgcagaggccggagagaatgcgcggcgcgtccggcaccatgccactcaccgtgaagcaggttttgagtgatccccagaagagggcggcatacgatcagtatggcaagaaagggctgaaggcctttgcagatatccaggagcgttgtgaggctgaatggatgaaggaaatacttggtgattatgatgctattcatgtgagagtggtgatctattgaaaaatacttggtgttgaacagagccttcatcctcatctagacagagacaccacacctgagtataacagaaaaagaattgcacaatggattccaccgggtcaaacttcattcattgcattaaatgaaagaactccatgcttcttttccactctgtcagacaggcaacaattcaggtacaagttagcgtactcgtgcaacttgagtagcatgttggagccaattattaaggaaaactatcagttattgacagtaagaggctcgtgatgcaaggagcaaagacatttatcaagacaatgagagaatttgacagtgatttaaccctttgtgatgatccaaaaagaacaccaatgattattataggtattaaatattgtctaattataaaacaaattacagatggagactaaaatacgagataaatttattaaacctaattaagtctatatttaatactcctaattgatatttaaatatttgatatgacccgaactaaactttagtcagggaacaaaacacttagacttggagagctgaatctttcagcaacttgacatcctgacatggacaactgattaaacctgaagctagcatggtagtgtttgctgttattgcagaagccagctaaaatcaacctgcaatggtggacaccacctatgtttcacttcagcgcatctgttcatactaccacgcgtacttataatctagaaaaagccaaaagtcttgacatgttttgtttgcaacacaaaagagaatttggttacaacacaaaagagaagatttatttgcagatttagaatgtatatacatgtcacatccttttgtacaacatgtgtaagaatgaagcagcaccatgaggcttatgcgtggagaatatcattaattggttattatcttttaatttgtataggtctgtaagaacgaacctgcacattgaggcttatacgtggagagtgccataaattggttgttatattcttttctctattcctttaaaatataagttttgtgtgtcgcacaaagcacatagatctgttcttcccctcgcttctcacctaccagtaggtttttacatgagaaaccactcaagcctaacatgatagtaagtcacacgtagtgcagcgttcttacctaatactatcctgctagctgaagaaatatgagtattaggtaatcgtgctgaagaaagatgagaatatccttgatgttaactatatcttaactaggtatgatggcattaaggttcaattcagcataatcgttgaaac

SEQ ID NO: 54590 - DNA, 1490 bp, Zea Mays
attactaggtcggtggccatggcgggtcactgcaacaccatggggtgttcgccggccatggagccgccatagggcgtaggcgccgctgcctgcgcgcttgcgggtggaagaaagcatgggcgccgttgtgtgctcagccaatggctgagattagaaatgccagcgatggcgcgctgtccgccgatttgatagcgggcggtgcagattaaatgaagggtaccgggtcggtccaggggatcgcagccgttgatccatttatccacgatcaggaactgatctcccgtattttaaaatcaccaccgttggtctcttgatggacggatctgagtagttatcgagtgtttgggggctgagatctaatcacgaccataggattcagatcgggcggctcatagtgaacgataccccttcggctgtgtggattcgcataagaacccctgctctttttgcaaattaacccgccgtcctagaactatagcagagagtttaatataggcccctggtatttatagtttgaaccctggatttctcagtaatcacggctgcagtccaatccaccggtaaattaatttaattagatgcagaatccatttttagtataaaaataatgtcttaatcttggaaaaattcataacttgatgaatttaaccccgatttgatccgtttcagttgcgttattttcgtacaaatatttactacgcagtaatagcattggttgtaccatatctcatacttttatagttagatatttatttaacctatgtctactagattaactcctctcaatcaaagctaacatgtccatgattataagttgattaaaatatgatctctagtcaagtataattaaaattaaaattgaggtaattattcatagaatgatctctcatatgattcacactaatcgatttataatatagtttaatattcaaaccacatatatcttcagtaaattatagctccgtaaccgtaactccgattttagtggttctcgaactcacgatatcgtagcatcgcgtaaattattattacatggttcattcttatgtttggtgtgatgttaattttgcctatactatgtttgtctgtaatgctacgactagcgtgaggacacgtgtcacctgaagaccatcctgatacctggaatctcaagtcccaggcaagttgtgcccttgatcacttctttttacctactcatgttctgattaatcataatgatctgcataggttaattttgatgggacccaataggttaccctagtttgattatctttataccttgtttaccactgaactttttgggtagtacttgctagtgctttatgtggttttgggtatgaagatacattattcatgattacacttttattatcagtttattatttctattcatgacaagatcattatgttaattggaacatggagcgaccacccgggaaaacagtgctaccacaagggtttaatgggacgcccttggccgattaattagg

SEQ ID NO: 54591 - DNA, 915 bp, Zea Mays
aaagctagcccaaactcccatccgtgcggtcaactgctcctgctggtttctgttaccgaagattgggataggtgggacatcaaacaaatcctaacaaactcaccgctaccacctgtagtcttgggcatgagtttatctgctgccggattctccgtgccatggccggtcttccttttctcccctgccgaactcaaggtctgttgcaactatctcctgcgcatccggcggggattccgggagcaacaagaacaccgcaacaaccgcgaggaatccatcctttctccccccgtgctataaaaaccgggcgtcgtgtttcccctgctcaccaaaaccaaatccagaactctccctgggaatttggtggccgatttgccgccgcgtgggtgtggtggggcatgcgccgaacgactcctgcgtcggagctcaagcgcctcggggtctccagcaatggtatgaccatcatcggagctcgctgctcgtggatggtggcgaggcaacgtcgccagctccatcctcgtcacacccgcgcgtgaggacacgtgtcacctgaagaccatcctgatacctggaatctcaagtcccaggcaagttgtgcccttgatcacttctttttacctactcatgttctgattaatcataatgatctgcataggttaattttgatgggacccaataggttaccctagtttgattatctttataccttgtttaccactgaactttttgggtagtacttgctagtgctttatgtggttttgggtatgaagatacattattcatgattacacttttattatcagtttattatttctattcatgacaagatcattatgttaattggaacatggagcgaccacccgggaaaacagtgctaccacaagggtttaatgggacgcccttggccgattaattagg

SEQ ID NO: 54592 - DNA, 1840 bp, Zea Mays
aaaagtagagctgaaaaagaaaaaattcgggacacgatagtgctcgattttcgtctcactcacatctcccatcgatccagctcgcccccgcccgttttctcctgaaaacaaaacgaaaggctccgccatccggaaaaaaaaaccccacacaaaacccataccccctgcggcggcggcgatggacccgtcctcgtcgggctccggcggcaactccctcccgtccgttggccccgacggacagaagcggcgcgtgtgctactactacgacccggatgtgggcaactactactacgggcagggccatccgatgaagccgcaccgcatccggatgacgcactcgctgctggcgcgctacggcctcctcaaccagatgcatgtgtaccgccccagcctggccagccaacgcgacctctgtcgcttccacgccgacgactacatcaaattcctgcgctccgtcacgcccgacacgcagcaggagcagacccgcctgctcaagcgcttcaacgtcggcgaggactgccccgtcttcgacggcctctacagcttctgccagacctacgcgggcgcctcagtcggcggggccttcaggctcaaccacggccacgacattgcaatcaactggtcgggcggcctgcaccacgccaagaagtccgaggcgtcgggctactgctacgtcaacgacatcgtgctcgccatactcgagctgctcaagtaccacgagagagttctgtatgtcgacatcgatatccatcatggggatggagtggaggaggctttctacacaacagacagggttatgaccgtctcgttccacaagtttggggactatttcccaggaacaggggatatccgtgacattgggcattcaaaggggaagtactactccctgaatgcccctctagatgatgggattgatgatgaaagttaccagtcccttttcaagccaatcatgagcaaagttatggaggttttccgacctggcgcagttgtgcttcagtgtggtgctgattccttatctggggataggttgggctgcttcaacctctcaatcagaggtcatgcagaatgtgttaggtacatgaggtctttcaacgtaccattgttgctccttggtgggggtggatataccataagaaatgttgcacgctgttggtgctatgagacgggagttgctcttggccaagagcttgaagataagatgcctgccaatgagtattatggatactttgctccatattacactcttcatgtcacaccaagtaacatggagaacaaaaatacacgacaccaactggatgatataagatcaaaacttcttgataatcttagaaaacttcaacatgctcctagtgtccagtttcaagagagagttcctgatacagaagtacctgatccagacaaagatcaagatgatccagatgaacggcatgatcctgactctgatacggaagtggatgataacaaggctgtggaagcgtcagcgaggaggagcattctaggtatgaaagttaagagagaatttggtgaaaatgataccaaagtacaggtaggtatggaagttaagagagaatttggtggtgaaaatgataccaaagtacaggtaggtatgaaagttaagagaaaatttggtgaaaatgataccaaagtacaggatggtggcagagttgcatctgaacatagagtactggaacccaaggcagaagacaatggtttctccattcaagctcctattccaattcaaattcttcagagtcgtatggtggtgcagcggggaggctcttttgtggcacaagtactggttctctggtcaggtttggatgcttcgttagcaacatgggag

SEQ ID NO: 54593 - DNA, 2213 bp, Zea Mays
aaaagtagagctgaaaaagaaaaaattcgggacacgatagtgctcgattttcgtctcactcacatctcccatcgatccagctcgcccccgcccgttttctcctgaaaacaaaacgaaaggctccgccatccggaaaaaaaaaccccacacaaaacccataccccctgcggcggcggcgatggacccgtcctcgtcgggctccggcggcaactccctcccgtccgttggccccgacggacagaagcggcgcgtgtgctactactacgacccggatgtgggcaactactactacgggcagggccatccgatgaagccgcaccgcatccggatgacgcactcgctgctggcgcgctacggcctcctcaaccagatgcatgtgtaccgccccagcctggccagccaacgcgacctctgtcgcttccacgccgacgactacatcaaattcctgcgctccgtcacgcccgacacgcagcaggagcagacccgcctgctcaagcgcttcaacgtcggcgaggactgccccgtcttcgacggcctctacagcttctgccagacctacgcgggcgcctcagtcggcggggccttcaggctcaaccacggccacgacattgcaatcaactggtcgggcggcctgcaccacgccaagaagtccgaggcgtcgggctactgctacgtcaacgacatcgtgctcgccatactcgagctgctcaagtaccacgagagagttctgtatgtcgacatcgatatccatcatggggatggagtggaggaggctttctacacaacagacagggttatgaccgtctcgttccacaagtttggggactatttcccaggaacaggggatatccgtgacattgggcattcaaaggggaagtactactccctgaatgcccctctagatgatgggattgatgatgaaagttaccagtcccttttcaagccaatcatgagcaaagttatggaggttttccgacctggcgcagttgtgcttcagtgtggtgctgattccttatctggggataggttgggctgcttcaacctctcaatcagaggtcatgcagaatgtgttaggtacatgaggtctttcaacgtaccattgttgctccttggtgggggtggatataccataagaaatgttgcacgctgttggtgctatgagacgggagttgctcttggccaagagcttgaagataagatgcctgccaatgagtattatggatactttgctccatattacactcttcatgtcacaccaagtaacatggagaacaaaaatacacgacaccaactggatgatataagatcaaaacttcttgataatcttagaaaacttcaacatgctcctagtgtccagtttcaagagagagttcctgatacagaagtacctgatccagacaaagatcaagatgatccagatgaacggcatgatcctgactctgatacggaagtggatgataacaaggctgtggaagcgtcagcgaggaggagcattctaggtatgaaagttaagagagaatttggtgaaaatgataccaaagtacaggtaggtatggaagttaagagagaatttggtggtgaaaatgataccaaagtacaggatggtggcagagttgcatctgaacatagagtactggaacccaaggcagaagacaatggtttctccattcaagctcctcatgtgtgtgccagggcaatggctgtcgatgagccgagcaatgttaagaatgaacctgagggcaactaaactgcaagaccaagcagctgcgcaccacaaaccataactgcggcatcaagacttgctgcccacaaaccataccgtgtttttacaagacaacttcctgcgtgctttggacagcccaaagaccaaagtgaatctgcaaaacgttcctgccatttcaaatttgacttagctatatgttagcactaatgattacatgacggtagtgaagattccaagagagcccacctgggattgcttgcggtttacattgacggtagtctgacccatgtatacatgaagcctatgagttgagttgtacagccattagtcaatgcaaatatgcagtgaacgtgagggtaattctttgcgtgttcttgatgtttttgaccttttttgggcgcaacgcaagcaaagtaggcagttgctgtgccacaaatctgccgagtttggagaatgctgatgcaaatgcatgtgctatctgcctggtttt

SEQ ID NO: 54594 - DNA, 4658 bp, Zea Mays
cgagaagtaacggcgatccgaatcgattaatactcagctgaggatctccaaccacacgacatatgtagcacttaacccttgcatatgtcaactcgcccacaggtttctcaagaccagaacgggttcacgcgacccgagagcacagtactccaccgtccagccattggcctggttggtacacgttactctcgccatggtgcccgccatgtttccgagagtacagcaccccaccttccagtctcttgccacggagggtacaagctactctcgccatcgctccactcccagtgcgtgcgagctgttctggtattggtccgaccgaggctaagcttacccatgatgaggcatgtggccagttaaagggtcctagaccagcagaccaacaatcggaacggtccttaagcgacacagacgggcgacctttcctgctcaacgtctggtctcatcttattatttaacacccaaaccatgtacctgacagaggtaccatacttgaatgatgaattcatcactgcagatgatgcgctcaacattacaagtcctttttcataaaacaaacccatacccagtgtcacacatcattcttttaaaaagaaacaaattttaattctctaggcagggctaagcctcattagttctttttataaaacaggtatcaaggaggataatcaaattccaaggaatggcaatgtatcaagtgtttcatcactcaactcctatcacctaatgcagcatataagtgataaaagttttaaaacaacaaggaggtggcaaatgcaccggggcttgcctgggataacactacgttagtgttgttaaatgacgaccacttggtgagcatcttccatcctggcacttgattgattcatccactttagcttcgtccatcagcatcgtcttatgattaatccagctcttgtgctccacatcacgtgattaattaacgtacctagatgatatgcataatgcatatgagtgaataggagcataaatagcacaagatagataagttatactaaggaggatacagacttaaagcaagacatcacaattcttaggtgtaacaactagatatatttaactctacatcagacatgacgttctagtcaattggacctaaacacatcatcaagtaacattagcaatatacaaatcctaatatatttagaataaatataacactgatgtaccacaatatttaaaaacaattactatatgttgacatatcactatgtatcacaattacatttttttcatttaaacggatcgaactcaagcatcaaaaaggctacatataactccaacctcatgaactagaatatcctaccgaatgattaacaccactcttagtactaaggaacaactcattattaacaagcatagaattttatagtatagtatttatcttaatttaaaggtttaaaacacttatatgcataaacactagatacttctgactttatacaatcatgaactttgaggtaatcggacctaatccaaacattatgtaacaataactaaacacattaaacatgagacacatgttcacttgaggttagctacttcaagacttcaccaatcaagaaccaagaactaattaatcctatctagccaagcaagaatgattctaagtaatcagtttaacgtgtgcagattttctggacagcagcacagtagtcaattgttttattcataactcacaaaatatgcatccaaaaatagtaaactaagactttttggaaagcttataaagtcctctacaactttggtattatcatcataatgagattcgacagtttaaaaggtcaaacagtgctaaactttaattatgtccagatttggacagaattcgactacttacttcaaaaatccataactggagtttcagaaatccaaatcaggcgatcctagactttttagaaagctaatagaattgtctataattcatttataatcatcccaggttaatttaatgtgtatctaagtcagttaatacaaacagtctcttctgtccagatttggacagattcagacttcatatttcaaacagctataacttgacttctagaccaccaaaatgggtgatccaaaatttattggaaagcttaagaaaattactacaattattctataattactaagggctgattctcagtttaatttagtcaaacaaggcaattttcgaaatcagtacagaatttagacagatttagaaactggacttggaaaaatcataacttctaaactgctaagcctatggtcatgaaacttttacacaattaagataaagaagttatctacaactttcctatataacatttctacagaaaacatggtttacttcattgaactagtggcataactaaaactagtcatgcagtccaaatagcaagcactaaatatgccatgagaaggacaacgctataagaagttttaggaagaacaaagctacaaaacagccaacgtatagtctgtgtagatagtgcaatatgaaaatcatacatattagatgttaatatactattgtcaccctcaatgcctaaaccactatgtaaggcaggcaacatctatcctattgtgaaattaatctaaccaaaccaccgtcacaacaagatgagtgaacatagcaatttggagatatgagagaattacaaaaacagaaacaatcacattattccagcttgcatccagattgcccaacactaccatggaccacatatcaacacgtatatgaactacactgcatgaatatgaacccgaaggagccaatttgaatctagacactatcaacagcaggattcctgctagcaaattattaatatatcttgcatcgttaaaacatagaggaacaaacaaacttgctcagctgcagatcatgaacatatgagattctcagagaaaaaagaattatacaacaaagaaaggaaaacatagtcaaatgagacgtattgagatcataaacatctcactagtgtttctatcgctaccaggatgggaccaactgagcaagtattaaaattacaaccccacaacctaccaggttctctatcaaatgacgttgattaatttaattctaaactatagctacagctcctccatgcaatacagtaacaactaagagatggctaaaatcatgccaagaataccttatacatatttgcaatatttcaaagtcaagtccctttgcaagaatacaaatcacaaaagtcaaactaccacaatcatgtttttgcacccaactacgatatttcatcaattatctaatacactaacaacgacatgaacataaaagggaagagggagtgccttcccttacgatgccatggaattgacacaaacaacaacaaagacctagaagctatcaccaccgcacacctaggcaatggacaagagaatcatggaccaatatatctattcattaaggtagtgaacaaaatgagtaaaacaacttaccatggacccagatgactctgacagggaggacacaacaacgattccaggttcagcctttttatcaaacacttgacaagcgccacactaaagctttcttctcctcatcaggactacagagatccagcatgctactgctgtaccacaactgggctagtgctgacgtgagaggtgagggccaggggagccatgggggcggctggaggacaggcgctggtgcgagattgggaaagggagcgagaagacgcggctgctgcaggtgatgccgttagggagcaggggcgagctgagcatggggagcagatgtgacgacctgtttgctgttggggtagggcatcacggcggggacgactgactccaagagcagtgaggggaaacgacggccggttgcaggaagggacgacaccagccacgggagagggtctgcgcagggagggatccagggggagccgccatggggagaggaggagataggggcgagttgcaggtggaggagagcgcggctgtgagggagagcgctgggagacggagcttgggcgagctccatgcctgggagctgagggcgagtgcaagcaggcagggagagagagcgatgtgagcgagtttggcttcttcacgtaggaatagagaggagataaggctagaagacataagcggtggaaaggatgaggaggattcagatttttgtttctccaaacacttaacaaaaggaaaaaaaatgcagatattttaagtctgaaatctggtaattcattcgcagtctgaacagggaaacaaattaattacaagtactcaatatcggctctaatctcggtctgatttaatttttgcatcaatattgttgtcgtcgagttctaataatatttgcttggaccaaaatcgcaagagtgagtcgagattccaaattaatgttccattaatccataattttaaacgaagtttaagaaaccggattcgatttcaaagattagagtttgggcaagacgtcgatggctcaacccaaacgatactggattcgatgttccgaaaattaccaaagtctgaattttacaaaataaattaggtcaatttagacagatggagatagacacgatatcaaaatcgtgataaacgaggttgattaaaaattagtgacctttacattcacaactatcacgtgttaacgtccgcactagtggtcgagcagacgataaacacctggggtgtta

SEQ ID NO: 54595 - DNA, 709 bp, Zea Mays
gaaaatttagcgcattcgatggaagaggctgacgttttgtgcgaccggatcgggatcatcgcgaatggtagcttgcagtgcattggaagctctaaggagctgaaagacaggtacggaggctcatgcctgctcacagtaacaactccggccggcggccaggaggaggaggaggtcgagaggctggtgcagtccatctcgccggcggcgaacagggtgtaccgcgtctcgggaacacagaagttcgagatgccgaagcgggggatgaagatctccgcggttttccaggccatggagcaggcgaagagcagcctggacatcgtcgcctggggcctggctgacaccacgctggaagacgtcttcgttcgagtggccaagcagactgacatgtccactgtgacctgactgaatacctcaggtgatgaactcatgaacgcgagacgcgacacagatttgagcagcctggacttttgcaaaacctcggtaaatgcggtcaggcgcaagcaagcggatcccacggcacgatcgagcgtgcgcgtcaggagcatctgccgcgtgtttcatttccacgcgtgagctagctgctagtagacattgcacctgcacaaccctatagaaaaaaccaatggattcgagttgagtcattttcactgtgtatcattataaaagtttataattattgtgagaatgtctacattacagaagctgtcgc

SEQ ID NO: 54596 - DNA, 3214 bp, Zea Mays
gcatactcttctcggcttctccaagcgcgaacaagagccatgggcgcgagccgtctggagcaaaccgatgctctcttcaggaaaaaccttgtaatccagaggcgcgcctgcaagacgaactgctgcctgatcctgttcccgctggccctctgctccgtcatcggcggcttacagatcgccatcaaccacgcgtcgtcgcaggggggaggaggaggaggaggaggagggggtgcgacccctgccatccgtctcgactgcagctgcagcaacgtcagcgtagacgagaacgcgctcggaggcatacaatgcccggacgagtgcccgttgcctcgagcgcccaaatggcctcctgtcgtcaggaccccgtcgcccgagtaccgggcggtccaggacgggctcttcccgttcgctgatctcccggacgcttcgtgcagagccgaagggtcttgcccggcgacattccttgtcaccggcgacaaccactctttcgtagggagtgtgatagataacattcttcctacccatagttcttcggtgaacctgtcggccgatgtttctgcattgtctgattttgttctggctgacgatggagaatttcaccaaagttttcttcagaacaagtgctctcctaacttgacactctcttatccagttcaatacggcaataatgttgtgagtcaagacgtacgatgcacagaaggactagttctctggcgggacagttcacggctaattaatgatgagttatatggaggttattaccaaggaaataggaaccataagatcgatgaaattgctgcagtctatgatttcttaagctctgaccagagcaacttcaacctgatcatctcatataactcgacaaacgactacggtgtttacgatgaatcagaacaatctatccctgtgattaatcaagcaggcccagtgcagaaacctaatttggttcaagtcccacgattagctaatatggcctcaaatgcataccttcatttaaagggcaatggtttgaagatgccatttgaattcgtaaaagaaatgcctagagcagctatacctatacacgatggccagtttgatttggctccatacatagggcagctaccttttgtatggaccatggagcttctttttccggtaattttgacaaaccttgtgtacgagagacagaataagctaaggataatgatgaagatgcatggccttggagatctaccgtattggactatatcctattgctattttctactgttgtcgctgctctatgtgctgtccttcgtgctgtttggttctgcccttggtttaacattcttccgccagaacaactacggcatgcagtttatattctattttgcttacatgaacttgcaaatttcatttgcatttcttatgacaacatacttctctagtgtgaggacagctactgtgacaggatatctatacatatttgtgtctggccttctgtcacaattcatgttcagaccctatgttgaagatagtaacatctcaagaatctggatcactcttatggaacttctacctgcattttccttataccgcattgtctacgaattctcacgatttgcacaagcacagcctgagaattacatggcctcctcagggattcagtgggctgatatgactaatccagaaagtggattggcaggtgtgcttaccattatggcagtagaatggctcctgttccttttatttgcgttctatctggatcacttccgttcctacaaagacggaatcaggaaagcagcagcgcttgttcgctcccgcatacatgggaaccattctgaagctgctcagcagcaaaacgtacagcttcaggagttcagagcttccatccaactggagagaacagacgtgctgaaagagagagagatagttgaactgatatcaaaagaatccgacagaagctattcagtcatatgcgacaaccttgggaaggtgtaccgtggaaaagatggaaatgcagataaaattgcagtcagaggaatatccatttccatgtcacgcggtcagtgcttcggcgttcttggcccaaatggcgcgggaaagaccactcttattaacatgctgaccggattttgtaaacctacctctggcaccgcgtacgtccaagggatggacatacgcttcgatatggacagaatatatacaggaattggtgtttgtccacaggatgacttgctatgggaaagcctgactggtcgtgagcatctgttgttctatggaaggcttaagaaactgaaggctgcagcactattcgaggccattgaacaatccttgagaagcatgcacttgcttgccggtggcgttgctgacaaactcgtgggaaaatacagtggcggcatgaagcgtcgtctcagcgttgcgatctctctaatcggtgatcccaaggttgtttatatggatgaaccaagttctggcctggacccagcgtcgaggaaaaacctgtggaaggctgtcaagtctgcaaaacaggatcggacaatagttctcacaacgcattcgatggaagaggctgacgttttgtgcgaccggatcgggatcatcgcgaatggtagcttgcagtgcattggaagctctaaggagctgaaagacaggtacggaggctcatgcctgctcacagtaacaactccggccggcggccaggaggaggaggaggtcgagaggctggtgcagtccatctcgccggcggcgaacagggtgtaccgcgtctcgggaacacagaagttcgagatgccgaagcgggggatgaagatctccgcggttttccaggccatggagcaggcgaagagcagcctggacatcgtcgcctggggcctggctgacaccacgctggaagacgtcttcgttcgagtggccaagcagactgacatgtccactgtgacctgactgaatacctcaggtgatgaactcatgaacgcgagacgcgacacagatttgagcagcctggacttttgcaaaacctcggtaaatgcggtcaggcgcaagcaagcggatcccacggcacgatcgagcgtgcgcgtcaggagcatctgccgcgtgtttcatttccacgcgtgagctagctgctagtagacattgcacctgcacaaccctatagaaaaaaccaatggattcgagttgagtcattttcactgtgtatcattataaaagtttataattattgtgagaatgtctacattacagaagctgtcgc

SEQ ID NO: 54597 - DNA, 2995 bp, Zea Mays
caccagagcatactcttctcggcttctccaagcgcgaacaagagccatgggcgcgagccgtctggagcaaaccgatgctctcttcaggaaaaaccttgtaatccagaggcgcgcctgcaagacgaactgctgcctgatcctgttcccgctggccctctgctccgtcatcggcggcttacagatcgccatcaaccacgcgtcgtcgcaggggggaggaggaggaggaggaggagggggtgcgacccctgccatccgtctcgactgcagctgcagcaacgtcagcgtagacgagaacgcgctcggaggcatacaatgcccggacgagtgcccgttgcctcgagcgcccaaatggcctcctgtcgtcaggaccccgtcgcccgagtaccgggcggtccaggacgggctcttcccgttcgctgatctcccggacgcttcgtgcagagccgaagggtcttgcccggcgacattccttgtcaccggcgacaaccactctttcgtagggagtgtgatagataacattcttcctacccatagttcttcggtgaacctgtcggccgatgtttctgcattgtctgattttgttctggctgacgatggagaatttcaccaaagttttcttcagaacaagtgctctcctaacttgacactctcttatccagttcaatacggcaataatgttgtgagtcaagtctatgatttcttaagctctgaccagagcaacttcaacctgatcatctcatataactcgacaaacgactacggtgtttacgatgaatcagaacaatctatccctgtgattaatcaagcaggcccagtgcagaaacctaatttggttcaagtcccacgattagctaatatggcctcaaatgcataccttcatttaaagggcaatggtttgaagatgccatttgaattcgtaaaagaaatgcctagagcagctatacctatacacgatggccagtttgatttggctccatacatagggcagctaccttttgtatggaccatggagcttctttttccggtaattttgacaaaccttgtgtacgagagacagaataagctaaggataatgatgaagatgcatggccttggagatctaccgtattggactatatcctattgctattttctactgttgtcgctgctctatgtgctgtccttcgtgctgtttggttctgcccttggtttaacattcttccgccagaacaactacggcatgcagtttatattctattttgcttacatgaacttgcaaatttcatttgcatttcttatgacaacatacttctctagtgtgaggacagctactgtgacaggatatctatacatatttgtgtctggccttctgtcacaattcatgttcagaccctatgttgaagatagtaacatctcaagaatctggatcactcttatggaacttctacctgcattttccttataccgcattgtctacgaattctcacgatttgcacaagcacagcctgagaattacatggcctcctcagggattcagtgggctgatatgactaatccagaaagtggattggcaggtgtgcttaccattatggcagtagaatggctcctgttccttttatttgcgttctatctggatcacttccgttcctacaaagacggaatcaggaaagcagcagcgcttgttcgctcccgcatacatgggaaccattctgaagctgctcagcagcaaaacgtacagcttcaggagttcagagcttccatccaactggagagaacagacgtgctgaaagagagagagatagttgaactgatatcaaaagaatccgacagaagctattcagtcatatgcgacaaccttgggaaggtgtaccgtggaaaagatggaaatgcagataaaattgcagtcagaggaatatccatttccatgtcacgcggtcagtgcttcggcgttcttggcccaaatggcgcgggaaagaccactcttattaacatgctgaccggattttgtaaacctacctctggcaccgcgtacgtccaagggatggacatacgcttcgatatggacagaatatatacaggaattggtgtttgtccacaggatgacttgctatgggaaagcctgactggtcgtgagcatctgttgttctatggaaggcttaagaaactgaaggctgcagcactattcgaggccattgaacaatccttgagaagcatgcacttgcttgccggtggcgttgctgacaaactcgtgggaaaatacagtggcggcatgaagcgtcgtctcagcgttgcgatctctctaatcggtgatcccaagcgcattcgatggaagaggctgacgttttgtgcgaccggatcgggatcatcgcgaatggtagcttgcagtgcattggaagctctaaggagctgaaagacaggtacggaggctcatgcctgctcacagtaacaactccggccggcggccaggaggaggaggaggtcgagaggctggtgcagtccatctcgccggcggcgaacagggtgtaccgcgtctcgggaacacagaagttcgagatgccgaagcgggggatgaagatctccgcggttttccaggccatggagcaggcgaagagcagcctggacatcgtcgcctggggcctggctgacaccacgctggaagacgtcttcgttcgagtggccaagcagactgacatgtccactgtgacctgactgaatacctcaggtgatgaactcatgaacgcgagacgcgacacagatttgagcagcctggacttttgcaaaacctcggtaaatgcggtcaggcgcaagcaagcggatcccacggcacgatcgagcgtgcgcgtcaggagcatctgccgcgtgtttcatttccacgcgtgagctagctgctagtagacattgcacctgcacaaccctatagaaaaaaccaatggattcgagttgagtcattttcactgtgtatcattataaaagtttataattattgtgagaatgtctacattacagaagctgtcgc

SEQ ID NO: 54598 - DNA, 3097 bp, Zea Mays
cgacaaactgcaagcgctcggccggctcaacaaagccagttgcctcagcataggagagtgcagcaccactgcaccagagcatactcttctcggcttctccaagcgcgaacaagagccatgggcgcgagccgtctggagcaaaccgatgctctcttcaggaaaaaccttgtaatccagaggcgcgcctgcaagacgaactgctgcctgatcctgttcccgctggccctctgctccgtcatcggcggcttacagatcgccatcaaccacgcgtcgtcgcaggggggaggaggaggaggaggaggagggggtgcgacccctgccatccgtctcgactgcagctgcagcaacgtcagcgtagacgagaacgcgctcggaggcatacaatgcccggacgagtgcccgttgcctcgagcgcccaaatggcctcctgtcgtcaggaccccgtcgcccgagtaccgggcggtccaggacgggctcttcccgttcgctgatctcccggacgcttcgtgcagagccgaagggtcttgcccggcgacattccttgtcaccggcgacaaccactctttcgtagggagtgtgatagataacattcttcctacccatagttcttcggtgaacctgtcggccgatgtttctgcattgtctgattttgttctggctgacgatggagaatttcaccaaagttttcttcagaacaagtgctctcctaacttgacactctcttatccagttcaatacggcaataatgttgtgagtcaagtctatgatttcttaagctctgaccagagcaacttcaacctgatcatctcatataactcgacaaacgactacggtgtttacgatgaatcagaacaatctatccctgtgattaatcaagcaggcccagtgcagaaacctaatttggttcaagtcccacgattagctaatatggcctcaaatgcataccttcatttaaagggcaatggtttgaagatgccatttgaattcgtaaaagaaatgcctagagcagctatacctatacacgatggccagtttgatttggctccatacatagggcagctaccttttgtatggaccatggagcttctttttccggtaattttgacaaaccttgtgtacgagagacagaataagctaaggataatgatgaagatgcatggccttggagatctaccgtattggactatatcctattgctattttctactgttgtcgctgctctatgtgctgtccttcgtgctgtttggttctgcccttggtttaacattcttccgccagaacaactacggcatgcagtttatattctattttgcttacatgaacttgcaaatttcatttgcatttcttatgacaacatacttctctagtgtgaggacagctactgtgacaggatatctatacatatttgtgtctggccttctgtcacaattcatgttcagaccctatgttgaagatagtaacatctcaagaatctggatcactcttatggaacttctacctgcattttccttataccgcattgtctacgaattctcacgatttgcacaagcacagcctgagaattacatggcctcctcagggattcagtgggctgatatgactaatccagaaagtggattggcaggtgtgcttaccattatggcagtagaatggctcctgttccttttatttgcgttctatctggatcacttccgttcctacaaagacggaatcaggaaagcagcagcgcttgttcgctcccgcatacatgggaaccattctgaagctgctcagcagcaaaacgtacagcttcaggagttcagagcttccatccaactggagagaacagacgtgctgaaagagagagagatagttgaactgatatcaaaagaatccgacagaagctattcagtcatatgcgacaaccttgggaaggtgtaccgtggaaaagatggaaatgcagataaaattgcagtcagaggaatatccatttccatgtcacgcggtcagtgcttcggcgttcttggcccaaatggcgcgggaaagaccactcttattaacatgctgaccggattttgtaaacctacctctggcaccgccttgctatgggaaagcctgactggtcgtgagcatctgttgttctatggaaggcttaagaaactgaaggctgcagcactattcgaggccattgaacaatccttgagaagcatgcacttgcttgccggtggcgttgctgacaaactcgtgggaaaatacagtggcggcatgaagcgtcgtctcagcgttgcgatctctctaatcggtgatcccaaggttgtttatatggatgaaccaagttctggcctggacccagcgtcgaggaaaaacctgtggaaggctgtcaagtctgcaaaacaggatcggacaatagttctcacaacgcattcgatggaagaggctgacgttttgtgcgaccggatcgggatcatcgcgaatggtagcttgcagtgcattggaagctctaaggagctgaaagacaggtacggaggctcatgcctgctcacagtaacaactccggccggcggccaggaggaggaggaggtcgagaggctggtgcagtccatctcgccggcggcgaacagggtgtaccgcgtctcgggaacacagaagttcgagatgccgaagcgggggatgaagatctccgcggttttccaggccatggagcaggcgaagagcagcctggacatcgtcgcctggggcctggctgacaccacgctggaagacgtcttcgttcgagtggccaagcagactgacatgtccactgtgacctgactgaatacctcaggtgatgaactcatgaacgcgagacgcgacacagatttgagcagcctggacttttgcaaaacctcggtaaatgcggtcaggcgcaagcaagcggatcccacggcacgatcgagcgtgcgcgtcaggagcatctgccgcgtgtttcatttccacgcgtgagctagctgctagtagacattgcacctgcacaaccctatagaaaaaaccaatggattcgagttgagtcattttcactgtgtatcattataaaagtttataattattgtgagaatgtctacattacagaagctgtcgc

SEQ ID NO: 54599 - DNA, 3172 bp, Zea Mays
cgacaaactgcaagcgctcggccggctcaacaaagccagttgcctcagcataggagagtgcagcaccactgcaccagagcatactcttctcggcttctccaagcgcgaacaagagccatgggcgcgagccgtctggagcaaaccgatgctctcttcaggaaaaaccttgtaatccagaggcgcgcctgcaagacgaactgctgcctgatcctgttcccgctggccctctgctccgtcatcggcggcttacagatcgccatcaaccacgcgtcgtcgcaggggggaggaggaggaggaggaggagggggtgcgacccctgccatccgtctcgactgcagctgcagcaacgtcagcgtagacgagaacgcgctcggaggcatacaatgcccggacgagtgcccgttgcctcgagcgcccaaatggcctcctgtcgtcaggaccccgtcgcccgagtaccgggcggtccaggacgggctcttcccgttcgctgatctcccggacgcttcgtgcagagccgaagggtcttgcccggcgacattccttgtcaccggcgacaaccactctttcgtagggagtgtgatagataacattcttcctacccatagttcttcggtgaacctgtcggccgatgtttctgcattgtctgattttgttctggctgacgatggagaatttcaccaaagttttcttcagaacaagtgctctcctaacttgacactctcttatccagttcaatacggcaataatgttgtgagtcaagtctatgatttcttaagctctgaccagagcaacttcaacctgatcatctcatataactcgacaaacgactacggtgtttacgatgaatcagaacaatctatccctgtgattaatcaagcaggcccagtgcagaaacctaatttggttcaagtcccacgattagctaatatggcctcaaatgcataccttcatttaaagggcaatggtttgaagatgccatttgaattcgtaaaagaaatgcctagagcagctatacctatacacgatggccagtttgatttggctccatacatagggcagctaccttttgtatggaccatggagcttctttttccggtaattttgacaaaccttgtgtacgagagacagaataagctaaggataatgatgaagatgcatggccttggagatctaccgtattggactatatcctattgctattttctactgttgtcgctgctctatgtgctgtccttcgtgctgtttggttctgcccttggtttaacattcttccgccagaacaactacggcatgcagtttatattctattttgcttacatgaacttgcaaatttcatttgcatttcttatgacaacatacttctctagtgtgaggacagctactgtgacaggatatctatacatatttgtgtctggccttctgtcacaattcatgttcagaccctatgttgaagatagtaacatctcaagaatctggatcactcttatggaacttctacctgcattttccttataccgcattgtctacgaattctcacgatttgcacaagcacagcctgagaattacatggcctcctcagggattcagtgggctgatatgactaatccagaaagtggattggcaggtgtgcttaccattatggcagtagaatggctcctgttccttttatttgcgttctatctggatcacttccgttcctacaaagacggaatcaggaaagcagcagcgcttgttcgctcccgcatacatgggaaccattctgaagctgctcagcagcaaaacgtacagcttcaggagttcagagcttccatccaactggagagaacagacgtgctgaaagagagagagatagttgaactgatatcaaaagaatccgacagaagctattcagtcatatgcgacaaccttgggaaggtgtaccgtggaaaagatggaaatgcagataaaattgcagtcagaggaatatccatttccatgtcacgcggtcagtgcttcggcgttcttggcccaaatggcgcgggaaagaccactcttattaacatgctgaccggattttgtaaacctacctctggcaccgcgtacgtccaagggatggacatacgcttcgatatggacagaatatatacaggaattggtgtttgtccacaggatgacttgctatgggaaagcctgactggtcgtgagcatctgttgttctatggaaggcttaagaaactgaaggctgcagcactattcgaggccattgaacaatccttgagaagcatgcacttgcttgccggtggcgttgctgacaaactcgtgggaaaatacagtggcggcatgaagcgtcgtctcagcgttgcgatctctctaatcggtgatcccaaggttgtttatatggatgaaccaagttctggcctggacccagcgtcgaggaaaaacctgtggaaggctgtcaagtctgcaaaacaggatcggacaatagttctcacaacgcattcgatggaagaggctgacgttttgtgcgaccggatcgggatcatcgcgaatggtagcttgcagtgcattggaagctctaaggagctgaaagacaggtacggaggctcatgcctgctcacagtaacaactccggccggcggccaggaggaggaggaggtcgagaggctggtgcagtccatctcgccggcggcgaacagggtgtaccgcgtctcgggaacacagaagttcgagatgccgaagcgggggatgaagatctccgcggttttccaggccatggagcaggcgaagagcagcctggacatcgtcgcctggggcctggctgacaccacgctggaagacgtcttcgttcgagtggccaagcagactgacatgtccactgtgacctgactgaatacctcaggtgatgaactcatgaacgcgagacgcgacacagatttgagcagcctggacttttgcaaaacctcggtaaatgcggtcaggcgcaagcaagcggatcccacggcacgatcgagcgtgcgcgtcaggagcatctgccgcgtgtttcatttccacgcgtgagctagctgctagtagacattgcacctgcacaaccctatagaaaaaaccaatggattcgagttgagtcattttcactgtgtatcattataaaagtttataattattgtgagaatgtctacattacagaagctgtcgc

SEQ ID NO: 54600 - DNA, 2233 bp, Zea Mays
taggagagtgcagcaccactgcaccagagcatactcttctcggcttctccaagcgcgaacaagagccatgggcgcgagccgtctggagcaaaccgatgctctcttcaggaaaaaccttgtaatccagaggcgcgcctgcaagacgaactgctgcctgatcctgttcccgctggccctctgctccgtcatcggcggcttacagatcgccatcaaccacgcgtcgtcgcaggggggaggaggaggaggaggaggagggggtgcgacccctgccatccgtctcgactgcagctgcagcaacgtcagcgtagacgagaacgcgctcggaggcatacaatgcccggacgagtgcccgttgcctcgagcgcccaaatggcctcctgtcgtcaggaccccgtcgcccgagtaccgggcggtccaggacgggctcttcccgttcgctgatctcccggacgcttcgtgcagagccgaagggtcttgcccggcgacattccttgtcaccggcgacaaccactctttcgtagggagtgtgatagataacattcttcctacccatagttcttcggtgaacctgtcggccgatgtttctgcattgtctgattttgttctggctgacgatggagaatttcaccaaagttttcttcagaacaagtgctctcctaacttgacactctcttatccagttcaatacggcaataatgttgtgagtcaagtctatgatttcttaagctctgaccagagcaacttcaacctgatcatctcatataactcgacaaacgactacggtgtttacgatgaatcagaacaatctatccctgtgattaatcaagcaggcccagtgcagaaacctaatttggttcaagtcccacgattagctaatatggcctcaaatgcataccttcatttaaagggcaatggtttgaagatgccatttgaattcgtaaaagaaatgcctagagcagctatacctatacacgatggccagtttgatttggctccatacatagggcagctaccttttgtatggaccatggagcttctttttccggtaattttgacaaaccttgtgtacgagagacagaataagctaaggataatgatgaagatgcatggccttggagatctaccgtattggactatatcctattgctattttctactgttgtcgctgctctatgtgctgtccttcgtgctgtttggttctgcccttggtttaacattcttccgccagaacaactacggcatgcagtttatattctattttgcttacatgaacttgcaaatttcatttgcatttcttatgacaacatacttctctagtgtgaggacagctactgtgacaggatatctatacatatttgtgtctggccttctgtcacaattcatgttcagaccctatgttgaagatagtaacatctcaagaatctggatcactcttatggaacttctacctgcattttccttataccgcattgtctacgaattctcacgatttgcacaagcacagcctgagaattacatggcctcctcagggattcagtgggctgatatgactaatccagaaagtggattggcaggtgtgcttaccattatggcagtagaatggctcctgttccttttatttgcgttctatctggatcacttccgttcctacaaagacggaatcaggaaagcagcagcgcttgttcgctcccgcatacatgggaaccattctgaagctgctcagcagcaaaacgtacagcttcaggagttcagagcttccatccaactggagagaacagacgtgctgaaagagagagagatagttgaactgatatcaaaagaatccgacagaagctattcagtcatatgcgacaaccttgggaaggtgtaccgtggaaaagatggaaatgcagataaaattgcagtcagaggaatatccatttccatgtcacgcggtcagtgcttcggcgttcttggcccaaatggcgcgggaaagaccactcttattaacatgctgaccggattttgtaaacctacctctggcaccgccttgctatgggaaagcctgactggtcgtgagcatctgttgttctatggaaggcttaagaaactgaaggctgcagcactattcgaggatgagtgtcaagtactttaatggatgacaacttcaggctattggatgttgaaatttcactgcgagtttcactgcgagaaccctaagataccttttcagagcgagggaagggagatccac

SEQ ID NO: 54601 - DNA, 2809 bp, Zea Mays
gcttctccaagcgcgaacaagagccatgggcgcgagccgtctggagcaaaccgatgctctcttcaggaaaaaccttgtaatccagaggcgcgcctgcaagacgaactgctgcctgatcctgttcccgctggccctctgctccgtcatcggcggcttacagatcgccatcaaccacgcgtcgtcgcaggggggaggaggaggaggaggaggagggggtgcgacccctgccatccgtctcgactgcagctgcagcaacgtcagcgtagacgagaacgcgctcggaggcatacaatgcccggacgagtgcccgttgcctcgagcgcccaaatggcctcctgtcgtcaggaccccgtcgcccgagtaccgggcggtccaggacgggctcttcccgttcgctgatctcccggacgcttcgtgcagagccgaagggtcttgcccggcgacattccttgtcaccggcgacaaccactctttcgtagggagtgtgatagataacattcttcctacccatagttcttcggtgaacctgtcggccgatgtttctgcattgtctgattttgttctggctgacgatggagaatttcaccaaagttttcttcagaacaagtgctctcctaacttgacactctcttatccagttcaatacggcaataatgttgtgagtcaagtctatgatttcttaagctctgaccagagcaacttcaacctgatcatctcatataactcgacaaacgactacggtgtttacgatgaatcagaacaatctatccctgtgattaatcaagcaggcccagtgcagaaacctaatttggttcaagtcccacgattagctaatatggcctcaaatgcataccttcatttaaagggcaatggtttgaagatgccatttgaattcgtaaaagaaatgcctagagcagctatacctatacacgatggccagtttgatttggctccatacatagggcagctaccttttgtatggaccatggagcttctttttccggtaattttgacaaaccttgtgtacgagagacagaataagctaaggataatgatgaagatgcatggccttggagatctaccgtattggactatatcctattgctattttctactgttgtcgctgctctatgtgctgtccttcgtgctgtttggttctgcccttggtttaacattcttccgccagaacaactacggcatgcagtttatattctattttgcttacatgaacttgcaaatttcatttgcatttcttatgacaacatacttctctagtgtgaggacagctactgtgacaggatatctatacatatttgtgtctggccttctgtcacaattcatgttcagaccctatgttgaagatagtaacatctcaagaatctggatcactcttatggaacttctacctgcattttccttataccgcattgtctacgaattctcacgatttgcacaagcacagcctgagaattacatggcctcctcagggattcagtgggctgatatgactaatccagaaagtggattggcaggtgtgcttaccattatggcagtagaatggctcctgttccttttatttgcgttctatctggatcacttccgttcctacaaagacggaatcaggaaagcagcagcgcttgttcgctcccgcatacatgggaaccattctgaagctgctcagcagcaaaacgtacagcttcaggagttcagagcttccatccaactggagagaacagacgtgctgaaagagagagagatagttgaactgatatcaaaagaatccgacagaagctattcagtcatatgcgacaaccttgggaaggtgtaccgtggaaaagatggaaatgcagataaaattgcagtcagaggaatatccatttccatgtcacgcggtcagtgcttcggcgttcttggcccaaatggcgcgggaaagaccactcttattaacatgctgaccggattttgtaaacctacctctggcaccgccttgctatgggaaagcctgactggtcgtgagcatctgttgttctatggaaggcttaagaaactgaaggctgcagcactattcgagcagcgcatcagaaaaactctcaccgtcagccgttaccgtttgccgtcacctgcagttgggccccacacgccacatcccaaaatccccaatcgaacaacagagggaaatccatcgcaaaaatccttgtgccgccgccctaggttcccgtcgccgctggtggtcgccgtcgccgtggaggcgcgcggcgctgcccctgccgtggccccagacgccctcggccacgcggctgctcctcgcccggagcccggtagacatcgccgccgctggtggtcgccgtggaggcgcgcggcgctgcccctgccgtggctccagactggaatcgccgctctgctcaccttggcctgcgaggcgcgcggcgcagctgctcctgtcgtggccctcgggacgagccgctgctcaccatggtctgctaggcgcgcggcgcagttgctctccagaagctgacccgcggagctcgctcgtcggccacgcgacgctcctcaccctcggctgcgaacctcctcactttggagccactacttatgaaaaacttatgtcaaaataagaaaaaactttttgagagtgcatggtgatataataattgttgtaccactacttacgaaaacatgtggatggtgtagtggtgaggtgctgtactactatcctaaaggttctaggtttgactccttgaagtcctcttttttttttccatttttttccatttttttatttgggcttgctgaaggtattgttcacaca

SEQ ID NO: 54602 - DNA, 3110 bp, Zea Mays
gcatactcttctcggcttctccaagcgcgaacaagagccatgggcgcgagccgtctggagcaaaccgatgctctcttcaggaaaaaccttgtaatccagaggcgcgcctgcaagacgaactgctgcctgatcctgttcccgctggccctctgctccgtcatcggcggcttacagatcgccatcaaccacgcgtcgtcgcaggggggaggaggaggaggaggaggagggggtgcgacccctgccatccgtctcgactgcagctgcagcaacgtcagcgtagacgagaacgcgctcggaggcatacaatgcccggacgagtgcccgttgcctcgagcgcccaaatggcctcctgtcgtcaggaccccgtcgcccgagtaccgggcggtccaggacgggctcttcccgttcgctgatctcccggacgcttcgtgcagagccgaagggtcttgcccggcgacattccttgtcaccggcgacaaccactctttcgtagggagtgtgatagataacattcttcctacccatagttcttcggtgaacctgtcggccgatgtttctgcattgtctgattttgttctggctgacgatggagaatttcaccaaagttttcttcagaacaagtgctctcctaacttgacactctcttatccagttcaatacggcaataatgttgtgagtcaagacgtacgatgcacagaaggactagttctctggcgggacagttcacggctaattaatgatgagttatatggaggttattaccaaggaaataggaaccataagatcgatgaaattgctgcagtctatgatttcttaagctctgaccagagcaacttcaacctgatcatctcatataactcgacaaacgactacggtgtttacgatgaatcagaacaatctatccctgtgattaatcaagcaggcccagtgcagaaacctaatttggttcaagtcccacgattagctaatatggcctcaaatgcataccttcatttaaagggcaatggtttgaagatgccatttgaattcgtaaaagaaatgcctagagcagctatacctatacacgatggccagtttgatttggctccatacatagggcagctaccttttgtatggaccatggagcttctttttccggtaattttgacaaaccttgtgtacgagagacagaataagctaaggataatgatgaagatgcatggccttggagatctaccgtattggactatatcctattgctattttctactgttgtcgctgctctatgtgctgtccttcgtgctgtttggttctgcccttggtttaacattcttccgccagaacaactacggcatgcagtttatattctattttgcttacatgaacttgcaaatttcatttgcatttcttatgacaacatacttctctagtgtgaggacagctactgtgacaggatatctatacatatttgtgtctggccttctgtcacaattcatgttcagaccctatgttgaagatagtaacatctcaagaatctggatcactcttatggaacttctacctgcattttccttataccgcattgtctacgaattctcacgatttgcacaagcacagcctgagaattacatggcctcctcagggattcagtgggctgatatgactaatccagaaagtggattggcaggtgtgcttaccattatggcagtagaatggctcctgttccttttatttgcgttctatctggatcacttccgttcctacaaagacggaatcaggaaagcagcagcgcttgttcgctcccgcatacatgggaaccattctgaagctgctcagcagcaaaacgtacagcttcaggagttcagagcttccatccaactggagagaacagacgtgctgaaagagagagagatagttgaactgatatcaaaagaatccgacagaagctattcagtcatatgcgacaaccttgggaaggtgtaccgtggaaaagatggaaatgcagataaaattgcagtcagaggaatatccatttccatgtcacgcggtcagtgcttcggcgttcttggcccaaatggcgcgggaaagaccactcttattaacatgctgaccggattttgtaaacctacctctggcaccgcgtacgtccaagggatggacatacgcttcgatatggacagaatatatacaggaattggtgtttgtccacaggatgacttgctatgggaaagcctgactggtcgtgagcatctgttgttctatggaaggcttaagaaactgaaggctgcagcactattcgagttgggccccacacgccacatcccaaaatccccaatcgaacaacagagggaaatccatcgcaaaaatccttgtgccgccgccctaggttcccgtcgccgctggtggtcgccgtcgccgtggaggcgcgcggcgctgcccctgccgtggccccagacgccctcggccacgcggctgctcctcgcccggagcccggtagacatcgccgccgctggtggtcgccgtggaggcgcgcggcgctgcccctgccgtggctccagacgctctcggccacgcggctgctcctcgctcggagcccggtagacatcaccgccgctggtggtcgtcgtggaggcgcacggcgctgcccctgccgtggctccaggcgccctgggccacgcggtcgtcgtcccctgccgtggctccagagtggaatcgccgctctgctcaccttggcctgcgaggcgcgcggcgcagctgctcctgtcgtggccctcgggacgagccgctgctcaccatggtctgctaggcgcgcggcgcagttgctctccagaagctgacccgcggagctcgctcgtcggccacgcgacgctcctcaccctcggctgcgaacctcctcactttggagccactacttatgaaaaacttatgtcaaaataagaaaaaactttttgagagtgcatggtgatataataattgttgtaccactacttacgaaaacatgtggatggtgtagtggtgaggtgctgtactactatcctaaaggttctaggtttgactccttgaagtcctcttttttttttccatttttttccatttttttatttgggcttgctgaaggtattgttcacaca

SEQ ID NO: 54603 - DNA, 1333 bp, Zea Mays
  misc_feature (1332)..(1333): n is a, c, g, or t
ctcaactccatcgtcatttttgggagcatggactttatggaattctggaatattcataatcggtatggtttcagcaaagaaattgtggagtgcccaggatattggccgttcaatgctcatgcttgtggcttttggtttctacctatggattggcaattttcttgtgacaaatgcatggagttgtctggaaatatcaattcttcatttggtgaatgggctttcttagaaatcctaaagcatttttaatggtgcttaaggctgccatagagtcaacggattatatgttcatccttttctcatctggatacaagccattggattctgcaattcaatctattgcttcatcagtaaatgaatcaagaggggtggattcaccttctcttggtggtgacagcgctctcctttttaatggccgccttttctgctttttaggatcaataccgtacagttggctttttcctaggtgtgcagccgctattcaccatgctggcaggtaatggagcgctcaaatttctctcgttggcaagtgcctgatttataatcttgcatggtactggcacttccgcagaagattttatatttttactgctttgataacagtggatcaacagctgcagcactacttgctggtatccctcaggtgacaacaacactttctacagcttcaccccatgttttgaggctgtctttctgctgctcttttcttgtccttttatttattcgcaacctgtgatacctggatgtgtaggaagcatcaagcctggtaattctataacccaaaaaaatgttctgatgccgactcaaacaaatacgttatctcccaacttctgcattttcttgatgatgctttgagatggatccattgtactaaattttttcgtgcaggtaacatgccctttcatgatggaccaattttactggtcagagaggctacagtggttgggagtggcgcctgaacccctacaaagacaaaatctagtcccagataatgatgacgccttgagcatccacaatgctgcagatgtgctagttggagctatcaggtcagctttatcgccggaaaccaaagctcaggcggccagaattgctgataggctttcttctgaggatggaattggagaagccctcaggatattgaaggcgagagtgttgactcagaacaaaatcatcagctcattcatcgcaagtaaataattagtactgatatgatatgaggcattgatttaaaccactaaatttaagaaatggacttctaatgcaccgccccatgtaagatagagtaatttctcaaaccaatcaactttacggggcgtttggatccctttattttann

SEQ ID NO: 54604 - DNA, 2062 bp, Zea Mays
  misc_feature (2061)..(2062): n is a, c, g, or t
gtgattcggcccattgtagccccgagacagcgtccgcctacggcctatccgcgtcagcccgccggcgagtcgcgcacgagacctgcgaggcgcgatggcaggccgcggcggcgccggccggcggcctcgcgccgtcttcatggccttcggcactcagggcgacgtcttccccatagcagcgcttgctgcagcttttgcgtgtgaccaacaggagtatgctgtggtgttcatcactcattcagcgcaccggagtttgtcagcacatctagcagccagcagtgttagatacatgcctgtgtcaagcccgcctgtcctcgctgccgaacagttagagaatatctcaagtgattctattcaatcaaaccatgagcgtgagtccttttcaatgcggaaaaaagccattcaagcggagcacaggaaagaatgcttgtcttttgtggaagaagtttttggaaacgacccaagcatcagtggggattttattgtgatcaatttcttcgctttggaaggttggcaccttgcagaactattccaagtaaagtgcgtcattgctgctccctattttgttccatatagtgctcctacatcattcaaacgccaatttaaacaaacttttcctctactttacaagtactttcaagaagctcctgcaaatacggtctgctggactgacattatccattggatgtgggcactcttcatggaaagttggggatcatggagaaatgattgtctgaatcttagccccattcctttcacagatccagtaaccaatcttcctttgtggcatgtgcgagaggagtcacctttattactgtatggtttcagcaaagaaattgtggagtgcccaggatattggccgttcaatgctcatgcttgtggcttttggtttctacctatggattggcaattttcttgtgacaaatgcatggagttgtctggaaatatcaattcttcatttggtggtatgttgtgtgcaaaccattcttccctggaacacttcctcacaaggaatgcttattcatcaagacctatatttgtaggattaagttccattggtagaatgggctttcttagaaatcctaaagcatttttaatggtgcttaaggctgccatagagtcaacggattatatgttcatccttttctcatctggatacaagccattggattctgcaattcaatctattgcttcatcagtaaatgaatcaagaggggtggattcaccttctcttggtggtgacagcgctctcctttttaatggccgccttttctgctttttaggttggctttttcctaggtgtgcagccgctattcaccatgctggcagtggatcaacagctgcagcactacttgctggtatccctcaggtgacaacaacactttctacagcttcaccccatgttttgaggctgtctttctgctgctcttttcttgtccttttatttattcgcaacctgtgatacctggatgtgtaggaagcatcaagcctggtaattctataacccaaaaaaatgttctgatgccgactcaaacaaatacgttatctcccaacttctgcattttcttgatgatgctttgagatggatccattgtactaaattttttcgtgcaggtaacatgccctttcatgatggaccaattttactggtcagagaggctacagtggttgggagtggcgcctgaacccctacaaagacaaaatctagtcccagataatgatgacgccttgagcatccacaatgctgcagatgtgctagttggagctatcaggtcagctttatcgccggaaaccaaagctcaggcggccagaattgctgataggctttcttctgaggatggaattggagaagccctcaggatattgaaggcgagagtgttgactcagaacaaaatcatcagctcattcatcgcaagtaaataattagtactgatatgatatgaggcattgatttaaaccactaaatttaagaaatggacttctaatgcaccgccccatgtaagatagagtaatttctcaaaccaatcaactttacggggcgtttggatccctttattttann

SEQ ID NO: 54605 - DNA, 1964 bp, Zea Mays
  misc_feature (1963)..(1964): n is a, c, g, or t
gtgattcggcccattgtagccccgagacagcgtccgcctacggcctatccgcgtcagcccgccggcgagtcgcgcacgagacctgcgaggcgcgatggcaggccgcggcggcgccggccggcggcctcgcgccgtcttcatggccttcggcactcagggcgacgtcttccccatagcagcgcttgctgcagcttttgcgtgtgaccaacaggagtatgctgtggtgttcatcactcattcagcgcaccggagtttgtcagcacatctagcagccagcagtgttagatacatgcctgtgtcaagcccgcctgtcctcgctgccgaacagttagagaatatctcaagtgattctattcaatcaaaccatgagcgtgagtccttttcaatgcggaaaaaagccattcaagcggagcacaggaaagaatgcttgtcttttgtggaagaagtttttggaaacgacccaagcatcagtggggattttattgtgatcaatttcttcgctttggaaggttggcaccttgcagaactattccaagtaaagtgcgtcattgctgctccctattttgttccatatagtgctcctacatcattcaaacgccaatttaaacaaacttttcctctactttacaagtactttcaagaagctcctgcaaatacgcaattgcaggtctgctggactgacattatccattggatgtgggcactcttcatggaaagttggggatcatggagaaatgattgtctgaatcttagccccattcctttcacagatccagtaaccaatcttcctttgtggcatgtgcgagaggagtcacctttattactgtatggtttcagcaaagaaattgtggagtgcccaggatattggccgttcaatgctcatgcttgtggcttttggtttctacctatggattggcaattttcttgtgacaaatgcatggagttgtctggaaatatcaattcttcatttggtggtatgttgtgtgcaaaccattcttccctggaacacttcctcacaaggaatgcttattcatcaagacctatatttgtaggattaagttccattggtagaatgggctttcttagaaatcctaaagcatttttaatggtgcttaaggctgccatagagtcaacggattatatgttcatccttttctcatctggatacaagccattggattctgcaattcaatctattgcttcatcagtaaatgaatcaagaggggtggattcaccttctcttggtggtgacagcgctctcctttttaatggccgccttttctgctttttaggatcaataccgtacagttggctttttcctaggtgtgcagccgctattcaccatgctggcagtggatcaacagctgcagcactacttgctggtatccctcaggtgacaacaacactttctacagcttcaccccatgttttgaggctgtctttctgctgctcttttcttgtccttttatttattcgcaacctgtgatacctggatgtgtaggaagcatcaagcctggtaacatgccctttcatgatggaccaattttactggtcagagaggctacagtggttgggagtggcgcctgaacccctacaaagacaaaatctagtcccagataatgatgacgccttgagcatccacaatgctgcagatgtgctagttggagctatcaggtcagctttatcgccggaaaccaaagctcaggcggccagaattgctgataggctttcttctgaggatggaattggagaagccctcaggatattgaaggcgagagtgttgactcagaacaaaatcatcagctcattcatcgcaagtaaataattagtactgatatgatatgaggcattgatttaaaccactaaatttaagaaatggacttctaatgcaccgccccatgtaagatagagtaatttctcaaaccaatcaactttacggggcgtttggatccctttattttann

SEQ ID NO: 54606 - DNA, 1863 bp, Zea Mays
  misc_feature (1862)..(1863): n is a, c, g, or t
gtgattcggcccattgtagccccgagacagcgtccgcctacggcctatccgcgtcagcccgccggcgagtcgcgcacgagacctgcgaggcgcgatggcaggccgcggcggcgccggccggcggcctcgcgccgtcttcatggccttcggcactcagggcgacgtcttccccatagcagcgcatgattccatccgtatttattctataggcgcttgctgcagcttttgcgtgtgaccaacaggagtatgctgtggtgttcatcactcattcagcgcaccggagtttgtcagcacatctagcagccagcagtgttagatacatgcctgtgtcaagcccgcctgtcctcgctgccgaacagttagagaatatctcaagtgattctattcaatcaaaccatgagcgtgagtccttttcaatgcggaaaaaagccattcaagcggagcacaggaaagaatgcttgtcttttgtggaagaagtttttggaaacgacccaagcatcagtggggattttattgtgatcaatttcttcgctttggaaggttggcaccttgcagaactattccaagtaaagtgcgtcattgctgctccctattttgttccatatagtgctcctacatcattcaaacgccaatttaaacaaacttttcctctactttacaagtactttcaagaagctcctgcaaatacggtctgctggactgacattatccattggatgtgggcactcttcatggaaagttggggatcatggagaaatgattgtctgaatcttagccccattcctttcacagatccagtaaccaatcttcctttgtggcatgtgcgagaggagtcacctttattactgtatggtttcagcaaagaaattgtggagtgcccaggatattggccgttcaatgctcatgcttgtggcttttggtttctacctatggattggcaattttcttgtgacaaatgcatggagttgtctggaaatatcaattcttcatttggtggtatgttgtgtgcaaaccattcttccctggaacacttcctcacaaggaatgcttattcatcaagacctatatttgtaggattaagttccattggtagaatgggctttcttagaaatcctaaagcatttttaatggtgcttaaggctgccatagagtcaacggattatatgttcatccttttctcatctggatacaagccattggattctgcaattcaatctattgcttcatcagtaaatgaatcaagaggggtggattcaccttctcttggtggtgacagcgctctcctttttaatggccgccttttctgctttttaggatcaataccgtacagttggctttttcctaggtgtgcagccgctattcaccatgctggcagtggatcaacagctgcagcactacttgctggtatccctcaggtaacatgccctttcatgatggaccaattttactggtcagagaggctacagtggttgggagtggcgcctgaacccctacaaagacaaaatctagtcccagataatgatgacgccttgagcatccacaatgctgcagatgtgctagttggagctatcaggtcagctttatcgccggaaaccaaagctcaggcggccagaattgctgataggctttcttctgaggatggaattggagaagccctcaggatattgaaggcgagagtgttgactcagaacaaaatcatcagctcattcatcgcaagtaaataattagtactgatatgatatgaggcattgatttaaaccactaaatttaagaaatggacttctaatgcaccgccccatgtaagatagagtaatttctcaaaccaatcaactttacggggcgtttggatccctttattttann

SEQ ID NO: 54607 - DNA, 1909 bp, Zea Mays
  misc_feature (1908)..(1909): n is a, c, g, or t
gtgattcggcccattgtagccccgagacagcgtccgcctacggcctatccgcgtcagcccgccggcgagtcgcgcacgagacctgcgaggcgcgatggcaggccgcggcggcgccggccggcggcctcgcgccgtcttcatggccttcggcactcagggcgacgtcttccccatagcagcgcttgctgcagcttttgcgtgtgaccaacaggagtatgctgtggtgttcatcactcattcagcgcaccggagtttgtcagcacatctagcagccagcagtgttagatacatgcctgtgtcaagcccgcctgtcctcgctgccgaacagttagagaatatctcaagtgattctattcaatcaaaccatgagcgtgagtccttttcaatgcggaaaaaagccattcaagcggagcacaggaaagaatgcttgtcttttgtggaagaagtttttggaaacgacccaagcatcagtggggattttattgtgatcaatttcttcgctttggaaggttggcaccttgcagaactattccaagtaaagtgcgtcattgctgctccctattttgttccatatagtgctcctacatcattcaaacgccaatttaaacaaacttttcctctactttacaagtactttcaagaagctcctgcaaatacggtctgctggactgacattatccattggatgtgggcactcttcatggaaagttggggatcatggagaaatgattgtctgaatcttagccccattcctttcacagatccagtaaccaatcttcctttgtggcatgtgcgagaggagtcacctttattactgtatggtttcagcaaagaaattgtggagtgcccaggatattggccgttcaatgctcatgcttgtggcttttggtttctacctatggattggcaattttcttgtgacaaatgcatggagttgtctggaaatatcaattcttcatttggtggtatgttgtgtgcaaaccattcttccctggaacacttcctcacaaggaatgcttattcatcaagacctatatttgtaggattaagttccattggtaggctgccatagagtcaacggattatatgttcatccttttctcatctggatacaagccattggattctgcaattcaatctattgcttcatcagtaaatgaatcaagaggggtggattcaccttctcttggtggtgacagcgctctcctttttaatggccgccttttctgctttttaggatcaataccgtacagttggctttttcctaggtgtgcagccgctattcaccatgctggcagtggatcaacagctgcagcactacttgctggtatccctcaggtgacaacaacactttctacagcttcaccccatgttttgaggctgtctttctgctgctcttttcttgtccttttatttattcgcaacctgtgatacctggatgtgtaggaagcatcaagcctggtaacatgccctttcatgatggaccaattttactggtcagagaggctacagtggttgggagtggcgcctgaacccctacaaagacaaaatctagtcccagataatgatgacgccttgagcatccacaatgctgcagatgtgctagttggagctatcaggtcagctttatcgccggaaaccaaagctcaggcggccagaattgctgataggctttcttctgaggatggaattggagaagccctcaggatattgaaggcgagagtgttgactcagaacaaaatcatcagctcattcatcgcaagtaaataattagtactgatatgatatgaggcattgatttaaaccactaaatttaagaaatggacttctaatgcaccgccccatgtaagatagagtaatttctcaaaccaatcaactttacggggcgtttggatccctttattttann

SEQ ID NO: 54608 - DNA, 1813 bp, Zea Mays
  misc_feature (1812)..(1813): n is a, c, g, or t
gtgattcggcccattgtagccccgagacagcgtccgcctacggcctatccgcgtcagcccgccggcgagtcgcgcacgagacctgcgaggcgcgatggcaggccgcggcggcgccggccggcggcctcgcgccgtcttcatggccttcggcactcagggcgacgtcttccccatagcagcgcttgctgcagcttttgcgtgtgaccaacaggagtatgctgtggtgttcatcactcattcagcgcaccggagtttgtcagcacatctagcagccagcagtgttagatacatgcctgtgtcaagcccgcctgtcctcgctgccgaacagttagagaatatctcaagtgattctattcaatcaaaccatgagcgtgagtccttttcaatgcggaaaaaagccattcaagcggagcacaggaaagaatgcttgtcttttgtggaagaagtttttggaaacgacccaagcatcagtggggattttattgtgatcaatttcttcgctttggaaggttggcaccttgcagaactattccaagtaaagtgcgtcattgctgctccctattttgttccatatagtgctcctacatcattcaaacgccaatttaaacaaacttttcctctactttacaagtactttcaagaagctcctgcaaatacggtctgctggactgacattatccattggatgtgggcactcttcatggaaagttggggatcatggagaaatgattgtctgaatcttagccccattcctttcacagatccagtaaccaatcttcctttgtggcatgtgcgagaggagtcacctttattactgtatggtttcagcaaagaaattgtggagtgcccaggatattggccgttcaatgctcatgcttgtggcttttggtttctacctatggattggcaattttcttgtgacaaatgcatggagttgtctggaaatatcaattcttcatttggtggtatgttgtgtgcaaaccattcttccctggaacacttcctcacaaggaatgcttattcatcaagacctatatttgtaggattaagttccattgaatgggctttcttagaaatcctaaagcatttttaatggtgcttaaggctgccatagagtcaacggattatatgttcatccttttctcatctggatacaagccattggattctgcaattcaatctattgcttcatcagtaaatgaatcaagaggggtggattcaccttctcttggtggtgacagcgctctcctttttaatggccgccttttctgctttttaggttggctttttcctaggtgtgcagccgctattcaccatgctggcagtggatcaacagctgcagcactacttgctggtatccctcaggtaacatgccctttcatgatggaccaattttactggtcagagaggctacagtggttgggagtggcgcctgaacccctacaaagacaaaatctagtcccagataatgatgacgccttgagcatccacaatgctgcagatgtgctagttggagctatcaggtcagctttatcgccggaaaccaaagctcaggcggccagaattgctgataggctttcttctgaggatggaattggagaagccctcaggatattgaaggcgagagtgttgactcagaacaaaatcatcagctcattcatcgcaagtaaataattagtactgatatgatatgaggcattgatttaaaccactaaatttaagaaatggacttctaatgcaccgccccatgtaagatagagtaatttctcaaaccaatcaactttacggggcgtttggatccctttattttann

SEQ ID NO: 54609 - DNA, 1692 bp, Zea Mays
  misc_feature (1691)..(1692): n is a, c, g, or t
gtgattcggcccattgtagccccgagacagcgtccgcctacggcctatccgcgtcagcccgccggcgagtcgcgcacgagacctgcgaggcgcgatggcaggccgcggcggcgccggccggcggcctcgcgccgtcttcatggccttcggcactcagggcgacgtcttccccatagcagcgcttgctgcagcttttgcgtgtgaccaacaggagtatgctgtggtgttcatcactcattcagcgcaccggagtttgtcagcacatctagcagccagcagtgttagatacatgcctgtgtcaagcccgcctgtcctcgctgccgaacagttagagaatatctcaagtgattctattcaatcaaaccatgagcgtgagtccttttcaatgcggaaaaaagccattcaagcggagcacaggaaagaatgcttgtcttttgtggaagaagtttttggaaacgacccaagcatcagtggggattttattgtgatcaatttcttcgctttggaaggttggcaccttgcagaactattccaagtaaagtgcgtcattgctgctccctattttgttccatatagtgctcctacatcattcaaacgccaatttaaacaaacttttcctctactttacaagtactttcaagaagctcctgcaaatacggtctgctggactgacattatccattggatgtgggcactcttcatggaaagttggggatcatggagaaatgattgtctgaatcttagccccattcctttcacagatccagtaaccaatcttcctttgtggcatgtgcgagaggagtcacctttattactgtatggtttcagcaaagaaattgtggagtgcccaggatattggccgttcaatgctcatgcttgtggcttttggtttctacctatggattggcaattttcttgtgacaaatgcatggagttgtctggaaatatcaattcttcatttggtggtatgttgtgtgcaaaccattcttccctggaacacttcctcacaaggaatgcttattcatcaagacctatatttgtaggattaagttccattgaatgggctttcttagaaatcctaaagcatttttaatggtgcttaaggctgccatagagtcaacggattatatgttcatccttttctcatctggatacaagccattggattctgcaattcaatctattgcttcatcagtaaatgaatcaagaggggtggattcaccttctcttggtggtgacagcgctctcctttttaatggccgccttttctgctttttaggatcaataccgtacagttggctttttcctaggtgtgcagccgctattcaccatgctggcagtggatcaacagctgcagcactacttgctggtatccctcagatgtgctagttggagctatcaggtcagctttatcgccggaaaccaaagctcaggcggccagaattgctgataggctttcttctgaggatggaattggagaagccctcaggatattgaaggcgagagtgttgactcagaacaaaatcatcagctcattcatcgcaagtaaataattagtactgatatgatatgaggcattgatttaaaccactaaatttaagaaatggacttctaatgcaccgccccatgtaagatagagtaatttctcaaaccaatcaactttacggggcgtttggatccctttattttann

SEQ ID NO: 54610 - DNA, 1819 bp, Zea Mays
  misc_feature (1818)..(1819): n is a, c, g, or t
gtgattcggcccattgtagccccgagacagcgtccgcctacggcctatccgcgtcagcccgccggcgagtcgcgcacgagacctgcgaggcgcgatggcaggccgcggcggcgccggccggcggcctcgcgccgtcttcatggccttcggcactcagggcgacgtcttccccatagcacttttgcgtgtgaccaacaggagtatgctgtggtgttcatcactcattcagcgcaccggagtttgtcagcacatctagcagccagcagtgttagatacatgcctgtgtcaagcccgcctgtcctcgctgccgaacagttagagaatatctcaagtgattctattcaatcaaaccatgagcgtgagtccttttcaatgcggaaaaaagccattcaagcggagcacaggaaagaatgcttgtcttttgtggaagaagtttttggaaacgacccaagcatcagtggggattttattgtgatcaatttcttcgctttggaaggttggcaccttgcagaactattccaagtaaagtgcgtcattgctgctccctattttgttccatatagtgctcctacatcattcaaacgccaatttaaacaaacttttcctctactttacaagtactttcaagaagctcctgcaaatacggtctgctggactgacattatccattggatgtgggcactcttcatggaaagttggggatcatggagaaatgattgtctgaatcttagccccattcctttcacagatccagtaaccaatcttcctttgtggcatgtgcgagaggagtcacctttattactgtatggtttcagcaaagaaattgtggagtgcccaggatattggccgttcaatgctcatgcttgtggcttttggtttctacctatggattggcaattttcttgtgacaaatgcatggagttgtctggaaatatcaattcttcatttggtggtatgttgtgtgcaaaccattcttccctggaacacttcctcacaaggaatgcttattcatcaagacctatatttgtaggattaagttccattggtagaatgggctttcttagaaatcctaaagcatttttaatggtgcttaaggctgccatagagtcaacggattatatgttcatccttttctcatctggatacaagccattggattctgcaattcaatctattgcttcatcagtaaatgaatcaagaggggtggattcaccttctcttggtggtgacagcgctctcctttttaatggccgccttttctgctttttaggatcaataccgtacagttggctttttcctaggtgtgcagccgctattcaccatgctggcagtggatcaacagctgcagcactacttgctggtatccctcaggtaacatgccctttcatgatggaccaattttactggtcagagaggctacagtggttgggagtggcgcctgaacccctacaaagacaaaatctagtcccagataatgatgacgccttgagcatccacaatgctgcagatgtgctagttggagctatcaggtcagctttatcgccggaaaccaaagctcaggcggccagaattgctgataggctttcttctgaggatggaattggagaagccctcaggatattgaaggcgagagtgttgactcagaacaaaatcatcagctcattcatcgcaagtaaataattagtactgatatgatatgaggcattgatttaaaccactaaatttaagaaatggacttctaatgcaccgccccatgtaagatagagtaatttctcaaaccaatcaactttacggggcgtttggatccctttattttann

SEQ ID NO: 54611 - DNA, 1924 bp, Zea Mays
  misc_feature (1923)..(1924): n is a, c, g, or t
gtgattcggcccattgtagccccgagacagcgtccgcctacggcctatccgcgtcagcccgccggcgagtcgcgcacgagacctgcgaggcgcgatggcaggccgcggcggcgccggccggcggcctcgcgccgtcttcatggccttcggcactcagggcgacgtcttccccatagcagcgcttgctgcagcttttgcgtgtgaccaacaggagtatgctgtggtgttcatcactcattcagcgcaccggagtttgtcagcacatctagcagccagcagtgttagatacatgcctgtgtcaagcccgcctgtcctcgctgccgaacagttagagaatatctcaagtgattctattcaatcaaaccatgagcgtgagtccttttcaatgcggaaaaaagccattcaagcggagcacaggaaagaatgcttgtcttttgtggaagaagtttttggaaacgacccaagcatcagtggggattttattgtgatcaatttcttcgctttggtctgctggactgacattatccattggatgtgggcactcttcatggaaagttggggatcatggagaaatgattgtctgaatcttagccccattcctttcacagatccagtaaccaatcttcctttgtggcatgtgcgagaggagtcacctttattactgtatggtttcagcaaagaaattgtggagtgcccaggatattggccgttcaatgctcatgcttgtggcttttggtttctacctatggattggcaattttcttgtgacaaatgcatggagttgtctggaaatatcaattcttcatttggtggtatgttgtgtgcaaaccattcttccctggaacacttcctcacaaggaatgcttattcatcaagacctatatttgtaggattaagttccattggtagaatgggctttcttagaaatcctaaagcatttttaatggtgcttaaggctgccatagagtcaacggattatatgttcatccttttctcatctggatacaagccattggattctgcaattcaatctattgcttcatcagtaaatgaatcaagaggggtggattcaccttctcttggtggtgacagcgctctcctttttaatggccgccttttctgctttttaggatcaataccgtacagttggctttttcctaggtgtgcagccgctattcaccatgctggcagtggatcaacagctgcagcactacttgctggtatccctcaggtgacaacaacactttctacagcttcaccccatgttttgaggctgtctttctgctgctcttttcttgtccttttatttattcgcaacctgtgatacctggatgtgtaggaagcatcaagcctggtaattctataacccaaaaaaatgttctgatgccgactcaaacaaatacgttatctcccaacttctgcattttcttgatgatgctttgagatggatccattgtactaaattttttcgtgcaggtaacatgccctttcatgatggaccaattttactggtcagagaggctacagtggttgggagtggcgcctgaacccctacaaagacaaaatctagtcccagataatgatgacgccttgagcatccacaatgctgcagatgtgctagttggagctatcaggtcagctttatcgccggaaaccaaagctcaggcggccagaattgctgataggctttcttctgaggatggaattggagaagccctcaggatattgaaggcgagagtgttgactcagaacaaaatcatcagctcattcatcgcaagtaaataattagtactgatatgatatgaggcattgatttaaaccactaaatttaagaaatggacttctaatgcaccgccccatgtaagatagagtaatttctcaaaccaatcaactttacggggcgtttggatccctttattttann

SEQ ID NO: 54612 - DNA, 1925 bp, Zea Mays
  misc_feature (1924)..(1925): n is a, c, g, or t
gtgattcggcccattgtagccccgagacagcgtccgcctacggcctatccgcgtcagcccgccggcgagtcgcgcacgagacctgcgaggcgcgatggcaggccgcggcggcgccggccggcggcctcgcgccgtcttcatggccttcggcactcagggcgacgtcttccccatagcagcgcttgctgcagcttttgcgtgtgaccaacaggagtatgctgtggtgttcatcactcattcagcgcaccggagtttgtcagcacatctagcagccagcagtgttagatacatgcctgtgtcaagcccgcctgtcctcgctgccgaacagttagagaatatctcaagtgattctattcaatcaaaccatgagcgtgagtccttttcaatgcggaaaaaagccattcaagcggagcacaggaaagaatgcttgtcttttgtggaagaagtttttggaaacgacccaagcatcagtggggattttattgtgatcaatttcttcgctttggaaggttggcaccttgcagaactattccaagtaaagtgcgtcattgctgctccctattttgttccatatagtgctcctacatcattcaaacgccaatttaaacaaacttttcctctactttacaagtactttcaagaagctcctgcaaatacggtctgctggactgacattatccattggatgtgggcactcttcatggaaagttggggatcatggagaaatgattgtctgaatcttagccccattcctttcacagatccagtaaccaatcttcctttgtggcatgtgcgagaggagtcacctttattactgtatggtttcagcaaagaaattgtggagtgcccaggatattggccgttcaatgctcatgcttgtggcttttggtttctacctatggattggcaattttcttgtgacaaatgcatggagttgtctggaaatatcaattcttcatttggtggtatgttgtgtgcaaaccattcttccctggaacacttcctcacaaggaatgcttattcatcaagacctatatttgtaggattaagttccattggtagaatgggctttcttagaaatcctaaagcatttttaatggtgcttaaggctgccatagagtcaacggattatatgttcatccttttctcatctggatacaagccattggattctgcaattcaatctattgcttcatcagtaaatgaatcaagaggggtggattcaccttctcttggtggtgacagcgctctcctttttaatggccgccttttctgctttttagggtgtgcagccgctattcaccatgctggcagtggatcaacagctgcagcactacttgctggtatccctcaggtgacaacaacactttctacagcttcaccccatgttttgaggctgtctttctgctgctcttttcttgtccttttatttattcgcaacctgtgatacctggatgtgtaggaagcatcaagcctggtaacatgccctttcatgatggaccaattttactggtcagagaggctacagtggttgggagtggcgcctgaacccctacaaagacaaaatctagtcccagataatgatgacgccttgagcatccacaatgctgcagatgtgctagttggagctatcaggtcagctttatcgccggaaaccaaagctcaggcggccagaattgctgataggctttcttctgaggatggaattggagaagccctcaggatattgaaggcgagagtgttgactcagaacaaaatcatcagctcattcatcgcaagtaaataattagtactgatatgatatgaggcattgatttaaaccactaaatttaagaaatggacttctaatgcaccgccccatgtaagatagagtaatttctcaaaccaatcaactttacggggcgtttggatccctttattttann

SEQ ID NO: 54613 - DNA, 1858 bp, Zea Mays
  misc_feature (1857)..(1858): n is a, c, g, or t
gtgattcggcccattgtagccccgagacagcgtccgcctacggcctatccgcgtcagcccgccggcgagtcgcgcacgagacctgcgaggcgcgatggcaggccgcggcggcgccggccggcggcctcgcgccgtcttcatggccttcggcactcagggcgacgtcttccccatagcagcgcttgctgcagcttttgcgtgtgaccaacaggagtatgctgtggtgttcatcactcattcagcgcaccggagtttgtcagcacatctagcagccagcagtgttagatacatgcctgtgtcaagcccgcctgtcctcgctgccgaacagttagagaatatctcaagtgattctattcaatcaaaccatgagcgtgagtccttttcaatgcggaaaaaagccattcaagcggagcacaggaaagaatgcttgtcttttgtggaagaagtttttggaaacgacccaagcatcagtggggattttattgtgatcaatttcttcgctttggaaggttggcaccttgcagaactattccaagtaaagtgcgtcattgctgctccctattttgttccatatagtgctcctacatcattcaaacgccaatttaaacaaacttttcctctactttacaagtactttcaagaagctcctgcaaatacggtctgctggactgacattatccattggatgtgggcactcttcatggaaagttggggatcatggagaaatgattgtctgaatcttagccccattcctttcacagatccagtaaccaatcttcctttgtggcatgtgcgagaggagtcacctttattactgtatggtttcagcaaagaaattgtggagtgcccaggatattggccgttcaatgctcatgcttgtggcttttggtttctacctatggattggcaattttcttgtgacaaatgcatggagttgtctggaaatatcaattcttcatttggtgaatgggctttcttagaaatcctaaagcatttttaatggtgcttaaggctgccatagagtcaacggattatatgttcatccttttctcatctggatacaagccattggattctgcaattcaatctattgcttcatcagtaaatgaatcaagaggggtggattcaccttctcttggtggtgacagcgctctcctttttaatggccgccttttctgctttttaggatcaataccgtacagttggctttttcctaggtgtgcagccgctattcaccatgctggcagtggatcaacagctgcagcactacttgctggtatccctcaggtgacaacaacactttctacagcttcaccccatgttttgaggctgtctttctgctgctcttttcttgtccttttatttattcgcaacctgtgatacctggatgtgtaggaagcatcaagcctggtaacatgccctttcatgatggaccaattttactggtcagagaggctacagtggttgggagtggcgcctgaacccctacaaagacaaaatctagtcccagataatgatgacgccttgagcatccacaatgctgcagatgtgctagttggagctatcaggtcagctttatcgccggaaaccaaagctcaggcggccagaattgctgataggctttcttctgaggatggaattggagaagccctcaggatattgaaggcgagagtgttgactcagaacaaaatcatcagctcattcatcgcaagtaaataattagtactgatatgatatgaggcattgatttaaaccactaaatttaagaaatggacttctaatgcaccgccccatgtaagatagagtaatttctcaaaccaatcaactttacggggcgtttggatccctttattttann

SEQ ID NO: 54614 - DNA, 2064 bp, Zea Mays
  misc_feature (2063)..(2064): n is a, c, g, or t
gtgattcggcccattgtagccccgagacagcgtccgcctacggcctatccgcgtcagcccgccggcgagtcgcgcacgagacctgcgaggcgcgatggcaggccgcggcggcgccggccggcggcctcgcgccgtcttcatggccttcggcactcagggcgacgtcttccccatagcacttttgcgtgtgaccaacaggagtatgctgtggtgttcatcactcattcagcgcaccggagtttgtcagcacatctagcagccagcagtgttagatacatgcctgtgtcaagcccgcctgtcctcgctgccgaacagttagagaatatctcaagtgattctattcaatcaaaccatgagcgtgagtccttttcaatgcggaaaaaagccattcaagcggagcacaggaaagaatgcttgtcttttgtggaagaagtttttggaaacgacccaagcatcagtggggattttattgtgatcaatttcttcgctttggaaggttggcaccttgcagaactattccaagtaaagtgcgtcattgctgctccctattttgttccatatagtgctcctacatcattcaaacgccaatttaaacaaacttttcctctactttacaagtactttcaagaagctcctgcaaatacggtctgctggactgacattatccattggatgtgggcactcttcatggaaagttggggatcatggagaaatgattgtctgaatcttagccccattcctttcacagatccagtaaccaatcttcctttgtggcatgtgcgagaggagtcacctttattactgtatggtttcagcaaagaaattgtggagtgcccaggatattggccgttcaatgctcatgcttgtggcttttggtttctacctatggattggcaattttcttgtgacaaatgcatggagttgtctggaaatatcaattcttcatttggtggtatgttgtgtgcaaaccattcttccctggaacacttcctcacaaggaatgcttattcatcaagacctatatttgtaggattaagttccattggtagaatgggctttcttagaaatcctaaagcatttttaatggtgcttaaggctgccatagagtcaacggattatatgttcatccttttctcatctggatacaagccattggattctgcaattcaatctattgcttcatcagtaaatgaatcaagaggggtggattcaccttctcttggtggtgacagcgctctcctttttaatggccgccttttctgctttttaggatcaataccgtacagttggctttttcctaggtgtgcagccgctattcaccatgctggcagtggatcaacagctgcagcactacttgctggtatccctcaggtgacaacaacactttctacagcttcaccccatgttttgaggctgtctttctgctgctcttttcttgtccttttatttattcgcaacctgtgatacctggatgtgtaggaagcatcaagcctggtaattctataacccaaaaaaatgttctgatgccgactcaaacaaatacgttatctcccaacttctgcattttcttgatgatgctttgagatggatccattgtactaaattttttcgtgcaggtaacatgccctttcatgatggaccaattttactggtcagagaggctacagtggttgggagtggcgcctgaacccctacaaagacaaaatctagtcccagataatgatgacgccttgagcatccacaatgctgcagatgtgctagttggagctatcaggtcagctttatcgccggaaaccaaagctcaggcggccagaattgctgataggctttcttctgaggatggaattggagaagccctcaggatattgaaggcgagagtgttgactcagaacaaaatcatcagctcattcatcgcaagtaaataattagtactgatatgatatgaggcattgatttaaaccactaaatttaagaaatggacttctaatgcaccgccccatgtaagatagagtaatttctcaaaccaatcaactttacggggcgtttggatccctttattttann

SEQ ID NO: 54615 - DNA, 1828 bp, Zea Mays
  misc_feature (1827)..(1828): n is a, c, g, or t
gtgattcggcccattgtagccccgagacagcgtccgcctacggcctatccgcgtcagcccgccggcgagtcgcgcacgagacctgcgaggcgcgatggcaggccgcggcggcgccggccggcggcctcgcgccgtcttcatggccttcggcactcagggcgacgtcttccccatagcagcgcttgctgcagcttttgcgtgtgaccaacaggagtatgctgtggtgttcatcactcattcagcgcaccggagtttgtcagcacatctagcagccagcagtgttagatacatgcctgtgtcaagcccgcctgtcctcgctgccgaacagttagagaatatctcaagtgattctattcaatcaaaccatgagcgtgagtccttttcaatgcggaaaaaagccattcaagcggagcacaggaaagaatgcttgtcttttgtggaagaagtttttggaaacgacccaagcatcagtggggattttattgtgatcaatttcttcgctttggaaggttggcaccttgcagaactattccaagtaaagtgcgtcattgctgctccctattttgttccatatagtgctcctacatcattcaaacgccaatttaaacaaacttttcctctactttacaagtactttcaagaagctcctgcaaatacggtctgctggactgacattatccattggatgtgggcactcttcatggaaagttggggatcatggagaaatgattgtctgaatcttagccccattcctttcacagatccagtaaccaatcttcctttgtggcatgtgcgagaggagtcacctttattactgtatggtttcagcaaagaaattgtggagtgcccaggatattggccgttcaatgctcatgcttgtggcttttggtttctacctatggattggcaattttcttgtgacaaatgcatggagttgtctggaaatatcaattcttcatttggtggtatgttgtgtgcaaaccattcttccctggaacacttcctcacaaggaatgcttattcatcaagacctatatttgtaggattaagttccattgaatgggctttcttagaaatcctaaagcatttttaatggtgcttaaggctgccatagagtcaacggattatatgttcatccttttctcatctggatacaagccattggattctgcaattcaatctattgcttcatcagtaaatgaatcaagaggggtggattcaccttctcttggtggtgacagcgctctcctttttaatggccgccttttctgctttttaggatcaataccgtacagttggctttttcctaggtgtgcagccgctattcaccatgctggcagtggatcaacagctgcagcactacttgctggtatccctcaggtaacatgccctttcatgatggaccaattttactggtcagagaggctacagtggttgggagtggcgcctgaacccctacaaagacaaaatctagtcccagataatgatgacgccttgagcatccacaatgctgcagatgtgctagttggagctatcaggtcagctttatcgccggaaaccaaagctcaggcggccagaattgctgataggctttcttctgaggatggaattggagaagccctcaggatattgaaggcgagagtgttgactcagaacaaaatcatcagctcattcatcgcaagtaaataattagtactgatatgatatgaggcattgatttaaaccactaaatttaagaaatggacttctaatgcaccgccccatgtaagatagagtaatttctcaaaccaatcaactttacggggcgtttggatccctttattttann

SEQ ID NO: 54616 - DNA, 1951 bp, Zea Mays
  misc_feature (1950)..(1951): n is a, c, g, or t
gtgattcggcccattgtagccccgagacagcgtccgcctacggcctatccgcgtcagcccgccggcgagtcgcgcacgagacctgcgaggcgcgatggcaggccgcggcggcgccggccggcggcctcgcgccgtcttcatggccttcggcactcagggcgacgtcttccccatagcagcgcttgctgcagcttttgcgtgtgaccaacaggagtatgctgtggtgttcatcactcattcagcgcaccggagtttgtcagcacatctagcagccagcagtgttagatacatgcctgtgtcaagcccgcctgtcctcgctgccgaacagttagagaatatctcaagtgattctattcaatcaaaccatgagcgtgagtccttttcaatgcggaaaaaagccattcaagcggagcacaggaaagaatgcttgtcttttgtggaagaagtttttggaaacgacccaagcatcagtggggattttattgtgatcaatttcttcgctttggaaggttggcaccttgcagaactattccaagtaaagtgcgtcattgctgctccctattttgttccatatagtgctcctacatcattcaaacgccaatttaaacaaacttttcctctactttacaagtactttcaagaagctcctgcaaatacggtctgctggactgacattatccattggatgtgggcactcttcatggaaagttggggatcatggagaaatgattgtctgaatcttagccccattcctttcacagatccagtaaccaatcttcctttgtggcatgtgcgagaggagtcacctttattactgtatggtttcagcaaagaaattgtggagtgcccaggatattggccgttcaatgctcatgcttgtggcttttggtttctacctatggattggcaattttcttgtgacaaatgcatggagttgtctggaaatatcaattcttcatttggtggtatgttgtgtgcaaaccattcttccctggaacacttcctcacaaggaatgcttattcatcaagacctatatttgtaggattaagttccattgaatgggctttcttagaaatcctaaagcatttttaatggtgcttaaggctgccatagagtcaacggattatatgttcatccttttctcatctggatacaagccattggattctgcaattcaatctattgcttcatcagtaaatgaatcaagaggggtggattcaccttctcttggtggtgacagcgctctcctttttaatggccgccttttctgctttttaggatcaataccgtacagttggctttttcctaggtgtgcagccgctattcaccatgctggcagtggatcaacagctgcagcactacttgctggtatccctcaggtgacaacaacactttctacagcttcaccccatgttttgaggctgtctttctgctgctcttttcttgtccttttatttattcgcaacctgtgatacctggatgtgtaggaagcatcaagcctggtaacatgccctttcatgatggaccaattttactggtcagagaggctacagtggttgggagtggcgcctgaacccctacaaagacaaaatctagtcccagataatgatgacgccttgagcatccacaatgctgcagatgtgctagttggagctatcaggtcagctttatcgccggaaaccaaagctcaggcggccagaattgctgataggctttcttctgaggatggaattggagaagccctcaggatattgaaggcgagagtgttgactcagaacaaaatcatcagctcattcatcgcaagtaaataattagtactgatatgatatgaggcattgatttaaaccactaaatttaagaaatggacttctaatgcaccgccccatgtaagatagagtaatttctcaaaccaatcaactttacggggcgtttggatccctttattttann

SEQ ID NO: 54617 - DNA, 1735 bp, Zea Mays
  misc_feature (1734)..(1735): n is a, c, g, or t
gtgattcggcccattgtagccccgagacagcgtccgcctacggcctatccgcgtcagcccgccggcgagtcgcgcacgagacctgcgaggcgcgatggcaggccgcggcggcgccggccggcggcctcgcgccgtcttcatggccttcggcactcagggcgacgtcttccccatagcagcgcttgctgcagcttttgcgtgtgaccaacaggagtatgctgtggtgttcatcactcattcagcgcaccggagtttgtcagcacatctagcagccagcagtgttagatacatgcctgtgtcaagcccgcctgtcctcgctgccgaacagttagagaatatctcaagtgattctattcaatcaaaccatgagcgtgagtccttttcaatgcggaaaaaagccattcaagcggagcacaggaaagaatgcttgtcttttgtggaagaagtttttggaaacgacccaagcatcagtggggattttattgtgatcaatttcttcgctttggaaggttggcaccttgcagaactattccaagtaaagtgcgtcattgctgctccctattttgttccatatagtgctcctacatcattcaaacgccaatttaaacaaacttttcctctactttacaagtactttcaagaagctcctgcaaatacggtctgctggactgacattatccattggatgtgggcactcttcatggaaagttggggatcatggagaaatgattgtctgaatcttagccccattcctttcacagatccagtaaccaatcttcctttgtggcatgtgcgagaggagtcacctttattactgtatggtttcagcaaagaaattgtggagtgcccaggatattggccgttcaatgctcatgcttgtggcttttggtttctacctatggattggcaattttcttgtgacaaatgcatggagttgtctggaaatatcaattcttcatttggtgaatgggctttcttagaaatcctaaagcatttttaatggtgcttaaggctgccatagagtcaacggattatatgttcatccttttctcatctggatacaagccattggattctgcaattcaatctattgcttcatcagtaaatgaatcaagaggggtggattcaccttctcttggtggtgacagcgctctcctttttaatggccgccttttctgctttttaggatcaataccgtacagttggctttttcctaggtgtgcagccgctattcaccatgctggcagtggatcaacagctgcagcactacttgctggtatccctcaggtaacatgccctttcatgatggaccaattttactggtcagagaggctacagtggttgggagtggcgcctgaacccctacaaagacaaaatctagtcccagataatgatgacgccttgagcatccacaatgctgcagatgtgctagttggagctatcaggtcagctttatcgccggaaaccaaagctcaggcggccagaattgctgataggctttcttctgaggatggaattggagaagccctcaggatattgaaggcgagagtgttgactcagaacaaaatcatcagctcattcatcgcaagtaaataattagtactgatatgatatgaggcattgatttaaaccactaaatttaagaaatggacttctaatgcaccgccccatgtaagatagagtaatttctcaaaccaatcaactttacggggcgtttggatccctttattttann

SEQ ID NO: 54618 - DNA, 1787 bp, Zea Mays
  misc_feature (1786)..(1787): n is a, c, g, or t
gtgattcggcccattgtagccccgagacagcgtccgcctacggcctatccgcgtcagcccgccggcgagtcgcgcacgagacctgcgaggcgcgatggcaggccgcggcggcgccggccggcggcctcgcgccgtcttcatggccttcggcactcagggcgacgtcttccccatagcagcgcttgctgcagcttttgcgtgtgaccaacaggagtatgctgtggtgttcatcactcattcagcgcaccggagtttgtcagcacatctagcagccagcagtgttagatacatgcctgtgtcaagcccgcctgtcctcgctgccgaacagttagagaatatctcaagtgattctattcaatcaaaccatgagcgtgagtccttttcaatgcggaaaaaagccattcaagcggagcacaggaaagaatgcttgtcttttgtggaagaagtttttggaaacgacccaagcatcagtggggattttattgtgatcaatttcttcgctttggtctgctggactgacattatccattggatgtgggcactcttcatggaaagttggggatcatggagaaatgattgtctgaatcttagccccattcctttcacagatccagtaaccaatcttcctttgtggcatgtgcgagaggagtcacctttattactgtatggtttcagcaaagaaattgtggagtgcccaggatattggccgttcaatgctcatgcttgtggcttttggtttctacctatggattggcaattttcttgtgacaaatgcatggagttgtctggaaatatcaattcttcatttggtggtatgttgtgtgcaaaccattcttccctggaacacttcctcacaaggaatgcttattcatcaagacctatatttgtaggattaagttccattggtagaatgggctttcttagaaatcctaaagcatttttaatggtgcttaaggctgccatagagtcaacggattatatgttcatccttttctcatctggatacaagccattggattctgcaattcaatctattgcttcatcagtaaatgaatcaagaggggtggattcaccttctcttggtggtgacagcgctctcctttttaatggccgccttttctgctttttaggttggctttttcctaggtgtgcagccgctattcaccatgctggcagtggatcaacagctgcagcactacttgctggtatccctcaggtgacaacaacactttctacagcttcaccccatgttttgaggctgtctttctgctgctcttttcttgtccttttatttattcgcaacctgtgatacctggatgtgtaggaagcatcaagcctggtaacatgccctttcatgatggaccaattttactggtcagagaggctacagtggttgggagtggcgcctgaacccctacaaagacaaaatctagtcccagataatgatgacgccttgagcatccacaatgctgcagatgtgctagttggagctatcaggtcagctttatcgccggaaaccaaagctcaggcggccagaattgctgataggctttcttctgaggatggaattggagaagccctcaggatattgaaggcgagagtgttgactcagaacaaaatcatcagctcattcatcgcaagtaaataattagtactgatatgatatgaggcattgatttaaaccactaaatttaagaaatggacttctaatgcaccgccccatgtaagatagagtaatttctcaaaccaatcaactttacggggcgtttggatccctttattttann

SEQ ID NO: 54619 - DNA, 1720 bp, Zea Mays
  misc_feature (1719)..(1720): n is a, c, g, or t
gtgattcggcccattgtagccccgagacagcgtccgcctacggcctatccgcgtcagcccgccggcgagtcgcgcacgagacctgcgaggcgcgatggcaggccgcggcggcgccggccggcggcctcgcgccgtcttcatggccttcggcactcagggcgacgtcttccccatagcagcgcttgctgcagcttttgcgtgtgaccaacaggagtatgctgtggtgttcatcactcattcagcgcaccggagtttgtcagcacatctagcagccagcagtgttagatacatgcctgtgtcaagcccgcctgtcctcgctgccgaacagttagagaatatctcaagtgattctattcaatcaaaccatgagcgtgagtccttttcaatgcggaaaaaagccattcaagcggagcacaggaaagaatgcttgtcttttgtggaagaagtttttggaaacgacccaagcatcagtggggattttattgtgatcaatttcttcgctttggaaggttggcaccttgcagaactattccaagtaaagtgcgtcattgctgctccctattttgttccatatagtgctcctacatcattcaaacgccaatttaaacaaacttttcctctactttacaagtactttcaagaagctcctgcaaatacggtctgctggactgacattatccattggatgtgggcactcttcatggaaagttggggatcatggagaaatgattgtctgaatcttagccccattcctttcacagatccagtaaccaatcttcctttgtggcatgtgcgagaggagtcacctttattactgtatggtttcagcaaagaaattgtggagtgcccaggatattggccgttcaatgctcatgcttgtggcttttggtttctacctatggattggcaattttcttgtgacaaatgcatggagttgtctggaaatatcaattcttcatttggtgaatgggctttcttagaaatcctaaagcatttttaatggtgcttaaggctgccatagagtcaacggattatatgttcatccttttctcatctggatacaagccattggattctgcaattcaatctattgcttcatcagtaaatgaatcaagaggggtggattcaccttctcttggtggtgacagcgctctcctttttaatggccgccttttctgctttttaggttggctttttcctaggtgtgcagccgctattcaccatgctggcagtggatcaacagctgcagcactacttgctggtatccctcaggtaacatgccctttcatgatggaccaattttactggtcagagaggctacagtggttgggagtggcgcctgaacccctacaaagacaaaatctagtcccagataatgatgacgccttgagcatccacaatgctgcagatgtgctagttggagctatcaggtcagctttatcgccggaaaccaaagctcaggcggccagaattgctgataggctttcttctgaggatggaattggagaagccctcaggatattgaaggcgagagtgttgactcagaacaaaatcatcagctcattcatcgcaagtaaataattagtactgatatgatatgaggcattgatttaaaccactaaatttaagaaatggacttctaatgcaccgccccatgtaagatagagtaatttctcaaaccaatcaactttacggggcgtttggatccctttattttann

SEQ ID NO: 54620 - DNA, 1797 bp, Zea Mays
  misc_feature (1796)..(1797): n is a, c, g, or t
gtgattcggcccattgtagccccgagacagcgtccgcctacggcctatccgcgtcagcccgccggcgagtcgcgcacgagacctgcgaggcgcgatggcaggccgcggcggcgccggccggcggcctcgcgccgtcttcatggccttcggcactcagggcgacgtcttccccatagcagcgcttgctgcagcttttgcgtgtgaccaacaggagtatgctgtggtgttcatcactcattcagcgcaccggagtttgtcagcacatctagcagccagcagtgttagatacatgcctgtgtcaagcccgcctgtcctcgctgccgaacagttagagaatatctcaagtgattctattcaatcaaaccatgagcgtgagtccttttcaatgcggaaaaaagccattcaagcggagcacaggaaagaatgcttgtcttttgtggaagaagtttttggaaacgacccaagcatcagtggggattttattgtgatcaatttcttcgctttggaaggttggcaccttgcagaactattccaagtaaagtgcgtcattgctgctccctattttgttccatatagtgctcctacatcattcaaacgccaatttaaacaaacttttcctctactttacaagtactttcaagaagctcctgcaaatacggtctgctggactgacattatccattggatgtgggcactcttcatggaaagttggggatcatggagaaatgattgtctgaatcttagccccattcctttcacagatccagtaaccaatcttcctttgtggcatgtgcgagaggagtcacctttattactgatattggccgttcaatgctcatgcttgtggcttttggtttctacctatggattggcaattttcttgtgacaaatgcatggagttgtctggaaatatcaattcttcatttggtggtatgttgtgtgcaaaccattcttccctggaacacttcctcacaaggaatgcttattcatcaagacctatatttgtaggattaagttccattggtagaatgggctttcttagaaatcctaaagcatttttaatggtgcttaaggctgccatagagtcaacggattatatgttcatccttttctcatctggatacaagccattggattctgcaattcaatctattgcttcatcagtaaatgaatcaagaggggtggattcaccttctcttggtggtgacagcgctctcctttttaatggccgccttttctgctttttaggatcaataccgtacagttggctttttcctaggtgtgcagccgctattcaccatgctggcagtggatcaacagctgcagcactacttgctggtatccctcaggtaacatgccctttcatgatggaccaattttactggtcagagaggctacagtggttgggagtggcgcctgaacccctacaaagacaaaatctagtcccagataatgatgacgccttgagcatccacaatgctgcagatgtgctagttggagctatcaggtcagctttatcgccggaaaccaaagctcaggcggccagaattgctgataggctttcttctgaggatggaattggagaagccctcaggatattgaaggcgagagtgttgactcagaacaaaatcatcagctcattcatcgcaagtaaataattagtactgatatgatatgaggcattgatttaaaccactaaatttaagaaatggacttctaatgcaccgccccatgtaagatagagtaatttctcaaaccaatcaactttacggggcgtttggatccctttattttann

SEQ ID NO: 54621 - DNA, 2060 bp, Zea Mays
  misc_feature (2059)..(2060): n is a, c, g, or t
gtgattcggcccattgtagccccgagacagcgtccgcctacggcctatccgcgtcagcccgccggcgagtcgcgcacgagacctgcgaggcgcgatggcaggccgcggcggcgccggccggcggcctcgcgccgtcttcatggccttcggcactcagggcgacgtcttccccatagcacttttgcgtgtgaccaacaggagtatgctgtggtgttcatcactcattcagcgcaccggagtttgtcagcacatctagcagccagcagtgttagatacatgcctgtgtcaagcccgcctgtcctcgctgccgaacagttagagaatatctcaagtgattctattcaatcaaaccatgagcgtgagtccttttcaatgcggaaaaaagccattcaagcggagcacaggaaagaatgcttgtcttttgtggaagaagtttttggaaacgacccaagcatcagtggggattttattgtgatcaatttcttcgctttggaaggttggcaccttgcagaactattccaagtaaagtgcgtcattgctgctccctattttgttccatatagtgctcctacatcattcaaacgccaatttaaacaaacttttcctctactttacaagtactttcaagaagctcctgcaaatacggtctgctggactgacattatccattggatgtgggcactcttcatggaaagttggggatcatggagaaatgattgtctgaatcttagccccattcctttcacagatccagtaaccaatcttcctttgtggcatgtgcgagaggagtcacctttattactgtatggtttcagcaaagaaattgtggagtgcccaggatattggccgttcaatgctcatgcttgtggcttttggtttctacctatggattggcaattttcttgtgacaaatgcatggagttgtctggaaatatcaattcttcatttggtggtatgttgtgtgcaaaccattcttccctggaacacttcctcacaaggaatgcttattcatcaagacctatatttgtaggattaagttccattgaatgggctttcttagaaatcctaaagcatttttaatggtgcttaaggctgccatagagtcaacggattatatgttcatccttttctcatctggatacaagccattggattctgcaattcaatctattgcttcatcagtaaatgaatcaagaggggtggattcaccttctcttggtggtgacagcgctctcctttttaatggccgccttttctgctttttaggatcaataccgtacagttggctttttcctaggtgtgcagccgctattcaccatgctggcagtggatcaacagctgcagcactacttgctggtatccctcaggtgacaacaacactttctacagcttcaccccatgttttgaggctgtctttctgctgctcttttcttgtccttttatttattcgcaacctgtgatacctggatgtgtaggaagcatcaagcctggtaattctataacccaaaaaaatgttctgatgccgactcaaacaaatacgttatctcccaacttctgcattttcttgatgatgctttgagatggatccattgtactaaattttttcgtgcaggtaacatgccctttcatgatggaccaattttactggtcagagaggctacagtggttgggagtggcgcctgaacccctacaaagacaaaatctagtcccagataatgatgacgccttgagcatccacaatgctgcagatgtgctagttggagctatcaggtcagctttatcgccggaaaccaaagctcaggcggccagaattgctgataggctttcttctgaggatggaattggagaagccctcaggatattgaaggcgagagtgttgactcagaacaaaatcatcagctcattcatcgcaagtaaataattagtactgatatgatatgaggcattgatttaaaccactaaatttaagaaatggacttctaatgcaccgccccatgtaagatagagtaatttctcaaaccaatcaactttacggggcgtttggatccctttattttann

SEQ ID NO: 54622 - DNA, 1813 bp, Zea Mays
  misc_feature (1812)..(1813): n is a, c, g, or t
gtgattcggcccattgtagccccgagacagcgtccgcctacggcctatccgcgtcagcccgccggcgagtcgcgcacgagacctgcgaggcgcgatggcaggccgcggcggcgccggccggcggcctcgcgccgtcttcatggccttcggcactcagggcgacgtcttccccatagcagcgcttgctgcagcttttgcgtgtgaccaacaggagtatgctgtggtgttcatcactcattcagcgcaccggagtttgtcagcacatctagcagccagcagtgttagatacatgcctgtgtcaagcccgcctgtcctcgctgccgaacagttagagaatatctcaagtgattctattcaatcaaaccatgagcgtgagtccttttcaatgcggaaaaaagccattcaagcggagcacaggaaagaatgcttgtcttttgtggaagaagtttttggaaacgacccaagcatcagtggggattttattgtgatcaatttcttcgctttgaactattccaagtaaagtgcgtcattgctgctccctattttgttccatatagtgctcctacatcattcaaacgccaatttaaacaaacttttcctctactttacaagtactttcaagaagctcctgcaaatacggtctgctggactgacattatccattggatgtgggcactcttcatggaaagttggggatcatggagaaatgattgtctgaatcttagccccattcctttcacagatccagtaaccaatcttcctttgtggcatgtgcgagaggagtcacctttattactgtatggtttcagcaaagaaattgtggagtgcccaggatattggccgttcaatgctcatgcttgtggcttttggtttctacctatggattggcaattttcttgtgacaaatgcatggagttgtctggaaatatcaattcttcatttggtggtatgttgtgtgcaaaccattcttccctggaacacttcctcacaaggaatgcttattcatcaagacctatatttgtaggattaagttccattggtagaatgggctttcttagaaatcctaaagcatttttaatggtgcttaaggctgccatagagtcaacggattatatgttcatccttttctcatctggatacaagccattggattctgcaattcaatctattgcttcatcagtaaatgaatcaagaggggtggattcaccttctcttggtggtgacagcgctctcctttttaatggccgccttttctgctttttaggatcaataccgtacagttggctttttcctaggtgtgcagccgctattcaccatgctggcagtggatcaacagctgcagcactacttgctggtatccctcaggtaacatgccctttcatgatggaccaattttactggtcagagaggctacagtggttgggagtggcgcctgaacccctacaaagacaaaatctagtcccagataatgatgacgccttgagcatccacaatgctgcagatgtgctagttggagctatcaggtcagctttatcgccggaaaccaaagctcaggcggccagaattgctgataggctttcttctgaggatggaattggagaagccctcaggatattgaaggcgagagtgttgactcagaacaaaatcatcagctcattcatcgcaagtaaataattagtactgatatgatatgaggcattgatttaaaccactaaatttaagaaatggacttctaatgcaccgccccatgtaagatagagtaatttctcaaaccaatcaactttacggggcgtttggatccctttattttann

SEQ ID NO: 54623 - DNA, 713 bp, Zea Mays
attttggatgcttgaccatgatctgttgcttcattttaaaatgattttgttgctaacccgagcatttttgcatttgtatataaaaaataaacaaaatataatggaagtataggtatgaagtaggtccagtgagaactgggaaacagataggctgtgaaaacttgaaatgcagtaagtgacattcttctatacaatgagcacactgaatatgaaaaaaataagttacttgaagcaataaattcacagtatatgacgatgatcacaagagttaaaaataatagaatgtgtcatacatgtatctggtaatagatgggagcacccaacttttcttgtatatggacttcatcatctacaagcaaccaagaacattggactacaactccaccagtgaggcagtgaaccagttggttccattaaagcttcacactatatggctaaagtggaagaacaaccttcaacagtataattaattctaataagattataggaccaaaatctcagtaaggatctgtctggcattgtatagtggctttatgtatgttgttatacctgttgtccagttgttagacgtggaatttagtgatggggttcatgtcgagaatacgaagagatgtcaacatctccccttatccccacagctgcaacacaggcccttggacattgccttgtgtatactgtatagtttaattcattgtccaaatcaactccatcct

SEQ ID NO: 54624 - DNA, 2873 bp, Zea Mays
ctcacgctcacatgtagtgctctaagtcgacgacaaaggcgatcaataggacaaaggccttgtgcagacggatggtgcaacagattgtgcagcacagtcatcgatgcacatgggatgatgatgtatatgcaaccaccaagcagaccttgatgatggtgtggctcgacgaggcgacacagcagcagccctgttgctcgaagaagacgtgcatagtaccctgcgatggacgtcacgggagccaggtggaccacacaatcaattgtagggagttgggaccaagtacgcgcgagatggagcgacgacggaagaggtcagcagaggtgtcttgaatcctgatctatgctggtgatgacaaactgacaatatagacatgcagacgggatggttgagaagcgacgtgggaatgcatccccacaacatcgcacgcttggccaagccgcacagtcgaagatgtagatgccggtgttggagtagcacgtgaggttggcaagcaacgggtgacttagtcccgattagtgatcatgcaaaccaaaaagggtgcaacagcagcagtgggatcttccctgtgcaactcaacgggtgcacctacaacttgatcgcagactaaacagtgacaacgagtgtccaacgcccggcatgaagagcgtgctagagaagtatttttcaaggagtgggatcctcaacgaaatggataccctgacagcagtaatgctgacaaattgagaaatttcattaagcatgtgtatgtggaacggagatacacaggagaaagaagtactgataagccaccaagggcaaaggatgacaaggatgagtatagtgaaaataggagatctgatggaaattggggtggttcaagaagtccgccagatggaagttactctgatcgtcggagttatagtggacggagtgatgacagaaattccagatattcctatggggaccgtagtcctggctatgaccaaaatgactataagaaaagtcctcgctactttgaggttgtcgatgatagatctggaaaaacaactccagttcaaaggtttgaagaccgttggtcttcggagcccagaaaaccagatagtggatctccagatttccagaaagaagctgatggttctagtcctgttgtacgaccagttagggatatattgggtgacaatactcctcaacttcgggttggtgaaccgtcaaagccagctactgaacctccaaagccaagcgtagtcagaccaattgatcctccaaagccgagtgtagtcagaccaattggtcctccaaagccaaatggaaccagggcaattgatcctccaccactgacaaagacaatatctagtgccagcagcattggttcttcagaaggcacatcagaacagacaaaggtggcaagtgctgtaagtttaattgattttagtgcagatcctgaacctgcgtccacagcaccaccacaacccacccctatgccacaacaacctccatttaacgcagcagcaccacagcctattcttgaacaagggaaaagtgatccttctgtcagtggtggtgactgggcatcttttgattcttttggccaacaacaaacaccacaaacaagcagcagtgtaaatcctcttgagtctgcacttgcacagctgtcattctctgaagcaccctctgcaccaaatgcgtcagcttatcctgtttctcttgatcccactttgaaagcaaatgatggaggacattcatctgtgctagaccagtcacattccttgtttgatgcgccctttggaatctcaggcaaccaggcctcaacagtaatgtccggccaaggatcatcagttcaacaatctcctctagctgccccaacagctggacctccatctcaagctactgcaaatccacaaggaaccagtggtattcaaggagcagcctcttctactgacagtaaattcagtagcaggaaagaacttccagtggatatctttactgcactatatccaccatcaactcaaatgatgcctggctggcagagagctccccattttggaatgggatacgccatgcaatatccacctggagtgggattgcaatcatatcttcacggagcatttcctcagcctacatatcagcaacctgtatattcacaacatgcatattcccacccccaacctgtgaaagcttcaaacccttttgatcttgggaatgagtcagctcatattcaagctcacatggcaacaaggtttgggttccttcaacatgggttttgatcaggaagctcctctcggatacccccaggcaaacacctcaccttcctacggctccgttggtggtggtagtaatccatttggctgaaagaagtgtggaaatacctgatcgttcatcactagacgaagggtctgcagcactcagggggacagacatgcatcgaagccctggagagattgtgtttcatacaacaaggtggtgtatcttgtcggccgtagtctgttgtacaacttgtttccaaaggcttaatgatcgaatataactctgttttggagggcctaagctgatttcagcctcattccatgtacattgtgtctggcgttctgcttggattgcacagtatgtatattgtgtttcttcgttgttgtcatggacagtgtcagctcctgttttagtacaagttgtttctagtgcacttgattattcgatttaatgtggatgattagtacactatagatcagatgtagaatcgtgatcgatcaattttgtggtttctttttacttgctatcttagtaccacttaattttgtggtgatcttttgtaagggttattttcttgtggaactcattacttgttatctacattttgtaatgcaattcaaggtatgttcaacttaactaatttctccctc

SEQ ID NO: 54625 - DNA, 3050 bp, Zea Mays
ctcacgctcacatgtagtgctctaagtcgacgacaaaggcgatcaataggacaaaggccttgtgcagacggatggtgcaacagattgtgcagcacagtcatcgatgcacatgggatgatgatgtatatgcaaccaccaagcagaccttgatgatggtgtggctcgacgaggcgacacagcagcagccctgttgctcgaagaagacgtgcatagtaccctgcgatggacgtcacgggagccaggtggaccacacaatcaattgtagggagttgggaccaagtacgcgcgagatggagcgacgacggaagaggtcagcagaggtgtcttgaatcctgatctatgctggtgatgacaaactgacaatatagacatgcagacgggatggttgagaagcgacgtgggaatgcatccccacaacatcgcacgcttggccaagccgcacagtcgaagatgtagatgccggtgttggagtagcacgtgaggttggcaagcaacgggtgacttagtcccgattagtgatcatgcaaaccaaaaagggtgcaacagcagcagtgggatcttccctgtgcaactcaacgggtgcacctacaacttgatcgcagactaaacagtgacaacgagtgtccaacgcccggcatgaagagcgtgctagagaagtatttttcaaggagtgggatcctcaacgaaatggataccctgacagcagtaatgctgacaaattgagaaatttcattaagcatgtgtatgtggaacggagatacacaggagaaagaagtactgataagccaccaagggcaaaggatgacaaggatgagtatagtgaaaataggagatctgatggaaattggggtggttcaagaagtccgccagatggaagttactctgatcgtcggagttatagtggacggagtgatgacagaaattccagatattcctatggggaccgtagtcctggctatgaccaaaatgactataagaaaagtcctcgctactttgaggttgtcgatgatagatctggaaaaacaactccagttcaaaggtttgaagaccgttggtcttcggagcccagaaaaccagatagtggatctccagatttccagaaagaagctgatggttctagtcctgttgtacgaccagttagggatatattgggtgacaatactcctcaacttcgggttggtgaaccgtcaaagccagctactgaacctccaaagccaagcgtagtcagaccaattgatcctccaaagccgagtgtagtcagaccaattggtcctccaaagccaaatggaaccagggcaattgatcctccaccactgacaaagacaatatctagtgccagcagcattggttcttcagaaggcacatcagaacagacaaaggtggcaagtgctgtaagtttaattgattttagtgcagatcctgaacctgcgtccacagcaccaccacaacccacccctatgccacaacaacctccatttaacgcagcagcaccacagcctattcttgaacaagggaaaagtgatccttctgtcagtggtggtgactgggcatcttttgattcttttggccaacaacaaacaccacaaacaagcagcagtgtaaatcctcttgagtctgcacttgcacagctgtcattctctgaagcaccctctgcaccaaatgcgtcagcttatcctgtttctcttgatcccactttgaaagcaaatgatggaggacattcatctgtgctagaccagtcacattccttgtttgatgcgccctttggaatctcaggcaaccaggcctcaacagtaatgtccggccaaggatcatcagttcaacaatctcctctagctgccccaacagctggacctccatctcaagctactgcaaatccacaaggaaccagtggtattcaaggagcagcctcttctactgacagtaaattcagtagcaggaaagaacttccagtggatatctttactgcactatatccaccatcaactcaaatgatgcctggctggcagagagctccccattttggaatgggatacgccatgcaatatccacctggagtgggattgcaatcatatcttcacggagcatttcctcagcctacatatcagcaacctgtatattcacaacatgcatattcccacccccaacctgtgaaagcttcaaacccttttgatcttgggaatgagtcagctcatattcaagctcacatgcccccatctgggccacctggagcatcagcaggctcagctccccaaaccttaattggtaactctagttttggtgttcctccacagcagcctcaccagctctatcagtcagaagcgcatctaacaagttccgaacagcatgcccatgcctgaacaacaacctaatagcatgcttgcaacgcaacaaggtttgggttccttcaacatgggttttgatcaggaagctcctctcggatacccccaggcaaacacctcaccttcctacggctccgttggtggtggtagtaatccatttggctgaaagaagtgtggaaatacctgatcgttcatcactagacgaagggtctgcagcactcagggggacagacatgcatcgaagccctggagagattgtgtttcatacaacaaggtggtgtatcttgtcggccgtagtctgttgtacaacttgtttccaaaggcttaatgatcgaatataactctgttttggagggcctaagctgatttcagcctcattccatgtacattgtgtctggcgttctgcttggattgcacagtatgtatattgtgtttcttcgttgttgtcatggacagtgtcagctcctgttttagtacaagttgtttctagtgcacttgattattcgatttaatgtggatgattagtacactatagatcagatgtagaatcgtgatcgatcaattttgtggtttctttttacttgctatcttagtaccacttaattttgtggtgatcttttgtaagggttattttcttgtggaactcattacttgttatctacattttgtaatgcaattcaaggtatgttcaacttaactaatttctccctc

SEQ ID NO: 54626 - DNA, 4810 bp, Zea Mays
ttcttttccccctcccctgttaaacacgcgcagcgaagcaacgcagcagcaacaaaccttttcgctcgcagctgccaccacctcgtcgtctcgcctccccctcggcctccgcacgcgcgcgcgggatctcgccctcgcccgcctcgccgctcgcgcgcgcgcaccgaggaagggcgcacccacccgcaggcttcctggcgggccgatacggcggcgatggcgagccgggtcaaggaggacgagaggcacgagaagatccttcgcggcctgctcaagctgcccgccaacaagcgctgcatcaactgtaacaatttgggaccacaatatgcctgcacaaatttctggaccttcgtttgtaccaattgcagtggagcacatcgggagttcacgcatcgagtaaaatcggtttccatggccaaatttactgcacaagaagttactgcccttcaagaaggggggaatgaggtaacatgtatctgtttttttttctacttttcccatcaatcccatgtcttctattcaacacggcattgattttgaaggagaatagaattggtgtaattgaatggatgtattgcaatattgcattgagcccttagtcagtttatgtagagtacaagacttgggagacaaggaacacatggatacatgtggcggtctacgatacacaatatctaaactaccaaatatactctaacaaccctccgcagtcgtagcgggaacatcgcagacgattggactggagaagaggagccaaaggctaacattctcctgaagtcgtagtgacattgcaatgcaaatgttgcaactagagtagaaaccaacaaggagcttatgtggttgtgccaatgcgaggtagccgagcataaggcacaattgatgtggttgaaggagtcgtgctgaagatagcgaggccgacatagttgtggtgaggttgctgtgttggtgtagttgcaagcgcataagaggtgtcaaggagatgatgaagacatgtctgggtagtcgtcgtggaaggaggctatactgaggttcatacagtcagggctgccaaagacgaaggtgaaaggagacgatgcaatcgaggcagatggggtgggaacatgagagttgatgccgatgtagatgcagtcaagttgcctgaaccgaggcttgggctggatttgccagactcagcaacgcgccagacacgaaagcaagtgtcgttgttgccaataccggacgtacaaggtagagggaccatcatagaagtagtagcgttgattgttgtagaacagtagggtagaaggtatggatgcagcacacagttaacggaatagacgaagtggtggggacaagacgaagatgctggtgatgttgtgttggacggagaagcagtgagggagtggatgcgttgaacccgaaggcaagcagtccgggctggcgatggatgggcagcggtgctttcgcgcacaaggcctcacgctcacatgtagtgctctaagtcgacgacaaaggcgatcaataggacaaaggccttgtgcagacggatggtgcaacagattgtgcagcacagtcatcgatgcacatgggatgatgatgtatatgcaaccaccaagcagaccttgatgatggtgtggctcgacgaggcgacacagcagcagccctgttgctcgaagaagacgtgcatagtaccctgcgatggacgtcacgggagccaggtggaccacacaatcaattgtagggagttgggaccaagtacgcgcgagatggagcgacgacggaagaggtcagcagaggtgtcttgaatcctgatctatgctggtgatgacaaactgacaatatagacatgcagacgggatggttgagaagcgacgtgggaatgcatccccacaacatcgcacgcttggccaagccgcacagtcgaagatgtagatgccggtgttggagtagcacgtgaggttggcaagcaacgggtgacttagtcccgattagtgatcatgcaaaccaaaaagggtgcaacagcagcagtgggatcttccctgtgcaactcaacgggtgcacctacaacttgatcgcagactaaacagtgacaacgagtgtccaacgcccggcatgaagaggtgggcgcctaaacagtggcgttgcccctggtggagataaatctctccccgggggtgcgtggtgcagaatctatcgctggctagggttagatctaaaccgaacccgggcaattgataccatggaggaaaataaaattgttgtaattggatggatgcattgcattgagtccttaggtggtttatatagagtacaggactaggaaacaaggcaacccatggatacatatgatagtctacgatacacaatatctaaactaccaaatataacagattttacttgacttgtagcgtgctagagaagtatttttcaaggagtgggatcctcaacgaaatggataccctgacagcagtaatgctgacaaattgagaaatttcattaagcatgtgtatgtggaacggagatacacaggagaaagaagtactgataagccaccaagggcaaaggatgacaaggatgagtatagtgaaaataggagatctgatggaaattggggtggttcaagaagtccgccagatggaagttactctgatcgtcggagttatagtggacggagtgatgacagaaattccagatattcctatggggaccgtagtcctggctatgaccaaaatgactataagaaaagtcctcgctactttgaggttgtcgatgatagatctggaaaaacaactccagttcaaaggtttgaagaccgttggtcttcggagcccagaaaaccagatagtggatctccagatttccagaaagaagctgatggttctagtcctgttgtacgaccagttagggatatattgggtgacaatactcctcaacttcgggttggtgaaccgtcaaagccagctactgaacctccaaagccaagcgtagtcagaccaattgatcctccaaagccgagtgtagtcagaccaattggtcctccaaagccaaatggaaccagggcaattgatcctccaccactgacaaagacaatatctagtgccagcagcattggttcttcagaaggcacatcagaacagacaaaggtggcaagtgctgtaagtttaattgattttagtgcagatcctgaacctgcgtccacagcaccaccacaacccacccctatgccacaacaacctccatttaacgcagcagcaccacagcctattcttgaacaagggaaaagtgatccttctgtcagtggtggtgactgggcatcttttgattcttttggccaacaacaaacaccacaaacaagcagcagtgtaaatcctcttgagtctgcacttgcacagctgtcattctctgaagcaccctctgcaccaaatgcgtcagcttatcctgtttctcttgatcccactttgaaagcaaatgatggaggacattcatctgtgctagaccagtcacattccttgtttgatgcgccctttggaatctcaggcaaccaggcctcaacagtaatgtccggccaaggatcatcagttcaacaatctcctctagctgccccaacagctggacctccatctcaagctactgcaaatccacaaggaaccagtggtattcaaggagcagcctcttctactgacagtaaattcagtagcaggaaagaacttccagtggatatctttactgcactatatccaccatcaactcaaatgatgcctggctggcagagagctccccattttggaatgggatacgccatgcaatatccacctggagtgggattgcaatcatatcttcacggagcatttcctcagcctacatatcagcaacctgtatattcacaacatgcatattcccacccccaacctgtgaaagcttcaaacccttttgatcttgggaatgagtcagctcatattcaagctcacatgcccccatctgggccacctggagcatcagcaggctcagctccccaaaccttaattggtaactctagttttggtgttcctccacagcagcctcaccagctctatcagtcagaagcgcatctaagccattttatgatgcagcaagttccgaacagcatgcccatgcctgaacaacaacctaatagcatgcttgcaacgcaacaaggtttgggttccttcaacatgggttttgatcaggaagctcctctcggatacccccaggcaaacacctcaccttcctacggctccgttggtggtggtagtaatccatttggctgaaagaagtgtggaaatacctgatcgttcatcactagacgaagggtctgcagcactcagggggacagacatgcatcgaagccctggagagattgtgtttcatacaacaaggtggtgtatcttgtcggccgtagtctgttgtacaacttgtttccaaaggcttaatgatcgaatataactctgttttggagggcctaagctgatttcagcctcattccatgtacattgtgtctggcgttctgcttggattgcacagtatgtatattgtgtttcttcgttgttgtcatggacagtgtcagctcctgttttagtacaagttgtttctagtgcacttgattattcgatttaatgtggatgattagtacactatagatcagatgtagaatcgtgatcgatcaattttgtggtttctttttacttgctatcttagtaccacttaattttgtggtgatcttttgtaagggttattttcttgtggaactcattacttgttatctacattttgtaatgcaattcaaggtatgttcaacttaactaatttctccctc

SEQ ID NO: 54627 - DNA, 3051 bp, Zea Mays
cgaacccgaactgtctctgccacgcgggtcccataagccccgcactctagaaaccgcctccccggcgaccggctgcacccggtcccagccagcggctgaccggcagccttcccgctcggcgctcccttcttctcacctctccgcaaaccccacgacgaaaaacttcttttccccctcccctgttaaacacgcgcagcgaagcaacgcagcagcaacaaaccttttcgctcgcagctgccaccacctcgtcgtctcgcctccccctcggcctccgcacgcgcgcgcgggatctcgccctcgcccgcctcgccgctcgcgcgcgcgcaccgaggaagggcgcacccacccgcaggcttcctggcgggccgatacggcggcgatggcgagccgggtcaaggaggacgagaggcacgagaagatccttcgcggcctgctcaagctgcccgccaacaagcgctgcatcaactgtaacaatttgggaccacaatatgcctgcacaaatttctggaccttcgtttgtaccaattgcagtggagcacatcgggagttcacgcatcgagtaaaatcggtttccatggccaaatttactgcacaagaagttactgcccttcaagaaggggggaatgagcgtgctagagaagtatttttcaaggagtgggatcctcaacgaaatggataccctgacagcagtaatgctgacaaattgagaaatttcattaagcatgtgtatgtggaacggagatacacaggagaaagaagtactgataagccaccaagggcaaaggatgacaaggatgagtatagtgaaaataggagatctgatggaaattggggtggttcaagaagtccgccagatggaagttactctgatcgtcggagttatagtggacggagtgatgacagaaattccagatattcctatggggaccgtagtcctggctatgaccaaaatgactataagaaaagtcctcgctactttgaggttgtcgatgatagatctggaaaaacaactccagttcaaaggtttgaagaccgttggtcttcggagcccagaaaaccagatagtggatctccagatttccagaaagaagctgatggttctagtcctgttgtacgaccagttagggatatattgggtgacaatactcctcaacttcgggttggtgaaccgtcaaagccagctactgaacctccaaagccaagcgtagtcagaccaattgatcctccaaagccgagtgtagtcagaccaattggtcctccaaagccaaatggaaccagggcaattgatcctccaccactgacaaagacaatatctagtgccagcagcattggttcttcagaaggcacatcagaacagacaaaggtggcaagtgctgtaagtttaattgattttagtgcagatcctgaacctgcgtccacagcaccaccacaacccacccctatgccacaacaacctccatttaacgcagcagcaccacagcctattcttgaacaagggaaaagtgatccttctgtcagtggtggtgactgggcatcttttgattcttttggccaacaacaaacaccacaaacaagcagcagtgtaaatcctcttgagtctgcacttgcacagctgtcattctctgaagcaccctctgcaccaaatgcgtcagcttatcctgtttctcttgatcccactttgaaagcaaatgatggaggacattcatctgtgctagaccagtcacattccttgtttgatgcgccctttggaatctcaggcaaccaggcctcaacagtaatgtccggccaaggatcatcagttcaacaatctcctctagctgccccaacagctggacctccatctcaagctactgcaaatccacaaggaaccagtggtattcaaggagcagcctcttctactgacagtaaattcagtagcaggaaagaacttccagtggatatctttactgcactatatccaccatcaactcaaatgatgcctggctggcagagagctccccattttggaatgggatacgccatgcaatatccacctggagtgggattgcaatcatatcttcacggagcatttcctcagcctacatatcagcaacctgtatattcacaacatgcatattcccacccccaacctgtgaaagcttcaaacccttttgatcttgggaatgagtcagctcatattcaagctcacatgcccccatctgggccacctggagcatcagcaggctcagctccccaaaccttaattggtaactctagttttggtgttcctccacagcagcctcaccagctctatcagtcagaagcgcatctaagccattttatgatgcagcaagttccgaacagcatgcccatgcctgaacaacaacctaatagcatgcttgcaacgcaacaaggtttgggttccttcaacatgggttttgatcaggaagctcctctcggatacccccaggcaaacacctcaccttcctacggctccgttggtggtggtagtaatccatttggctgaaagaagtgtggaaatacctgatcgttcatcactagacgaagggtctgcagcactcagggggacagacatgcatcgaagccctggagagattgtgtttcatacaacaaggtggtgtatcttgtcggccgtagtctgttgtacaacttgtttccaaaggcttaatgatcgaatataactctgttttggagggcctaagctgatttcagcctcattccatgtacattgtgtctggcgttctgcttggattgcacagtatgtatattgtgtttcttcgttgttgtcatggacagtgtcagctcctgttttagtacaagttgtttctagtgcacttgattattcgatttaatgtggatgattagtacactatagatcagatgtagaatcgtgatcgatcaattttgtggtttctttttacttgctatcttagtaccacttaattttgtggtgatcttttgtaagggttattttcttgtggaactcattacttgttatctacattttgtaatgcaattcaaggtatgttcaacttaactaatttctccctc

SEQ ID NO: 54628 - DNA, 3867 bp, Zea Mays
cacgctgtttgcgcgcagcacctagcaggatgcggatgcacagacctgctcgcgcgtctcatccgcacgcacgcacccacccacaagcaaatggaaaaataaaatcaacgagacctgctctcacatcgctaaccctaaacccccaaatcgcccaccttccgatcgccatcttcgccgccgccgccaccaccacggggcttaccggctggtgccgctgagcgctgtgctcgccgcgggccaccgcccagccccacggcttccctcgagttgcagtaaacaacactgctatttgtgccaagaattttgggagttattggcataatggagttttcaaagcaagggcaggcacccgtgccaaacaacatcggatcacaaccgctgccctcttcaaatgtccaatctaatcaaacagagcgtccatcaatgttttatccatcatcattgcctggtgactggagttcgcagcagatgttctccatgggaacctcagtaccagttagctcatattgtattgtccccatgaatcagcaaccagtccagctaggtgcttccaggccagagatttcacgtcctttggggccacaacctttgctaagtagggtatcattgaggccaccccagcaggtgctaaatattcatacatctttgccaggaatggctggatcgcaacactcaccatctatggcaggcaggagatcacaacagacaattggttctccaaaggttcaaatgctgaaatctccatcattccagtcatctaataagcgatctgcacagaaggagccaccgtcaaaggttcagcatcagcaacttgaatctgtgaggtccaagttcagggagtcacttgttgctgccctgagtttggattctgatcagcagaataagattcagtctgataatgtgcagtctgctgggtctatagataatttcaaaccaggagcaggagatgcggtacaggatttagtggcaaccacatcaaaagatgtgtgcacaaccaattcaggtgtagacacaactgtagctcccagtagatgtgaggaaaatgagaagttaagcagtgatttagctttagagatgaccacaagcataaatgatggcatgcagcaacagtcaattcaggtttcctcagaagatgacttattgggtcagtgtatggttgcagatgaacttttgcaaggtcatgggcttagttgggtttctgatcttgatgctgggatttctgaacttaacgcagaacctaatgctctaaaaaggccgcggacttctaatgtggagtctgagtcaaaaagaataaagtctgccaatgagttagcaatggagaaggagaaatttaatcaaagagctgaaattctggcgtttagaattgaagaggagctgttcaagttgtttggtggagtaaataagaagtacaaggaaaagggcagatctcttctgtttaatttgaaagacaaaagcaaccctgagttaagagagagggtcttgtctggagatattgtgcctgaacgactttgttcaatgactgcagaagaacttgcctccaaagaactctcagagtggcggctggctaaagctgaggagtttgcacagatggttgtccttccgactatggaggttgaccctaggcgtttggttagaaaaactcacaaaggagagttccaagttgaagttgaagagccagatggtttctcagtggaggttgaacttgggagtaatgttactaatattccatcaaaagctgttgaagatcagacaaagtctaatggaacagctggtaaagtagatgttcaagaaaaggacaaagcatctgatagcgcttcacacgatgaggatggcagaacaggcaacaatggtataccaggtgatgtagaatgtatcgataatgagaaagctgatctcatgcaggaacttatcttggatgatgtgaaggacactgtaaacctcccaccaattccttcgttagatgaattcatgcagggcttagattctgagccaccttttgttgatatctcagttgggactcctcaagaagatgtcaatgactctgacgaacttgacaccaccatggagccttcggatcttccagagacagaagataatgcatctgcaccagaaaaaactgaatctaaatctgataagtcatctgcacaggttaacagcgagcacaggttagagtcaccaggacatatagcggttcaaaattcggatcttactgaaccacgtgatggagagctgagcaaatcctccccatcccctgacaaagatgaagcaaagaaaacaactgttgataatgcctctaattccgattctgttcatcacaatcaggcagccagtctccctatgatacgtgagagcatttgggagggtgcaattcagctgaccgtatcttcgctctgtaatgttgttgctattttcaaaagtggtgaaaagccgtcattaaaagattggcgtagctttattgagataaagggaagagttaaacttagtgcttttcaagagtttgtcgatcagcttcccaaatctaaaagccgcgctataatgataacggagctgtgttggaaggagggttcatcggaaagtggccgccaaaatatcttgcagactatcgatgcatatatttcagatgagagagtaggattagctgagcctgcagaaggaatagagctgtacctgtgccctcctcatgggaaaaccgtggaaatcctctcacggcacttgccaaaggagcaccaagagagccttgctgtggcgggatcatccttcatcggagttgtggtatggcggaggcccagcatttccagggcacccacctcccaccacaacaacaggcatgatggttccaagaggcagtcgatcctagggaaaccacaggttacaaatccggccgcaaggccctccctacctcccaactcatacggcgcaccaccaggctttaccagccagcgcgaagaggaagatgtaactgatgacgcccctccaggctttggacccggtgttgctagggatgaggatgatcttcctgaatttaattttgttaaatcgtcacaccatgccgcaaatgtaactgcgcatgcatacaagggcccgtggccacatgtaccaccaccctctgctcgcccagcagagcaaatgagggaactggttcagaagtatggtaaaagatcatctgttcaagaagccccccgtgcctgggatgacgacgacgatgacataccggagtggaaccccacccaccagacgattaagcagcctccactgccgcacgccccacagcaactgccgttgcctccgcctcccgtccagcagatgaacgccgcctaccagcagcagtaccacatcccaagtgctgtgcagcctcaggttcccatcacttcgcttccccatgcctatctccggacccagcagcctcagcctgggcaggcatggcagcagccgagcaatgcttggtggccagcgcagggcgttgctgcccctgccgcacagcaaccccagtatggggtagtgcctggcagcagtggcgtccagggctacgactctagcaacgcgggtggtatggcatggaggccgagatagagcattgtaaaattcagctggttttctattgtagctgtggtcaacctgacgagcgtccgttgtagggtgtctttttttttttattatggttggctgttcatgtaagtataaatggtgtacaaccgtacaaaggatgtaatcttgatagactagatagatagttgctggttgtacccgttcatccgttaggacttgctgcaatcgttttgaacagcagtcgctcttcacttaatgctcttattaggcactgccaacaatagcaataatgtaccgcaaagtttctaaatcattttatgc

SEQ ID NO: 54629 - DNA, 3762 bp, Zea Mays
cacgctgtttgcgcgcagcacctagcaggatgcggatgcacagacctgctcgcgcgtctcatccgcacgcacgcacccacccacaagcaaatggaaaaataaaatcaacgagacctgctctcacatcgctaaccctaaacccccaaatcgcccaccttccgatcgccatcttcgccgccgccgccaccaccacggggcttaccggctggtgccgctgagcgctgtgctcgccgcgggccaccgcccagccccacggcttccctcgagatatctgcatttgaagttgcagtaaacaacactgctatttgtgccaagaattttgggagttattggcataatggagttttcaaagcaagggcaggcacccgtgccaaacaacatcggatcacaaccgctgccctcttcaaatgtccaatctaatcaaacagagcgtccatcaatgttttatccatcatcattgcctggtgactggagttcgcagcagatgttctccatgggaacctcagtaccagttagctcatattgtattgtccccatgaatcagcaaccagtccagctaggtgcttccaggccagagatttcacgtcctttggggccacaacctttgctaagtagggtatcattgaggccaccccagcaggtgctaaatattcatacatctttgccaggaatggctggatcgcaacactcaccatctatggcaggcaggagatcacaacagacaattggttctccaaaggttcaaatgctgaaatctccatcattccagtcatctaataagcgatctgcacagaaggagccaccgtcaaaggttcagcatcagcaacttgaatctgtgaggtccaagttcagggagtcacttgttgctgccctgagtttggattctgatcagcagaataagattcagtctgataatgtgcagtctgctgggtctatagataatttcaaaccaggagcaggagatgcggtacaggatttagtggcaaccacatcaaaagatgtgtgcacaaccaattcaggtgtagacacaactgtagctcccagtagatgtgaggaaaatgagaagttaagcagtgatttagctttagagatgaccacaagcataaatgatggcatgcagcaacagtcaattcaggtttcctcagaagatgacttattgggtcagtgtatggttgcagatgaacttttgcaaggtcatgggcttagttgggtttctgatcttgatgctgggatttctgaacttaacgcagaacctaatgctctaaaaaggccgcggacttctaatgtggagtctgagtcaaaaagaataaagtctgccaatgagttagcaatggagaaggagaaatttaatcaaagagctgaaattctggcgtttagaattgaagaggagctgttcaagttgtttggtggagtaaataagaagtacaaggaaaagggcagatctcttctgtttaatttgaaagacaaaagcaaccctgagttaagagagagggtcttgtctggagatattgtgcctgaacgactttgttcaatgactgcagaagaacttgcctccaaagaactctcagagtggcggctggctaaagctgaggagtttgcacagatggttgtccttccgactatggaggttgaccctaggcgtttggttagaaaaactcacaaaggagagttccaagttgaagttgaagagccagatggtttctcagtggaggttgaacttgggagtaatgttactaatattccatcaaaagctgttgaagatcagacaaagtctaatggaacagctggtaaagtagatgttcaagaaaaggacaaagcatctgatagcgcttcacacgatgaggatggcagaacaggcaacaatggtataccaggtgatgtagaatgtatcgataatgagaaagctgatctcatgcaggaacttatcttggatgatgtgaaggacactgtaaacctcccaccaattccttcgttagatgaattcatgcagggcttagattctgagccaccttttgttgatatctcagttgggactcctcaagaagatgtcaatgactctgacgaacttgacaccaccatggagccttcggatcttccagagacagaagataatgcatctgcaccagaaaaaactgaatctaaatctgataagtcatctgcacaggttaacagcgagcacaggttagagtcaccaggacatatagcggttcaaaattcggatcttactgaaccacgtgatggagagctgagcaaatcctccccatcccctgacaaagatgaagcaaagaaaacaactgttgataatgcctctaattccgattctgttcatcacaatcaggcagccagtctccctatgatacgtgagagcatttgggagggtgcaattcagctgaccgtatcttcgctctgtaatgttgttgctattttcaaaagataacggagctgtgttggaaggagggttcatcggaaagtggccgccaaaatatcttgcagactatcgatgcatatatttcagatgagagagtaggattagctgagcctgcagaaggaatagagctgtacctgtgccctcctcatgggaaaaccgtggaaatcctctcacggcacttgccaaaggagcaccaagagagccttgctgtggcgggatcatccttcatcggagttgtggtatggcggaggcccagcatttccagggcacccacctcccaccacaacaacaggcatgatggttccaagaggcagtcgatcctagggaaaccacaggttacaaatccggccgcaaggccctccctacctcccaactcatacggcgcaccaccaggctttaccagccagcgcgaagaggaagatgtaactgatgacgcccctccaggctttggacccggtgttgctagggatgaggatgatcttcctgaatttaattttgttaaatcgtcacaccatgccgcaaatgtaactgcgcatgcatacaagggcccgtggccacatgtaccaccaccctctgctcgcccagcagagcaaatgagggaactggttcagaagtatggtaaaagatcatctgttcaagaagccccccgtgcctgggatgacgacgacgatgacataccggagtggaaccccacccaccagacgattaagcagcctccactgccgcacgccccacagcaactgccgttgcctccgcctcccgtccagcagatgaacgccgcctaccagcagcagtaccacatcccaagtgctgtgcagcctcaggttcccatcacttcgcttccccatgcctatctccggacccagcagcctcagcctgggcaggcatggcagcagccgagcaatgcttggtggccagcgcagggcgttgctgcccctgccgcacagcaaccccagtatggggtagtgcctggcagcagtggcgtccagggctacgactctagcaacgcgggtggtatggcatggaggccgagatagagcattgtaaaattcagctggttttctattgtagctgtggtcaacctgacgagcgtccgttgtagggtgtctttttttttttattatggttggctgttcatgtaagtataaatggtgtacaaccgtacaaaggatgtaatcttgatagactagatagatagttgctggttgtacccgttcatccgttaggacttgctgcaatcgttttgaacagcagtcgctcttcacttaatgctcttattaggcactgccaacaatagcaataatgtaccgcaaagtttctaaatcattttatgc

SEQ ID NO: 54630 - DNA, 1192 bp, Zea Mays
agatcagatccgacaactcgccctcccgtctttccctctctctcctcccaccacacccggtcgtcgttgtcgcggcgtgagcgagcgagaggggaaaacccaaaaccctagcacccccgccccgtcgccgacggccgccggagtagagagatggcggtggacgaggtgaactcggtctacgtcggcggccttccctacgaggccaacgaggagatgcttcgcgacgccttcgggtactacggcaccatcgtctccgtcaaggtgattaatgatcatgctgtcaaaggcaagtgttatggttttgttactttcactcaccccagagctgctgagcaagcaattgcgggcatggacggcaagaaattaggcaaccgtattgttcgagtaaatgaagtgcgtacaagaggcccccgcgattttggccgagatggtttcagacgagatccaagaaggtatggtagagatccatactgggacagaagggacagggaacggagctatgatcgtgaaagagatccctaccatgacagggatagtgatagatcccgtgagcatgatagagaaagagattatgaacatggtggatttaatagagaaattgactatcccatggaccgagatcgtgaaggagatgagagacgtcctagagaacatgatcgtacagcagaaatgcataatgtggattcagataatgacaaagataaggaacatgtatcaagaaaaagccgcccaaaaggtcgtgatagcagagatttatcaagttccagtgatggtcttcaaaatgatggaaaacatcagttggataaaactattcagatgcgcgaggaccttgaaaatgaggttaaccagattaaggataaaatatctgggaaagaacagcacattgcagatttgcagaagaaagctcagaaactagaggatgaactggttgccgcacggaaagtatcttcagaacgacagttggcggttacagacctgtacaaacatttcctccaacttcaggactacaatgatagggtcaaaacagctgaacagaggctgcagtctctcgttgatgctgccttggtcgagctcgacatggccgaagatgctactaccagagatggctcgatgtacgagaacggcgtgctttgaacacccaactgccatgggtttgtgtggttgctgatttgttagatttgtagtttgagca

SEQ ID NO: 54631 - DNA, 1718 bp, Zea Mays
ctaatctctgcgccaccgctccatccaccaccatcctggagtataagacagcggcctccccttcccaagcccgctgcttgccgggcgcctgaccttatctcctcctccaccccgagatatttccacgtctcctccgccaccatggagtccggcctcgttgcaagccaccgcctccgcgtcccgcccccctccgcctccgccgggcaccaccacctcatccgccactgcctcccgcccctccgcgccgcctccgccgccgccgccgcagtcccagcgcccggggacgacgcgtcgcccaagttcctgggcgtggagacgaagacaatcaagaagatcgtgcccctggggctcatgttcttctgcatcctcttcaactacaccatcctgcgggataccaaggacgtgctcgtcgtcaccgccaagggcagcagcgccgagatcatcccgttcctcaagacctgggtcaacctgcccatggcagtcggcttcatgctcctctacaccaagctcgccgatgtcctctccaaggaggcgctcttctacgccgtcatcttcccgttcatcgccttcttcggcgccttcgcctacgtgctctaccccatgcgcgacgccatccaccccactgcgctcgccgatcgcctcctcgcctcgctcgggcccagcttcctcggacccgttgccatcctccgcgtctggagcttctgcctcttctacgtcatggccgagctctggggcagtgtcgtcatatccgtccttttctgggggtttgcaaatcagattactacagttgaagaggccaaagagttctacccgctgtttgggcttggggccaatgtggccctcatcttctctgggcgcacggtgaaatatttctcaaacatgaggaagaatttgggtcctggagtggatggttgggcaatttcgttgaaggccatgatgagcatagtggttgtactgggtcttgtcatcaccggtatctattggggagtgaacaagtttgttattgataactcatctgtgtgcaaccccttggggaaatctggaggtgctctgatccagcagttcatgatcctgtcatttggttctctcgcgaactcgacaccctaccttggcggaatactcctggtgattgtccttgcatggctgggtgctgtaaggtccctcgacctgcagttctcttccctggcgaagcaagagctcggcagagagaagctgctgaaaacgcaggccgtcgaaacggtcgccgaagtagtcggcactggaaacggttctctccaagaaactctagctagcgagccgtctgcaaatggcgcggccaccaaacagtcgcaagaacctgagagcacagcctcagagaaatcaggccagcagtctcaataagttctcccccccaagaaatttagctagcacgagcctttggaggaaccggaagtttcttatctggagctactgaagaaggcaggaatcatgccagaaataagaaggcctgttcttcttctgttgttgtagtgtttttgtttttaaacttcgccgtatctgtagctgtttgtttcattccataggtatgaactgtttatgttcgttattaaaattttgggaggtctgcttcatcgtaatcttcattagcagctggtccttgttgtgaaaaaaaaatattttgcatggttttgatagtcatgggtaccatatatccaatttattcatattcctactactaa

SEQ ID NO: 54632 - DNA, 600 bp, Zea Mays
gacaggaacaagtagctagtacttttttactgtctgttcaagtcactcgcacaatgcagtcatccatcaaatcatccttgtacaagttgcccagacaaaccatgttatttttctttccaatcgagaaaacgacaggcgaacgatctaaaagtgctatacatagatttgcctgcaattggatactaatgtaaaattattggtctagctagtgctagttcctttcgacacctatggctatgggctaggatgaaaacgacgagctagctagatatgctcgatcgttccaagcgggccgactagcgcgcgcagccgcagccccgccgatgtggttggtggtggtggtggaactggtgggcaataatgcaaaatgatcgagcggatggctggctgtgggatgggtgtccatgttcaccacgaacaagattctgcaccagtactgtgtactgccattgcgagggtagtccatggctagctccatgcatgcactgttctagcctaagcctaaccttttcttgcctccacttgcccgaagctctcgatcagctgcgtcaggttctcatacgaggagcctcctttctccatggcgccgtgagctttctc

SEQ ID NO: 54633 - DNA, 5584 bp, Zea Mays
atttaggaagtcttttagagaactactggagttgctctaagcaccgttcatttattcagtgaaaaaacccagaaaagctgcggcacattgcgcaggcaaaaataatctgttctaacctgtgtgtgtccgcgcgctcagccttcctcgctctcgccgcagtcaccgcgcctgtctgcgttcgccgtcgcggctgtactcgtcgctcgttgatccggccggggatccaacatctggtatcagagggcggtttatgttctacggtggatctgtctgtccaccgcgagaaccccaaggaagaagttcgtcgttcctcggagatcgcctgtgaaggatcaggagatgggtgacaccaggaccagttcaagcgcggcgtcgtccggcatcaaggagagttccctggtatggcctatgttgactcgatcgaattatgcagagtgggccatgttaatgcagattaactatgaggcaatggaaatctgggatgtcattgatccgggaaccactgtcaagcgctcgcaagatcgacaggcaatgggtgctctgatgagatccgtgccaaaggagatgtggggaacccttggcgccaaaaggacagtgaaagaggcatgggaggctgtgatgaacatgaggattggagccgatcgagttaaagaggtaaacgtgcagaaacttttaaaagaatttgaaaatattgagttcaaagatggagagagtgttgaggattttgggatgagaataacaaatcttgttgccaacatcaagtcacttggggaatctgttgatgacactcgggtagtaaagaagtttctgcgagttgtaccacctcgttttaatcaggttgcagtctcaattgaaatgttctgtgacctgaagacactcacagttgaagacttggttggacgcctgcgtgcagctgaggatcggtttgaagacaagcttgagcaagtaactgacaaaactggtcgactgttgttagctgaggaggactggcttgaaaaacataagcatcggtttcagtcttactctcaaaaggatggtggcagtggtagtcagtggaaaggtaagggacctcatcgttctgatggtggcagttcaagcaattcaaacaagccaaagctgacatcaaaggggacaccaagaagaaaggggagatgtcgaaattgtggcatttatggccactgggcacagaactgtaaacgtccaaagaaggatgacaaggatcaaaaacaacaggaagcaaatgttgtagttggagatgtggagaatgcaacacttctattagctgaggtgcaaggggcagtgagtgaagcatctcaagtaattcatctgtctgaagataaagtagtgccagtaatctgcccagatggagtgtgggtactggacactggtgccagtaaccacatgacaggcaccaagtctgcactttctcaacttgatgacactgtcagtgggtcagtgagatttggagatggttctactgtcagaatctgtggattaggctcagtggtgatgaatactagacagggagatcacaaggtgcttacaagtgtgtactatattccacaattgaaaagcaacataattagtcttggacagctagaggaggcaggctgtgacattagactttttgttggcagactgaaagtttttgatccagagtataacctgttggtcagtgcacctcgcactggaaacagactttacacagtgaagttgggagttgtacctccagtgtgtctgctgtcaaaggcagatgatgtagcatggttgtggcatgcaagatttggccatctaaatttcagagctcttagagatcttggaaagaagagtatggttgaaggaatgcctattgtagaccgagctgaacaggtgtgtgatggttgtactcttgggaagcaacatcgaacaccttttccaaggctgtcctcatatagagccacaaaggggttggagttattccatgctgatctgtgtggacagatcagtccacagacagtaggtggaaaaagttactttttgctagtggttgatgacttcagcaggtttatgtggattgagttgttgaagacaaaagatgaagctctacatttcttgaagaagatcaagcaaagggctgaagttgatcaggagggcagattgaagggcataagaactgatagaggtggtgagttcaattcaaatatgtttactgccttttgcactgaacaaggcatcaagcacttcacgaccactccttactctccccaacaaaatgggggtagtggagcgtagaaaccagactgtagtggagatggcaaggtgcatgatgaagagtaaaggggtgccatcaagattctggggtgaggctgtgacaacagcagtctacttgttgaatagatcccctaccaagagtgtacagggaagaacaccatatgaagcttggtttggcaagaaacccagtgttcagcaccttaaaacatttggctgtattgctcatgtgaagaaaattggtccaggggtaaacaaattgtcagataggtccactaagatggtcctgttgggttatgagtcaggtacaaaagggtatagattgtttgatcctatcactgagaagctgtgtatcagcagagatgtagtgtttgaagaaagtgaaagatgggactgggagagtgcagaaaagaatcagcagactgaaactacaattcctttcactacacagtttcagtttactgtgccagatcagacaatacaagtaccagctggttcaggtgatacgagtgagtcttcagggggtgctgctgcgtcaccaccctcaccacaaactcctatgacaccttcagtgtcccagaatcaatcccaagctgcatctgttgcctcaggttcaaataatagctctcagtcagtgaatgcaggaagttcagacatgattcctttgagatacagaacaatatctgacttattagactcaacacaagaagttcatgattttgagtacagtgctttttgtttactagctgcagatgagccaaaaaatgttgaaagtgccttgacagatcagtgctggagacaggccatgaattcagaacttgactctattgaacaaaatcacacttgggtgtgggcagatctgccaaaagaacaaaaagcaattggtttgaagtgggttttcaaagtcaaaagagatgctgctggaaatatagtgaaacacaaagcaagacttgttgctaaggggtatgctcaaaaggagggtgttgattttgatgaagtatttgctcctgtggcaaggtttgaaacaataagagttttgatagctcttgcagcacagtggaattgggaaattcaccacatggatgtaaaatcagcattcctaaatggagaccttcaagaagaagtatatgtcactcaacctcccggtttccaagatacaaagaagctaggcaaggtactcagactgaacaaagcactatatgggctgaaacaggcacctagggcttggaacatcaggcttgattcagaactggtgtccctgggattcagaaaatgtgaagtagaacatgcagtttacaggagaggaactggcaaaaccatgctggttgtgggagtatatgtggatgatctaatcatctgtgggccttctgtaagtagcattgcagagttcaagcaacaaatgatgaagacattcagtatgagtgatttgggactgctcagctactacttgggaatggaggtgaagcaaggagaaaatagtatcacaatctgtcaaaaatcctatgcaaccaagattctagagcagtgcaacatgacttcctgtaatcacactgacactcctatggagcagcgagtaaagctcagtactgctcagaaagggactgaatatgatgagaccagatatagaagtgtcgttgggagtctgaggtacctggtgaatactagacctgatctagcttttgcagttggtctggtaagcagattcatggaggccccaggtaaagaacactggactgcagtgaagaaaattctcagatatgtggcaggtacacttaacctgggagtgaatttcaagaagggggcagcagcagattatacattgcttggctacacagacagtgattgctcaggtgacttagtgcacagaaaaagtacctcaggtattctattcttcttgggagataacttggtgacttggtcctctcagaagcaaagggttgtagccctgtcatcatgtgaagctgaatatgtggctgctgcattgggagcttgtcaaggtgtatggctgagaatgctgatagcagacatcatgcataagaatcctcagaagttcagactgttaatagataacatgtctgcaattgagctgagcaaaaaccccgtgtatcatgacagaagcaaacacatcgatacacgatatcactatattcgtgactgcattgacaaaggcatagtggatgtggagcatgtgggaactgaacaccaacttgcagacatcctgacaaagcctttgagccgaatcagacttgtggaactgagatcaagactagggatggttcaagtccaacaagattaagggggtgatatgttagtctgaataaggtttgtcacgtgtaatctagttggaacatttgtgtttacgttatctagtcttagtggcgtagctttgtgggtgatcagtgctgtgcctggcaccacaagccgccttggtgtttgttgaccccgtcgcactcgcgctgcgcatgcacatgatctgcgtgatccgaaaatggtggagatcatggggcacgatggcgacggggtagagggctttcaagcctgtgtaagcaccgtttatttattcagtgaaaaaacccagaaaagctgcggcacattgcgcagacaaaaataatctgttctaacctgtgtgtgtccgcgcgctcagccttcctcgctctcgccgcagtcaccgcgcctgtctgcgttcgccgtcgcggctgtactcgtcgctcgttgatccggccggggatccaacacgaacctctcctgccccccgtcgtcgacgtcagccgccgccgcgcccgcggccagctcgcgtaacccgtggtcggtggcgttgaggtcgcagagcgagtagaagcacggcggcccgtggaagaagaggcggcggatcccgaggcttctggccgcgccggccgcccacgggttgcaccagtcggagacgatgcagctcggccgcggcgcctgcgctcgcaggtacgcttccagcgggccggcgagcttctgcagagcgtcgaacagggggacgaagtggccgttgtccgtgacctggtccatgttctcgatgcccgggggcaggccgtcgacgtccgtcgggaacgggagctccacgatctcgaggggcagcttggcgcgcgcggcctgctcggcgacgccacgcagccgtgccccgttcagcggtgtcgtcaccaggctcgcgcgcgcgccgcgctccgccaggaggagggcgaggtcgaccatggggagtgtggccctgcgccacgagggggacgataacgaagtgaggtggcggcggtggtggcgctggcgtatcagcagccgattcctccgtgggcgccatggacgacgtgcgtgctaa

SEQ ID NO: 54634 - DNA, 1663 bp, Zea Mays
gtactgttttaagtgagaactttctgctgcagcagttaaataagtctccatagttggaccaagcagatcaatcaccatgacattgtactgcccctccaccccgaaccacttaagatgtggaatcccaactgcaaatcagggcagaaaagaaacaaattagtaaaataccggtgtaattggctaaccaaatcgtactgttgttgcacttacttccaccctgcaaaagcatgtatagttttgattcatagtgaagctgtggatgtcgtgatgtgactgattcctaataacaagttatatacgcacaaaacatatggtgagcaagcagtccagaattcctaatagcaactatggcaaacaatatcgaccatctagaaattaggaagttgcactggatatatctgtgccaaaaatattgtttgatatgccactgttgatattacagccttggagcaacattcatcatcagctaacacactaattcaaattagcatatatagacgaagcatagctccaaagcagctaatcccaacttaaagaatatactgacctcttcgtgcttctgaacaccctacaagacaatacatgaatacaaggcaaatcactcagtattttctacatatctcagcacagagtatgaagcatgaagaagaaataagatgaccaacaatgtgtgctagtcatttttttcaaatattcagaagaattgtgttagttattacagcatgatgtctcccttctcatgatatcaaatataaagtatcaagagattctcatctctagaataaccatgttcttaaaattcgaaccgtgcatatacccaattttgtggaagaacatatagcccatggtgaaattgtactaattatcgatggtgttagtaatgtatttcaatattcagaagaaatgcaacagaatatagcaacatgacttctcttttgtcatgatattaagtaccaactatcaagccaagcccttcatatttgaattgtactgctctctgattttgagggagaacatgtagcccatagtgatactatactaatcattgattgaatttgtcatttcttcctaacatccagaagcctgctaaattgtatgctataaaggagtaataacaaattaacgatgctgcaacatagaaaaacgaagacagaagcatagcggtttaaaggcagtacaaggatcagcttaacttgactagggccataaatcctcatgcctacaccgatgaaactgtgtttgttcacgtaagattgtaatagtaggctataaaggagtaataacaaattaaggatgttgcaacttagaaaaacgaacacacaagcataacggtggcatctcaatacatataactaaaggtagtagaaggatcagcttaacttgacccttgttaatgcaatggatacactaatcacaaagttcttacaatcttacctgaacaaacacagtctcattggtgtaggcatgaggattgatggccctggtcgtacgctgcccgcacacgctgcaggcgaaggccacccgcatgtgccactgtggtgatttcgtcaagagcgaccaaggtactgtcttaagtagtatagatttgaccctgagtgaaatatattcagtaatataaatatatgtgagaatgtgagatacactaacctctaccccaacaaac

SEQ ID NO: 54635 - DNA, 633 bp, Zea Mays
ccgggttggtcggcggcgccgggttttccatggcccctctccctctgtaacacacagtttgagttcggtcggtcggtcagtaaaacgcgaataaaaataacaacgccgagattaagtttcacaatcttgcgcttgtcgattgtgtaaggatctgagtggagagatgtggctagctgaaggcgtttccgctagtttcttaagcatccgagtcaagaaactgccacgaaatcgaccaaacaaaaaatgacatcatatttcttttttgaaatctgaattatcagttgtcctacgtgcggggggggggggggggggaagaagagcaatccagaacagaaatggccaccacactagacgagacaggttttctttccgttcccaatcggcagcgcggaagaaactaatcaagacgaagaatctttctcgcgtgctcaagatcaaatggctacgggggttcctcgatggtaggagaaacgagcaacgacggatcagatacgccacgcgcgcgatcaacagaagaggaaaaggcaacccgatgcgtaccaatcgaacagcagaggagccgccgccgccgcctccgtcggacaccagatcgaaccgaacccctgtaaaatctgaaccaggcctcactcgaag

SEQ ID NO: 54636 - DNA, 438 bp, Zea Mays
atgcagaagtgctcgaacgccagtttgaaatccgggatgtacggcttcaccttcttcatcttgagcagcttcttggcgaccagcgtcgccatgaacagcagctgctccgacagcggcagcaccagcgggcccagcgttgttatgttcgtcttgagcgcgtcgcccgccaccgccatcaggtccctcgacagcgacacgcccacgacgccctcgccgtcctcctcctgcgtcacgcagccgaagcaccggtcgtccgcgcccttgtgcgtgcgcaccgtgtgcaccagctcgtacttggcccgccgccggtcggaccgccgattcgagagcagcaccgcggcgccgcccatccggaacaggcagttggacaccagcttggagcggtcgttccccgagtaccagttgagcgtgatgttctccgtgctgatgaccagcgcg

SEQ ID NO: 54637 - DNA, 727 bp, Zea Mays
gaccaattttgagtctagccatgtcaaggagaactttggttgttgaggagatcttaacgatagatataaaacctggatggaagaaagggacaaaaataacatttcctgaaaagggtaatgaggctcctcatataattcctgcagatattgttttcataattgatgagaaaccccatgatgtattcacaagagatggtaatgatctggttatgactcagaagattactttggctgaagccttgacagaatgtactgttaatataacaacattagatggtcggaatctgacagtgcagataaataatatcatctaccctggctatgaggaggttgttccccgagagggaatgccgattcagaaggattcttcaaagaagggaaatcttaggatcaaatttagcattaaattcccctcgaggctgacctcggagcagaaagcagaaatcaagaggctactaggttcataaggagcatgcacaaccttttttttttctggtgacgcaatgctgtatccagtgtacattcagatgttaaatgtgaataccagcaaagtctcggtttccttaaactgtgccagttcctttggcatatggatgttttgagatgcaaagttgaattgtttcatttatcggggaataattctaaattctactagatacttctgtgtgattttgctgtgaggatgtccattatgcacctaacaaaagctttattttattttgtggtt

SEQ ID NO: 54638 - DNA, 1162 bp, Zea Mays
ccccattgggcctctgatctgcgctggtgctaagtgattcccaaaagcgggcaatctatgatcaggccggcgaagaggggcttaaggctcaggtcccacctactggagcaggtggtcccagtgggtcttccttctatggagggaatgcatcgacattccagttcaaccctcgcagtgcagatgatatttttgctgagttttttgggttctcaagcccattctcaaccatgggtggcatgggcggaggtgctgagagaggcatgaggggctccaggtttgggatgttcggcgatgacatatttgggtcccaccctcagtttcctggtgaggcatcaatgcatgttccacagcggtctcagaaggttcctccaattgagaatcggttgccatgcaaccttgctgatttgtacaaaggtaccaccaagaaaatgaagatttcacgagaggttttagatgccagcgggagaactttggttgttgaggagatcttaacgatagatataaaacctggatggaagaaagggacaaaaataacatttcctgaaaagggtaatgaggctcctcatataattcctgcagatattgttttcataattgatgagaaaccccatgatgtattcacaagagatggtaatgatctggttatgactcagaagattactttggctgaagccttgacagaatgtactgttaatataacaacattagatggtcggaatctgacagtgcagataaataatatcatctaccctggctatgaggaggttgttccccgagagggaatgccgattcagaaggattcttcaaagaagggaaatcttaggatcaaatttagcattaaattcccctcgaggctgacctcggagcagaaagcagaaatcaagaggctactaggttcataaggagcatgcacaaccttttttttttctggtgacgcaatgctgtatccagtgtacattcagatgttaaatgtgaataccagcaaagtctcggtttccttaaactgtgccagttcctttggcatatggatgttttgagatgcaaagttgaattgtttcatttatcggggaataattctaaattctactagatacttctgtgtgattttgctgtgaggatgtccattatgcacctaacaaaagctttattttattttgtggtt

SEQ ID NO: 54639 - DNA, 1479 bp, Zea Mays
ctttttcatagctaaacgaaatgcacctcagtggtctgtaggcaggcaggcaggcatcgacgtgcccacctcgttccgctctgacgtctgagatcgcgagatcgggaacccctgcccgtctgctccggaatctcgcccgcacgaaacttccccgacccatcgaccacaccagccccatcccctccgtcgctcccaagtcccaactgccgccacctctccgcgagccgacgccgacgcctacggtcaccaggacagagggacggctgctaccgcgggagtatgggggtggactactacaaggtgctgcaggtggggcgcggcgcctctgacgacgagctcaagaaggcttaccggaagctggccatgaagtggcacccggacaagaaccccagcaacaagaaagaagcggaggccaagttcaaacagatctcagaggcatatgaggtgctaagtgattcccaaaagcgggcaatctatgatcaggccggcgaagaggggcttaaggctcaggtcccacctactggagcaggtggtcccagtgggtcttccttctatggagggaatgcatcgacattccagttcaaccctcgcagtgcagatgatatttttgctgagttttttgggttctcaagcccattctcaaccatgggtggcatgggcggaggtgctgagagaggcatgaggggctccaggtttgggatgttcggcgatgacatatttgggtcccaccctcagtttcctggtgaggcatcaatgcatgttccacagcggtctcagaaggttcctccaattgagaatcggttgccatgcaaccttgctgatttgtacaaaggtaccaccaagaaaatgaagatttcacgagaggttttagatgccagcgggagaactttggttgttgaggagatcttaacgatagatataaaacctggatggaagaaagggacaaaaataacatttcctgaaaagggtaatgaggctcctcatataattcctgcagatattgttttcataattgatgagaaaccccatgatgtattcacaagagatgataaataatatcatctaccctggctatgaggaggttgttccccgagagggaatgccgattcagaaggattcttcaaagaagggaaatcttaggatcaaatttagcattaaattcccctcgaggctgacctcggagcagaaagcagaaatcaagaggctactaggttcataaggagcatgcacaaccttttttttttctggtgacgcaatgctgtatccagtgtacattcagatgttaaatgtgaataccagcaaagtctcggtttccttaaactgtgccagttcctttggcatatggatgttttgagatgcaaagttgaattgtttcatttatcggggaataattctaaattctactagatacttctgtgtgattttgctgtgaggatgtccattatgcacctaacaaaagctttattttattttgtggtt

SEQ ID NO: 54640 - DNA, 1531 bp, Zea Mays
ctttttcatagctaaacgaaatgcacctcagtggtctgtaggcaggcaggcaggcatcgacgtgcccacctcgttccgctctgacgtctgagatcgcgagatcgggaacccctgcccgtctgctccggaatctcgcccgcacgaaacttccccgacccatcgaccacaccagccccatcccctccgtcgctcccaagtcccaactgccgccacctctccgcgagccgacgccgacgcctacggtcaccaggacagagggacggctgctaccgcgggagtatgggggtggactactacaaggtgctgcaggtggggcgcggcgcctctgacgacgagctcaagaaggcttaccggaagctggccatgaagtggcacccggacaagaaccccagcaacaagaaagaagcggaggccaagttcaaacagatctcagaggcatatgaggtgctaagtgattcccaaaagcgggcaatctatgatcaggccggcgaagaggggcttaaggctcaggtcccacctactggagcaggtggtcccagtgggtcttccttctatggagggaatgcatcgacattccagttcaaccctcgcagtgcagatgatatttttgctgagttttttgggttctcaagcccattctcaaccatgggtggcatgggcggaggtgctgagagaggcatgaggggctccaggtttgggatgttcggcgatgacatatttgggtcccaccctcagtttcctggtgaggcatcaatgcatgttccacagcggtctcagaaggttcctccaattgagaatcggttgccatgcaaccttgctgatttgtacaaaggagaactttggttgttgaggagatcttaacgatagatataaaacctggatggaagaaagggacaaaaataacatttcctgaaaagggtaatgaggctcctcatataattcctgcagatattgttttcataattgatgagaaaccccatgatgtattcacaagagatggtaatgatctggttatgactcagaagattactttggctgaagccttgacagaatgtactgttaatataacaacattagatggtcggaatctgacagtgcagataaataatatcatctaccctggctatgaggaggttgttccccgagagggaatgccgattcagaaggattcttcaaagaagggaaatcttaggatcaaatttagcattaaattcccctcgaggctgacctcggagcagaaagcagaaatcaagaggctactaggttcataaggagcatgcacaaccttttttttttctggtgacgcaatgctgtatccagtgtacattcagatgttaaatgtgaataccagcaaagtctcggtttccttaaactgtgccagttcctttggcatatggatgttttgagatgcaaagttgaattgtttcatttatcggggaataattctaaattctactagatacttctgtgtgattttgctgtgaggatgtccattatgcacctaacaaaagctttattttattttgtggtt

SEQ ID NO: 54641 - DNA, 1484 bp, Zea Mays
ctttttcatagctaaacgaaatgcacctcagtggtctgtaggcaggcaggcaggcatcgacgtgcccacctcgttccgctctgacgtctgagatcgcgagatcgggaacccctgcccgtctgctccggaatctcgcccgcacgaaacttccccgacccatcgaccacaccagccccatcccctccgtcgctcccaagtcccaactgccgccacctctccgcgagccgacgccgacgcctacggtcaccaggacagagggacggctgctaccgcgggagtatgggggtggactactacaaggtgctgcaggtggggcgcggcgcctctgacgacgagctcaagaaggcttaccggaagctggccatgaagtggcacccggacaagaaccccagcaacaagaaagaagcggaggccaagttcaaacagatctcagaggcatatgaggtgctaagtgattcccaaaagcgggcaatctatgatcaggccggcgaagaggggcttaaggctcaggtcccacctactggagcaggtggtcccagtgggtcttccttctatggagggaatgcatcgacattccagttcaaccctcgcagtgcagatgatatttttgctgagttttttgggttctcaagcccattctcaaccatgggtggcatgggcggaggtgctgagagaggcatgaggggctccaggtttgggatgttcggcgatgacatatttgggtcccaccctcagtttcctggtgaggcatcaatgcatgttccacagcggtctcagaaggttcctccaattgagaatcggttgccatgcaaccttgctgatttgtacaaaggtaccaccaagaaaatgaagatttcacgagaggttttagatgccagcgggagaactttggttgttgaggagatcttaacgatagatataaaacctggatggaagaaagggacaaaaataacatttcctgaaaagggtaatgaggctcctcatataattcctgcagatattgttttcataattgatgagaaaccccatgatgtattcacaagagatgtgcagataaataatatcatctaccctggctatgaggaggttgttccccgagagggaatgccgattcagaaggattcttcaaagaagggaaatcttaggatcaaatttagcattaaattcccctcgaggctgacctcggagcagaaagcagaaatcaagaggctactaggttcataaggagcatgcacaaccttttttttttctggtgacgcaatgctgtatccagtgtacattcagatgttaaatgtgaataccagcaaagtctcggtttccttaaactgtgccagttcctttggcatatggatgttttgagatgcaaagttgaattgtttcatttatcggggaataattctaaattctactagatacttctgtgtgattttgctgtgaggatgtccattatgcacctaacaaaagctttattttattttgtggtt

SEQ ID NO: 54642 - DNA, 3498 bp, Zea Mays
ggctggcgggagaggagctcggggccgccatggccacgccagggccggatctgggggaggaaggggagggccagcgactgggatggtggccgccccctaggagggaactcccgggggcagcggcgttggagcagggccgatggctgttggggtaggaggcccgacagctgtggtgggttgggagaaaacctagctagctgataccatgtaagataatgggtgtcttaatgtattgcatagagaaggggttacaatatatagactcataggaaaccctaaccctaattggcccgtagcccaactgtggtgccagcccccacacacacagagaacacacacagtctaacacatttattcacaaaagcaactcatgtccatgtgcacatagcagccaacccaagattttacagcacctgaaccagttttagctccactcaagttcacaagatcttaattatcactcagactaagctatgttatccatacacgtttttgcaatagtttcaggaaattttgcagcatcttgcattctttatttgaatatttcagtactataaagaatggaactcgtaccctcagtaccctattctcataacctaattgtccagtgcaaaagtgctatgtaaatgtaacaaacctcttataaagccatttcttatgtcagaatgaagcgaatgcgggaattgttaaaacatagtgaatgtcactgaaaaacaggggatcagcccccaccccctctgttccattttgaacaaatgtaccttaaaactgcaaggttgaaactcccccacgctgtgtgatactatgcagtggcgcctgccacaggcatggtagatatgtgaagaaaggttaactgcaacgtgggggcagcaattggacaaacaacggttgcgcagaaggggatcaactccatgataatccttggagcttggacattgtgtaagcacagaaataggagtgtctttgacagatttcctcctaatatgggcgctgcaatctcccagttcaatcaagagttggagatgtggcctttagctggagctagggatctctccctccttgctcccattcctggcctccagctgtagtttgctgcattagctataatgttggatgtttttatgttttgttgttttcggccgccatgagctggttggccacagacctttgtattggtctattttagacctgtttcttcttaatatatatgatgcgtagctctcctacactttcaagaaaaaacatcacatctgcatttccagcaggtcaaatgggactgggattgatgactgcatccattttgaaccataacacattaattctgtgtgagcatggtgtgagcatgtgggtgtgggtgggtgcacgtggggctctatataaatgggtgggggactgggggttatgctcaaaagtttagatgtcaaggggaaaactagcttagggttgaaactatgtaagcttgtaccacatacaggtaggtacttgtatagatgagttcttggtccttgctaaaggccatccagaaacctgttggtaatcaccatatgttgcctaccaacaatgaacatggtccatgcagtatagttcctagttcctacaagcaacagaatgatgttttttctaatagtactgtctaatactattgtagatcttgaactagaacatagtgactatgttttgaagcttgacatcatgtcaagtaaccttcaacttcttagtacaatggcacaggggcagtctttccctgccaagtaatctagatgagctagcatgaggtattttacatggacatctagtcaatcaagtttgtggatagatgagcatataccggttgaataaacttgcaagtcatgtcaaaaccatgattattccatccctatagttttatcatcgaagaatgacaagtattatttgaaaaaaaaaactatcattcttctctctaatatataaagatgtgcagctctcatgcgtgttcgagaaaaaaaaaactatcattctgatctgaacacttgctaatatatatcttgtatagaaaatattaaaaggaattaggcaattagctacagtggccaataaaatgtgatgtctaacaacaatttgtgggaaaatatcatacaaatactcagcacaaagaactggtcgctatagaggactgaggaccagttatagtacttagttcttacatctcaaacagaatttaactggtatggatttggtttgccttcaatctgcaatatcctgtaaatattgcacaattagaaggagctgaactcaccacaattttagactcgaaagggtgctcgtcctccaaatgggcgcagagagaagcaacatcatgatcttcataacagtaagggcatgggaagtctgagtgcaaatcatcctcaggttcgatatcatcatacccaaatcgatctgtaattgtgtttatttgcgacataaacaaattattttttatagaaatggattcatttcgatctgcatgcaataagggaaatgaattgaacagcaagtacaataagaaaaatatatactccctccgttcttttttatttgtcgtgttttagttcgaaaatgaactagcgggcgacaaatattcgagattcgagaacggaggtagtaacatataacatcgctgatagcacctttcatctcaaatgaatgggcatatctgaaatatcaaaaggaaaaccatatcgcaaagcaaaacctgcagcatcatttaagaaataaaattctagaccaatagttttggacaagtgtcttgtgtataagtggcatggataggttaccacaaaatactctatagaaatatttgtcgatttccaataatgtgattgatctcaggattatttaacatgagaaaaactgcacatttcagatattgtattcaaaagaatataacatttgatacttgcataatctattaaaatcatgacaacataatttgttcatatgctgtagaagtcccgctatgtctaaaatttccctccgttttatatggtcctacgccagcaaataaatggagaaagtaagatgcagtcctgctgcaaaatcaaacctactttaggtgttcacctgacacctagtgaatccaacaaaaatcgcggaaaatactagaaattagcggcgagctccaatcgcgtcaagtggggaatggagatcaaagaaagaagcgtcgccacgatgcagcccaatcccaggacaaatttttccccgctggaacagtcaccagctgaagaaatgcggcatttctctgctctggatgaagaaacgacgacgaaagataccgtgatgggatgccggggcggcgtgctggcgctgcgcgcgctgcagcgcaaactgccgcttggcggccgtgagacgcgagatccagaggtcggaatccatggtggctgcaggctttcctctcctggcctctccctcttccccctccgcacggtagatgccaggcaccaccaaccgaaaagcggattaaaaatatttcgtttctattcg

SEQ ID NO: 54643 - DNA, 2059 bp, Zea Mays
gagattgtggttgccattaccagtaactctgcgtactctttgatgtttctgcaagtgcacatcattaaggaaatatatgacaattactgttcaacaaacacttttacaaaacctgtttagtaaaacatgtctaaaaagatataatcatctaagaaggatattttaaataggtagccatgctgaagggttatatgatccaccaagtccttcgaaatcctagctgagcaaactgggcaagactgtagagatatataattgaagttagaatcaacagcatatttgatgcaatgtgctccgttgctcatattataatgctaatagctagtttctgtgcttatgatgtatagcccaaaaattcccggtcaaaaaatgtatagcccaattttttttttaaaaaaggtttccagcacaaggccaaaaaccttgtgggaatgtcttactcctaggtgtggtggtgtatgaactggccaagaaatcatgtgtctaaggctacaccttactccacaatatgagctgaggctgtcgttttatattcatgagtttgtccacaacttcagcttatgcttatatttaagtcagataggagctctaaggtagctaggtaaagttcaatataaaagacaatgagaaaaatgaaaatttagtgcttccagttccaatatagtgtgtcctaagagtccttaccaaccaaaaaaggctataataccattgtgggaatgctaggtggagcaaataaacattgtttctttagtagtgtgttctacatgttcattatttggacaaactgtatgcatgctaatagttaactatgacagaacactacaaaatcaagtgtgagtacactgaatgaatattaagtttgtaagataatgggtgtcttaatgtattgcatagagaaggggttacaatatatagactcacatgaaaccctaaccctaatgagccggcagcccaactgtggtgccagcccacacacacagtctaacatcccccgcagtcataatggaggcaccgcatacgatgggactggagtagaagctgaaggtaggagccgactggttgaaatcccccagcgatcgcaacgtcgtgagactggtgtgcgagtgttgcggctggagtagagactggtgtgcgctccaagaagacgatagccccttgatgacgaggtagccgaagtcgaggtggccgtgatcggaagacacgtggcagaagcctgatcttcgggaggagtcgatgttcgagtgtcaataatcggcgaggcaacacaaaaggacagtagcaacctcagggccttcttgcttcgtcccgcgaccggtcgtcgaggagccttgccagagaggccgacggcagcgcacgcgtctgtgtcggtcagggtggccacgcccgcggccgaaaagaagggtatcgacggatctggtcggaaaagccacgacaactacggatccagccatgaagacggtgattcagccaaagggaggacagatctagccgggaaggtcgcggcagcggtggatgcggccgggaaagccacgacagcgaaggcgacgaagaaggaaggcagcagggtgggtccagccggacatgggcctgcgctggacctggcaggggagtttgacgccaacaacgggagaagcttgaagataggaggtgctactgggcgtcggcgcagtcaaggacaaggtggacgacgcgacaacgggggttgcacaacgcacagggcaggggaagaggaagggagcagcctgctggctagtcggcggcgcatggaggcgcggcagcggcggatcaggcaaccaacgacgtgtggagatacggtggtggcggattaggtggccagcggtgcagcagagtcggcggcggggaaggtcgcacgctggggcagggtcggtccggggtggatctgagccacgaggaaggcgaggaagcgaggtggccggcgaggaggggctgtcgcgccgtggccgtggaagcgcaccagcgccgaggaggactggggccagccgaggcggccagaggtggcgggttggcgctgccagagggaggaggccggcggctttgg

SEQ ID NO: 54644 - DNA, 1221 bp, Zea Mays
ctcaatatcctaatacgcaatccctagaccactacacaatcatagataaaaggttgagataattcagttcaaaaacagaacagaacatactaagcggtgatcataccatccattagactatgagcaccagagaatgaatacccaagcaatcagaatgtacaataggtcatcatcattgtatacatgtatgggagtgtaattgtgttaacttgaacttaactgatgtgcttattagaggacgattagatacacaacactttaagaaatattgatagcaagtggtttagacaacaaaacagtagcaatctttgcaaaggtcgatagagtaggcaacaagtaattatgatacagtagtaggcatattcgtaatttgtccagataatacagcgataaaataataaaatacagtgatcaaataaccataatacgatgatcaaataatgtagtgtacctggtgaaataaaacctcctcaaaggagacataatacaagtctcaaaataccaatcgattcatcaacatcagcataaccacttgcatattaggagtacttaccagtgttaggtgttctacgagacctagacgtattattttgcctagaaaataaaacaatcagtttgctggcatacatacacaaaagaataggcaagcaaaataggggtgcccaaaattcaccagcaagggtgccacttcgctgatgtgttggatctaaatctcccctgttttacatgtgttgatgctaggaaaagaaatccaccgcgcaaactcaacggttggagcaacgattagcaagcagtgacaaatctaggatatatcattcatggctccacctcctggtcgtcaacgccgaacatggtgaggggtggcgggccctgcggcttctcctagggcatggaggaggtagcaacgtgcctgtctgtgggggtagcgggcaggggaggagggacaggcgaaggctaggaaggagagacgtccagcggccaggaggaggtagcgaccgtgtcaccagtctggttggcacctttattctcagctgcaagaaaacatggcatcagagaattgagtgcatacaaaatagattaggcagttttaacggcatcatgctttattctaactctgatatgatgaaagaagattgcagtagaacaagaaacaaagggtcatcatgcagcgtgccaccttatatgttagatttaatttacacctacttagtaactaactga

SEQ ID NO: 54645 - DNA, 4819 bp, Zea Mays
acagattcataaaaaaacatatatctttgatgaggggtgactggtgagtgagagcgagaggaggtgggcggccagccggccaccaccacggcaccacctcgtctctcctccacgcgtctctgccgcccgggcgcaggcgacgtcgccacgatgacgacggttccatcgcgtttgtgcaggggagatgagcgagctggtgcgggcggcggctccggcagctgcggaggaggagaagaaggccgtcgcggctgtgactgtggtggcgaaaggaaaagagaaggcggaggtgacgccgaccgtggaggcctcatcggtcggcgacagggggaggttcgtggcctacccgtcgcgggtggcggagcacacggacgtggtggcggacgccgcgcgcttcagggcggcgctcgaggggctgcacacgcacatgggcaccaggctcaacctaccccaacttgcttgggacaaaatgctatgttgttgttatttaaatatggaagtgagaacacagaaaagggacaaatggagtattgaacaaccaggatgtcatatgtcagcaaaagaactgtggagtattgaacaatgaggatgtcttttgtcagcaaaagaactgatttgtcctacttggcttgctttgtgagattattgcagattgcaatacaatgtaaagtttatttggcttcaagcttagtgttgttttcattgaaatgtatggccatccgatttttttctctcgaacacgcaggagagctgcacatcatttaatttagagaagaaaaaggtccaaaatggaccaagatacaaagcctaaaaaggcaagataaaacacacccactcacaacctgccttgcaacaacgctgcagcctccactattactgagaaatcagcaggacaacaaaggccacagcgaaaaaactgcaggcagaccccactctccacaaacactacgccctgaccatattaagggcaacctctaggcctaaattctcaagatgtttagctccaaccttactccaacacgccaactcatctaaaaaaacacttcaaactgtgcttaaagtagggttatgtccattgaagactgccttgttacagtgaacccataggcaccaggcccccagaatgatgatgatgttcataccctttcgcttgcttctgtgcaccttcttacatattttctgcaaaggcgatctcatcactagacggagagaaattaccaaaccccaagggcgaaaggatggtatgccaaaattgtcttgcaaaaatgcatgtgcacaggagatgttggacggattcctgcacgtggtcacataatggacaagactccgggtgatccaaacctctcctttccagtctatcagaagtccaacatttattccatattgccagccaaaggaaatatttgcattttggaggagcccaagacttccacagcctcccctatggctcaaaggtaatggatcccatgaaaaaggccttgtaacatgacttggaagtgaactggtcagaggaggtatgcagccacacatgtctatcagcttcatgtgttaacaccactcttcttatagcatcccataaatgcaagaattgttgcaccccaatcaaagaaagaggggtctcgatgtcactgacccactgccggctttcaataagcctgagcacagttctagtgcaaagagcgctcttaccgaccttagaggcaactgcgggggcaatgtccttggcgcaaccaccatctatccgaccaaaataaagtattggtcccatttccaatcacaataataatcgatgatgcaaagaacttcctgacttgtttcggtataggaaagtttagcccatgccaaggtctgttagggtctgttttctccaaccacaaccatttagcttgcagtgcccagctctggaaatataagttaggaaccccaaatccaccaagctttagtggccttgtaatgatatcccaagagactacaatttcctccattcatgtcatttccccctttccataaaaatcctcttcgaatcttgtcaatcaacttaatcacccacttagggatatccatggcaatgaggagataaattaggatggctaacataacaaaccacaccatagtcgtccttccagcaagattaagcagtcgagcctttcaattaggaagtcgatctgcaatctttcaaaccaagccatggggtctatccttcttagttttttgtctgaaatcagaagccccaaataggagcaaggaaaagaagctgagctgcaatgtagaatgttgcagccctcctacacagcctgctcgctacaccttatcggaatggcacaactcttatgcatattagatacccaaccagaaactgagccaaaacaatccaagatcattttaacacaattcagatcttcctcaaaaggctgaataaaaaggaccacatcatcagcatagctggaaagtctgttccgaacattttctccctgcagactctgaagcagccccctattttcagccaacaaaaatagactgctgaggagtgaggacatcataatcaatataaacaacataggagatagaggatccccctgacgaagtcctctccgatgactgataagattaccaggagacccattcaaaagcacttgagtggaagaagaggccaacagatatgaaatcagattacaccaattaggtccaaaaccaaggtgagaaagcacctcaataagaaaagctcaatagatcgagtcaaaagctttcgaaatgtccaacaactttctggacacagaaaataccgcaactaagtttttgtttttttaaaaaatggcttgcatgttaggcaaagttacttaaagttgtctacctgaatagttaatactatgccatctaattttttttctggaatacgcaggagagctgcgcatctttgtattaatagaagaaaagaaaaggggggggggggggagaaccccaatacaacacacacaccactagagactaactacggatcaccgactaaaacatggaagaaacacgacccacaccgctgttttaagccagcaactcatcgacttggaggaaggacaaggccttggcaccagtcatggaccagagcaccgcctcttccctagccatcctaatggccatgaccaagttgggattacaaccatcaaaaacacacctattcctatgcttccaaatggtccaagcacctagaatcactaaagaattgcatctgagttgcattcataattttctttagttttattaattgccatgcttcatctggttcatttataacccttttttgggggtaagggtgccgatcattggagggaaagatttggatcttcatcagctatataaggaggtcacatcacggggcggtattgacaaggtgaaggcagagaatagatggagagaagtgactgcatcatttattttccctgccactgcgacaaatgcttcttttatgctgaagaaatactatatgtcactcttatatcattttgagcagctatacttctttagagtgcaaggctggcatcaacaagaaatagattccagaatgaattcttccattgaaattaaaaccgaaggccaagcttaccacaaaagaaaaaggggcatcaacacatcttcagatccagcttcgtcttcagataatgttgacgtagatgtgatagttgatggcaaatttgaacatggctacatagtgactgttattatgggatcgaaatccactaaagcaatcctctataattgcactgaagaacctgctttgccaactccggagccacctgttgcaaataacagcactggtttgaagggtgtacgtcgccgaagacgacgtaggaagaagctaagtacaacggatcccaggcaccccaaaccaaacaggagtggctataatttcttcttccaggatcaacatagaattcttaagccacaatatcctgcacaagacagactgatcagtaaaatgattggtgaacgatggaacaatctaagtcctgaagataaagctgtatatcagcaaagaggtgtagaggataaggagcgataccggacccagttggctgcttataaagaactgaggacaggccaacctatcagcaatgctgtgcctatccaacagaggctccctctgacagaagtgacgattgatgaagtagactccaaggtgagccaagatgatatgctgctgtcaaaccaagggtacagcagtagtgatgaaagtgaccattcaggagagaaaaatgtagaagacgagctcaacactgaaacatcccctgaggtgagcatggaaacaactggttctcctggacaccctgatccctctcgagatggggaccactttgagttgcggcggagagaaaaccccaaggcagatgagaaagataatgcaccacctgattcatgacttttcgctttgaatggtatgtattcgaagatccgaaagagaggaatttccaagaggtgacaagctacactacacatacatacctgttgtcgtaggaacataggctatatgctgatgtcaatcagagttctattagcagttggaatacacttcattttggtagttctgaatttgtattgctaaatttctttcgaattaaaagagagagggggggggggggagggggtactgggtaaattttccatccagggatgggtacttggtatattctttcgttcaatatttatcattacgttgatctatatgttgagtatgtgtaatgtcatgtcagcgaaaatccaaatctgcatatctaattgtagctatacatgcttagtttcatatattataaaagggaaaaagctattcttt

SEQ ID NO: 54646 - DNA, 2018 bp, Zea Mays
atggctctgtatctccaccccagaacaaccttgggttataacgttatctctttcatcctttctcactctgcctatccgtcccaagtatagtatatacgaggagtatattttcttagagatcgttaacctcatagtaatcgctccttttgcccaaaacctaaagggaagccaaagtgggagcaccaaaatactcgccgcgggtgcatagttgtttgtttagaaggagaagacgaggttaaggggagatgagcgagctggtgcgggcggcggctccggcagctgcggaggaggagaagaaggccgtcgcggctgtgactgtggtggcgaaaggaaaagagaaggcggaggtgacgccgaccgtggaggcctcatcggtcggcgacagggggaggttcgtggcctacccgtcgcgggtggcggagcacacggacgtggtggcggacgccgcgcgcttcagggcggcgctcgaggggctgcacacgcacatgggcaccaggctcaaggtgccgatcattggagggaaagatttggatcttcatcagctatataaggaggtcacatcacggggcggtattgacaaggtgaaggcagagaatagatggagagaagtgactgcatcatttattttccctgccactgcgacaaatgcttcttttatgctgaagaaatactatatgtcactcttatatcattttgagcagctatacttctttagagtgcaaggctggcatcaacaagaaatagattccagaatgaattcttccattgaaattaaaaccgaaggccaagcttaccacaaaagaaaaaggggcatcaacacatcttcagatccagcttcgtcttcagataatgttgacgtagatgtgatagttgatggcaaatttgaacatggctacatagtgactgttattatgggatcgaaatccactaaagcaatcctctataattgcactgaagaacctgctttgccaactccggagccacctgttgcaaataacagcactggtttgaagggtgtacgtcgccgaagacgacgtaggaagaagctaagtacaacggatcccaggcaccccaaaccaaacaggagtggctataatttcttcttccaggatcaacatagaattcttaagccacaatatcctgcacaagacagactgatcagtaaaatgattggtgaacgatggaacaatctaagtcctgaagataaagctgtatatcagcaaagaggtgtagaggataaggagcgataccggacccagttggctgcttataaagaactgaggacaggccaacctatcagcaatgctgtgcctatccaacagaggctccctctgacagaagtgacgattgatgaagtagactccaaggtgagccaagatgatatgctgctgtcaaaccaagggtacagcagtagtgatgaaagtgaccattcaggagagaaaaatgtagaagacgagctcaacactgaaacatcccctgaggtgagcatggaaacaactggttctcctggacaccctgatccctctcgagatggggaccactttgagttgcggcggagagaaaaccccaaggcagatgagaaagataatgcaccacctgattcatgacttttcgctttgaatggtatgtattcgaagatccgaaagagaggaatttccaagaggtgacaagctacactacacatacatacctgttgtcgtaggaacataggctatatgctgatgtcaatcagagttctattagcagttggaatacacttcattttggtagttctgaatttgtattgctaaatttctttcgaattaaaagagagagggggggggggggagggggtactgggtaaattttccatccagggatgggtacttggtatattctttcgttcaatatttatcattacgttgatctatatgttgagtatgtgtaatgtcatgtcagcgaaaatccaaatctgcatatctaattgtagctatacatgcttagtttcatatattataaaagggaaaaagctattcttt

SEQ ID NO: 54647 - DNA, 5830 bp, Zea Mays
tatggctctgtatctccaccccagaacaaccttgggttataacgttatctctttcatcctttctcactctgcctatccgtcccaagtatagtatatacgaggagtatattttcttagagatcgttaacctcatagtaatcgctccttttgcccaaaacctaaagggaagccaaagtgggagcaccaaaatactcgccgcgggtgcatagttgtttgtttagaaggagaagacgaggttaaggggagatgagcgagctggtgcgggcggcggctccggcagctgcggaggaggagaagaaggccgtcgcggctgtgactgtggtggcgaaaggaaaagagaaggcggaggtgacgccgaccgtggaggcctcatcggtcggcgacagggggaggttcgtggcctacccgtcgcgggtggcggagcacacggacgtggtggcggacgccgcgcgcttcagggcggcgctcgaggggctgcacacgcacatgggcaccaggctcaagtaaagcatttttccgacttccaatacgcacatgacctcgccgccggtgccgatccggttgccgcatttttaattcctctgttgcgttttcttctgcatctgatgcgatggtgccgttacagttgttactatccctgttgcttttaccatcatttcttgaattcaatgcgcgaaaattgcaacttggtataaatgcgtggtgggaaagagaagtttgtgggggcggtggcgattttagtagtaacgtgtgatgcaaatgcatgcgatctgggaggccgcacaccattgattttgattttgactaatcaacccgtgttcgtgtttcctttataacatttatttatgtgtggaccaaatcctccaacacgagttggggattgcggccatcgatatgtcggatggcctacattggtagcttgatgttattttcgattttttgggggatccattgcaacgttcctgttgcatctgggattcttgtttttgtcgaggatgaaatatgattcttgttttctggggaccttttcaggacattatgttagtttgtagtggcataggaatccattgcaacgggctatgtatgtgaaacacgcttacttttcgtgggtgtctgtattgaaatattggatttcgatcatgtatgggcattctttttatgtcctagtaataagagtagcgacatatatttcttattctatgagattctagtgtttgttagctagagtaatctttttgtaatgaaaaatgatgtctgatgtactccctctgtcacatgccaatcaaattttctcaaatttggctttaagtttgtagaaaatattagcaatatttatatcttcgaataaatttattatgaaaatagactcagtgatctatctaatgatactaattatatactataaatattaatgttttttctatccttgtttcttgtgggtttcatctctagcctaccccaacttgcttgggacaaaatgctatgttgttgttatttaaatatggaagtgagaacacagaaaagggacaaatggagtattgaacaaccaggatgtcatatgtcagcaaaagaactgtggagtattgaacaatgaggatgtcttttgtcagcaaaagaactgatttgtcctacttggcttgctttgtgagattattgcagattgcaatacaatgtaaagtttatttggcttcaagcttagtgttgttttcattgaaatgtatggccatccgatttttttctctcgaacacgcaggagagctgcacatcatttaatttagagaagaaaaaggtccaaaatggaccaagatacaaagcctaaaaaggcaagataaaacacacccactcacaacctgccttgcaacaacgctgcagcctccactattactgagaaatcagcaggacaacaaaggccacagcgaaaaaactgcaggcagaccccactctccacaaacactacgccctgaccatattaagggcaacctctaggcctaaattctcaagatgtttagctccaaccttactccaacacgccaactcatctaaaaaaacacttcaaactgtgcttaaagtagggttatgtccattgaagactgccttgttacagtgaacccataggcaccaggcccccagaatgatgatgatgttcataccctttcgcttgcttctgtgcaccttcttacatattttctgcaaaggcgatctcatcactagacggagagaaattaccaaaccccaagggcgaaaggatggtatgccaaaattgtcttgcaaaaatgcatgtgcacaggagatgttggacggattcctgcacgtggtcacataatggacaagactccgggtgatccaaacctctcctttccagtctatcagaagtccaacatttattccatattgccagccaaaggaaatatttgcattttggaggagcccaagacttccacagcctcccctatggctcaaaggtaatggatcccatgaaaaaggccttgtaacatgacttggaagtgaactggtcagaggaggtatgcagccacacatgtctatcagcttcatgtgttaacaccactcttcttatagcatcccataaatgcaagaattgttgcaccccaatcaaagaaagaggggtctcgatgtcactgacccactgccggctttcaataagcctgagcacagttctagtgcaaagagcgctcttaccgaccttagaggcaactgcgggggcaatgtccttggcgcaaccaccatctatccgaccaaaataaagtattggtcccatttccaatcacaataataatcgatgatgcaaagaacttcctgacttgtttcggtataggaaagtttagcccatgccaaggtctgttagggtctgttttctccaaccacaaccatttagcttgcagtgcccagctctggaaatataagttaggaaccccaaatccaccaagctttagtggccttgtaatgatatcccaagagactacaatttcctccattcatgtcatttccccctttccataaaaatcctcttcgaatcttgtcaatcaacttaatcacccacttagggatatccatggcaatgaggagataaattaggatggctaacataacaaaccacaccatagtcgtccttccagcaagattaagcagtcgagcctttcaattaggaagtcgatctgcaatctttcaaaccaagccatggggtctatccttcttagttttttgtctgaaatcagaagccccaaataggagcaaggaaaagaagctgagctgcaatgtagaatgttgcagccctcctacacagcctgctcgctacaccttatcggaatggcacaactcttatgcatattagatacccaaccagaaactgagccaaaacaatccaagatcattttaacacaattcagatcttcctcaaaaggctgaataaaaaggaccacatcatcagcatagctggaaagtctgttccgaacattttctccctgcagactctgaagcagccccctattttcagccaacaaaaatagactgctgaggagtgaggacatcataatcaatataaacaacataggagatagaggatccccctgacgaagtcctctccgatgactgataagattaccaggagacccattcaaaagcacttgagtggaagaagaggccaacagatatgaaatcagattacaccaattaggtccaaaaccaaggtgagaaagcacctcaataagaaaagctcaatagatcgagtcaaaagctttcgaaatgtccaacaactttctggacacagaaaataccgcaactaagtttttgtttttttaaaaaatggcttgcatgttaggcaaagttacttaaagttgtctacctgaatagttaatactatgccatctaattttttttctggaatacgcaggagagctgcgcatctttgtattaatagaagaaaagaaaaggggggggggggggagaaccccaatacaacacacacaccactagagactaactacggatcaccgactaaaacatggaagaaacacgacccacaccgctgttttaagccagcaactcatcgacttggaggaaggacaaggccttggcaccagtcatggaccagagcaccgcctcttccctagccatcctaatggccatgaccaagttgggattacaaccatcaaaaacacacctattcctatgcttccaaatggtccaagcacctagaatcactaaagaattgcatctgagttgcattcataattttctttagttttattaattgccatgcttcatctggttcatttataacccttttttgggggtaagggtgccgatcattggagggaaagatttggatcttcatcagctatataaggaggtcacatcacggggcggtattgacaaggtgaaggcagagaatagatggagagaagtgactgcatcatttattttccctgccactgcgacaaatgcttcttttatgctgaagaaatactatatgtcactcttatatcattttgagcagctatacttctttagagtgcaaggctggcatcaacaagaaatagattccagaatgaattcttccattgaaattaaaaccgaaggccaagcttaccacaaaagaaaaaggggcatcaacacatcttcagatccagcttcgtcttcagataatgttgacgtagatgtgatagttgatggcaaatttgaacatggctacatagtgactgttattatgggatcgaaatccactaaagcaatcctctataattgcactgaagaacctgctttgccaactccggagccacctgttgcaaataacagcactggtttgaagggtgtacgtcgccgaagacgacgtaggaagaagctaagtacaacggatcccaggcaccccaaaccaaacaggagtggctataatttcttcttccaggatcaacatagaattcttaagccacaatatcctgcacaagacagactgatcagtaaaatgattggtgaacgatggaacaatctaagtcctgaagataaagctgtatatcagcaaagaggtgtagaggataaggagcgataccggacccagttggctgcttataaagaactgaggacaggccaacctatcagcaatgctgtgcctatccaacagaggctccctctgacagaagtgacgattgatgaagtagactccaaggtgagccaagatgatatgctgctgtcaaaccaagggtacagcagtagtgatgaaagtgaccattcaggagagaaaaatgtagaagacgagctcaacactgaaacatcccctgaggtgagcatggaaacaactggttctcctggacaccctgatccctctcgagatggggaccactttgagttgcggcggagagaaaaccccaaggcagatgagaaagataatgcaccacctgattcatgacttttcgctttgaatggtatgtattcgaagatccgaaagagaggaatttccaagaggtgacaagctacactacacatacatacctgttgtcgtaggaacataggctatatgctgatgtcaatcagagttctattagcagttggaatacacttcattttggtagttctgaatttgtattgctaaatttctttcgaattaaaagagagagggggggggggggagggggtactgggtaaattttccatccagggatgggtacttggtatattctttcgttcaatatttatcattacgttgatctatatgttgagtatgtgtaatgtcatgtcagcgaaaatccaaatctgcatatctaattgtagctatacatgcttagtttcatatattataaaagggaaaaagctattcttt

SEQ ID NO: 54648 - DNA, 3427 bp, Zea Mays
aacacatatggctctgtatctccaccccagaacaaccttgggttataacgttatctctttcatcctttctcactctgcctatccgtcccaagtatagtatatacgaggagtatattttcttagagatcgttaacctcatagtaatcgctccttttgcccaaaacctaaagggaagccaaagtgggagcaccaaaatactcgccgcgggtgcatagttgtttgtttagaaggagaagacgaggttaaggtaagcaaagcgcatgatggcatcgcatagcatggcaacttcccttcttcctttacagattcataaaaaaacatatatctttgatgaggggtgactggtgagtgagagcgagaggaggtgggcggccagccggccaccaccacggcaccacctcgtctctcctccacgcgtctctgccgcccgggcgcaggcgacgtcgccacgatgacgacggttccatcgcgtttgtgcaggggagatgagcgagctggtgcgggcggcggctccggcagctgcggaggaggagaagaaggccgtcgcggctgtgactgtggtggcgaaaggaaaagagaaggcggaggtgacgccgaccgtggaggcctcatcggtcggcgacagggggaggttcgtggcctacccgtcgcgggtggcggagcacacggacgtggtggcggacgccgcgcgcttcagggcggcgctcgaggggctgcacacgcacatgggcaccaggctcaagtaaagcatttttccgacttccaatacgcacatgacctcgccgccggtgccgatccggttgccgcatttttaattcctctgttgcgttttcttctgcatctgatgcgatggtgccgttacagttgttactatccctgttgcttttaccatcatttcttgaattcaatgcgcgaaaattgcaacttggtataaatgcgtggtgggaaagagaagtttgtgggggcggtggcgattttagtagtaacgtgtgatgcaaatgcatgcgatctgggaggccgcacaccattgattttgattttgactaatcaacccgtgttcgtgtttcctttataacatttatttatgtgtggaccaaatcctccaacacgagttggggattgcggccatcgatatgtcggatggcctacattggtagcttgatgttattttcgattttttgggggatccattgcaacgttcctgttgcatctgggattcttgtttttgtcgaggatgaaatatgattcttgttttctggggaccttttcaggacattatgttagtttgtagtggcataggaatccattgcaacgggctatgtatgtgaaacacgcttacttttcgtgggtgtctgtattgaaatattggatttcgatcatgtatgggcattctttttatgtcctagtaataagagtagcgacatatatttcttattctatgagattctagtgtttgttagctagagtaatctttttgtaatgaaaaatgatgtctgatgtactccctctgtcacatgccaatcaaattttctcaaatttggctttaagtttgtagaaaatattagcaatatttatatcttcgaataaatttattatgaaaatagactcagtgatctatctaatgatactaattatatactataaatattaatgttttttctatccttgtttcttgtgggtttcatctctagcctaccccaacttgcttgggacaaaatgctatgttgttgttatttaaatatggaagtgagaacacagaaaagggacaaatggagtattgaacaaccaggatgtcatatgtcagcaaaagaactgtggagtattgaacaatgaggatgtcttttgtcagcaaaagaactgatttgtcctacttggcttgctttgtgagattattgcagattgcaatacaatggtgccgatcattggagggaaagatttggatcttcatcagctatataaggaggtcacatcacggggcggtattgacaaggtgaaggcagagaatagatggagagaagtgactgcatcatttattttccctgccactgcgacaaatgcttcttttatgctgaagaaatactatatgtcactcttatatcattttgagcagctatacttctttagagtgcaaggctggcatcaacaagaaatagattccagaatgaattcttccattgaaattaaaaccgaaggccaagcttaccacaaaagaaaaaggggcatcaacacatcttcagatccagcttcgtcttcagataatgttgacgtagatgtgatagttgatggcaaatttgaacatggctacatagtgactgttattatgggatcgaaatccactaaagcaatcctctataattgcactgaagaacctgctttgccaactccggagccacctgttgcaaataacagcactggtttgaagggtgtacgtcgccgaagacgacgtaggaagaagctaagtacaacggatcccaggcaccccaaaccaaacaggagtggctataatttcttcttccaggatcaacatagaattcttaagccacaatatcctgcacaagacagactgatcagtaaaatgattggtgaacgatggaacaatctaagtcctgaagataaagctgtatatcagcaaagaggtgtagaggataaggagcgataccggacccagttggctgcttataaagaactgaggacaggccaacctatcagcaatgctgtgcctatccaacagaggctccctctgacagaagtgacgattgatgaagtagactccaaggtgagccaagatgatatgctgctgtcaaaccaagggtacagcagtagtgatgaaagtgaccattcaggagagaaaaatgtagaagacgagctcaacactgaaacatcccctgaggtgagcatggaaacaactggttctcctggacaccctgatccctctcgagatggggaccactttgagttgcggcggagagaaaaccccaaggcagatgagaaagataatgcaccacctgattcatgacttttcgctttgaatggtatgtattcgaagatccgaaagagaggaatttccaagaggtgacaagctacactacacatacatacctgttgtcgtaggaacataggctatatgctgatgtcaatcagagttctattagcagttggaatacacttcattttggtagttctgaatttgtattgctaaatttctttcgaattaaaagagagagggggggggggggagggggtactgggtaaattttccatccagggatgggtacttggtatattctttcgttcaatatttatcattacgttgatctatatgttgagtatgtgtaatgtcatgtcagcgaaaatccaaatctgcatatctaattgtagctatacatgcttagtttcatatattataaaagggaaaaagctattcttt

SEQ ID NO: 54649 - DNA, 6069 bp, Zea Mays
aacacatatggctctgtatctccaccccagaacaaccttgggttataacgttatctctttcatcctttctcactctgcctatccgtcccaagtatagtatatacgaggagtatattttcttagagatcgttaacctcatagtaatcgctccttttgcccaaaacctaaagggaagccaaagtgggagcaccaaaatactcgccgcgggtgcatagttgtttgtttagaaggagaagacgaggttaaggtaagcaaagcgcatgatggcatcgcatagcatggcaacttcccttcttcctttacagattcataaaaaaacatatatctttgatgaggggtgactggtgagtgagagcgagaggaggtgggcggccagccggccaccaccacggcaccacctcgtctctcctccacgcgtctctgccgcccgggcgcaggcgacgtcgccacgatgacgacggttccatcgcgtttgtgcaggggagatgagcgagctggtgcgggcggcggctccggcagctgcggaggaggagaagaaggccgtcgcggctgtgactgtggtggcgaaaggaaaagagaaggcggaggtgacgccgaccgtggaggcctcatcggtcggcgacagggggaggttcgtggcctacccgtcgcgggtggcggagcacacggacgtggtggcggacgccgcgcgcttcagggcggcgctcgaggggctgcacacgcacatgggcaccaggctcaagtaaagcatttttccgacttccaatacgcacatgacctcgccgccggtgccgatccggttgccgcatttttaattcctctgttgcgttttcttctgcatctgatgcgatggtgccgttacagttgttactatccctgttgcttttaccatcatttcttgaattcaatgcgcgaaaattgcaacttggtataaatgcgtggtgggaaagagaagtttgtgggggcggtggcgattttagtagtaacgtgtgatgcaaatgcatgcgatctgggaggccgcacaccattgattttgattttgactaatcaacccgtgttcgtgtttcctttataacatttatttatgtgtggaccaaatcctccaacacgagttggggattgcggccatcgatatgtcggatggcctacattggtagcttgatgttattttcgattttttgggggatccattgcaacgttcctgttgcatctgggattcttgtttttgtcgaggatgaaatatgattcttgttttctggggaccttttcaggacattatgttagtttgtagtggcataggaatccattgcaacgggctatgtatgtgaaacacgcttacttttcgtgggtgtctgtattgaaatattggatttcgatcatgtatgggcattctttttatgtcctagtaataagagtagcgacatatatttcttattctatgagattctagtgtttgttagctagagtaatctttttgtaatgaaaaatgatgtctgatgtactccctctgtcacatgccaatcaaattttctcaaatttggctttaagtttgtagaaaatattagcaatatttatatcttcgaataaatttattatgaaaatagactcagtgatctatctaatgatactaattatatactataaatattaatgttttttctatccttgtttcttgtgggtttcatctctagcctaccccaacttgcttgggacaaaatgctatgttgttgttatttaaatatggaagtgagaacacagaaaagggacaaatggagtattgaacaaccaggatgtcatatgtcagcaaaagaactgtggagtattgaacaatgaggatgtcttttgtcagcaaaagaactgatttgtcctacttggcttgctttgtgagattattgcagattgcaatacaatgtaaagtttatttggcttcaagcttagtgttgttttcattgaaatgtatggccatccgatttttttctctcgaacacgcaggagagctgcacatcatttaatttagagaagaaaaaggtccaaaatggaccaagatacaaagcctaaaaaggcaagataaaacacacccactcacaacctgccttgcaacaacgctgcagcctccactattactgagaaatcagcaggacaacaaaggccacagcgaaaaaactgcaggcagaccccactctccacaaacactacgccctgaccatattaagggcaacctctaggcctaaattctcaagatgtttagctccaaccttactccaacacgccaactcatctaaaaaaacacttcaaactgtgcttaaagtagggttatgtccattgaagactgccttgttacagtgaacccataggcaccaggcccccagaatgatgatgatgttcataccctttcgcttgcttctgtgcaccttcttacatattttctgcaaaggcgatctcatcactagacggagagaaattaccaaaccccaagggcgaaaggatggtatgccaaaattgtcttgcaaaaatgcatgtgcacaggagatgttggacggattcctgcacgtggtcacataatggacaagactccgggtgatccaaacctctcctttccagtctatcagaagtccaacatttattccatattgccagccaaaggaaatatttgcattttggaggagcccaagacttccacagcctcccctatggctcaaaggtaatggatcccatgaaaaaggccttgtaacatgacttggaagtgaactggtcagaggaggtatgcagccacacatgtctatcagcttcatgtgttaacaccactcttcttatagcatcccataaatgcaagaattgttgcaccccaatcaaagaaagaggggtctcgatgtcactgacccactgccggctttcaataagcctgagcacagttctagtgcaaagagcgctcttaccgaccttagaggcaactgcgggggcaatgtccttggcgcaaccaccatctatccgaccaaaataaagtattggtcccatttccaatcacaataataatcgatgatgcaaagaacttcctgacttgtttcggtataggaaagtttagcccatgccaaggtctgttagggtctgttttctccaaccacaaccatttagcttgcagtgcccagctctggaaatataagttaggaaccccaaatccaccaagctttagtggccttgtaatgatatcccaagagactacaatttcctccattcatgtcatttccccctttccataaaaatcctcttcgaatcttgtcaatcaacttaatcacccacttagggatatccatggcaatgaggagataaattaggatggctaacataacaaaccacaccatagtcgtccttccagcaagattaagcagtcgagcctttcaattaggaagtcgatctgcaatctttcaaaccaagccatggggtctatccttcttagttttttgtctgaaatcagaagccccaaataggagcaaggaaaagaagctgagctgcaatgtagaatgttgcagccctcctacacagcctgctcgctacaccttatcggaatggcacaactcttatgcatattagatacccaaccagaaactgagccaaaacaatccaagatcattttaacacaattcagatcttcctcaaaaggctgaataaaaaggaccacatcatcagcatagctggaaagtctgttccgaacattttctccctgcagactctgaagcagccccctattttcagccaacaaaaatagactgctgaggagtgaggacatcataatcaatataaacaacataggagatagaggatccccctgacgaagtcctctccgatgactgataagattaccaggagacccattcaaaagcacttgagtggaagaagaggccaacagatatgaaatcagattacaccaattaggtccaaaaccaaggtgagaaagcacctcaataagaaaagctcaatagatcgagtcaaaagctttcgaaatgtccaacaactttctggacacagaaaataccgcaactaagtttttgtttttttaaaaaatggcttgcatgttaggcaaagttacttaaagttgtctacctgaatagttaatactatgccatctaattttttttctggaatacgcaggagagctgcgcatctttgtattaatagaagaaaagaaaaggggggggggggggagaaccccaatacaacacacacaccactagagactaactacggatcaccgactaaaacatggaagaaacacgacccacaccgctgttttaagccagcaactcatcgacttggaggaaggacaaggccttggcaccagtcatggaccagagcaccgcctcttccctagccatcctaatggccatgaccaagttgggattacaaccatcaaaaacacacctattcctatgcttccaaatggtccaagcacctagaatcactaaagaattgcatctgagttgcattcataattttctttagttttattaattgccatgcttcatctggttcatttataacccttttttgggggtaagggtgccgatcattggagggaaagatttggatcttcatcagctatataaggaggtcacatcacggggcggtattgacaaggtgaaggcagagaatagatggagagaagtgactgcatcatttattttccctgccactgcgacaaatgcttcttttatgctgaagaaatactatatgtcactcttatatcattttgagcagctatacttctttagagtgcaaggctggcatcaacaagaaatagattccagaatgaattcttccattgaaattaaaaccgaaggccaagcttaccacaaaagaaaaaggggcatcaacacatcttcagatccagcttcgtcttcagataatgttgacgtagatgtgatagttgatggcaaatttgaacatggctacatagtgactgttattatgggatcgaaatccactaaagcaatcctctataattgcactgaagaacctgctttgccaactccggagccacctgttgcaaataacagcactggtttgaagggtgtacgtcgccgaagacgacgtaggaagaagctaagtacaacggatcccaggcaccccaaaccaaacaggagtggctataatttcttcttccaggatcaacatagaattcttaagccacaatatcctgcacaagacagactgatcagtaaaatgattggtgaacgatggaacaatctaagtcctgaagataaagctgtatatcagcaaagaggtgtagaggataaggagcgataccggacccagttggctgcttataaagaactgaggacaggccaacctatcagcaatgctgtgcctatccaacagaggctccctctgacagaagtgacgattgatgaagtagactccaaggtgagccaagatgatatgctgctgtcaaaccaagggtacagcagtagtgatgaaagtgaccattcaggagagaaaaatgtagaagacgagctcaacactgaaacatcccctgaggtgagcatggaaacaactggttctcctggacaccctgatccctctcgagatggggaccactttgagttgcggcggagagaaaaccccaaggcagatgagaaagataatgcaccacctgattcatgacttttcgctttgaatggtatgtattcgaagatccgaaagagaggaatttccaagaggtgacaagctacactacacatacatacctgttgtcgtaggaacataggctatatgctgatgtcaatcagagttctattagcagttggaatacacttcattttggtagttctgaatttgtattgctaaatttctttcgaattaaaagagagagggggggggggggagggggtactgggtaaattttccatccagggatgggtacttggtatattctttcgttcaatatttatcattacgttgatctatatgttgagtatgtgtaatgtcatgtcagcgaaaatccaaatctgcatatctaattgtagctatacatgcttagtttcatatattataaaagggaaaaagctattcttt

SEQ ID NO: 54650 - DNA, 1707 bp, Zea Mays
cacgcgtccatttcgcctaccacttccgccgaccagctgtatctctctggctttccccttctcttcgtcgccgctcatcacaagcctgtcgtcgtcgtaaacacagagagggagctcgtccatgtcctcctgattcctcttggcgatcgagggagtggccgaccggcgataatctagctatagccagcctcgccatgcctcgccagaggaccctcacctccgaggcggccggcgggcggctgctgctcgtggtggtcgcggtcctgctatgcctgtccgtgcctctggggcgtgcggcacccccgggcgcggaggtcgcggagttccctgggttcacgggcaaactcccctccaagcactacgccgggtacgtaacagttggtcaacatgagcaacgaaagagacacctgtactactaccttgccgtctctgaaaggaacccaagcttggatcctgtggtcatctggataaatggcggtccagcatgttcagggtttagtgcatttctgcattcatttggaccttttcgaatggagggctcccaagttcatatcaacgacggtccacgagtagccgtgaacccttactcatggacaaagatggctagcctcctcttggtcgactcgccagcaggtgtgggctactcgtacgctgatcatgaagatgactacaccacagatgacacaagcagggtagcggacctgtatgactttctgtcaaagtggttcgctgaatacgcagaatttctgtcgaatcctttctacgtagctggatgctcgtacagtggagtgatagtacctgtacttgcacacgaaattataaagagaaatgaagaatccggtggggtcaagatcaacttcaagggatattcactatgtaatcccgctattgatgttgacatagagaacaatgcacatgttccatatgcatttcgaatgggtttgatttcagatgaattgtttcagagtttagttactacatgtaatggaaagtattggaataactccaatccatcatgccaagagaacatggagcaattttatactcaaatcaaaggtattaacatggagcatattctatgtccgccgtgtcgatacaagatggggataaccaatcaattcattgaatatgattctggtcaaatgtttgagagcctttcgaaaacctccaagcatggtttagaatgcaatgatcaagagttggcccttgagaaactctttgatacaagatcaggtagagaaaaattgcatgccaaaaaggttgaagtatcaggaccatggaagaggtgccccaagcgtgttctgtacacgagggatattctaacattgatagagtatcacttgaacataacatccaaaggatatagagtgtttatttacagtggagaccattccttgcttgttccttttacttcaactttggagtggctaaagaaactaaactacaaggaaatcgagaaatggcacccttggtacttggagaatcagattgctgggtactcaattaggtacgagaacaatatattgtttgcgacaataaagactctaaattgtggagattccttgcgagagggaaccatcttgatatgaggcagaactgtggcactcaagttcaatctttagatcacttaagaggggttgagtgcaacccttgtacgttgggacaccacaacatggatgtaatcaaacatttcaggcttggccgaac

SEQ ID NO: 54651 - DNA, 1897 bp, Zea Mays
ctctactctactcgcctgcacggcaagccgcacgccaactgtttcgcggccgttactgcatccagctagctagcccgccggcgtgacgtgcaccgcgcacgcgtccatttcgcctaccacttccgccgaccagctgtatctctctggctttccccttctcttcgtcgccgctcatcacaagcctgtcgtcgtcgtaaacacagagagggagctcgtccatgtcctcctgattcctcttggcgatcgagggagtggccgaccggcgataatctagctatagccagcctcgccatgcctcgccagaggaccctcacctccgaggcggccggcgggcggctgctgctcgtggtggtcgcggtcctgctatgcctgtccgtgcctctggggcgtgcggcacccccgggcgcggaggtcgcggagttccctgggttcacgggcaaactcccctccaagcactacgccgggtacgtaacagttggtcaacatgagcaacgaaagagacacctgtactactaccttgccgtctctgaaaggaacccaagcttggatcctgtggtcatctggataaatggcggtccagcatgttcagggtttagtgcatttctgcattcatttggaccttttcgaatggagggctcccaagttcatatcaacgacggtccacgagtagccgtgaacccttactcatggacaaagatggctagcctcctcttggtcgactcgccagcaggtgtgggctactcgtacgctgatcatgaagatgactacaccacagatgacacaagcagggtagcggacctgtatgactttctgtcaaagtggttcgctgaatacgcagaatttctgtcgaatcctttctacgtagctggatgctcgtacagtggagtgatagtacctgtacttgcacacgaaattataaagagaaatgaagaatccggtggggtcaagatcaacttcaagggatattcactatgtaatcccgctattgatgttgacatagagaacaatgcacatgttccatatgcatttcgaatgggtttgatttcagatgaattgtttcagagtttagttactacatgtaatggaaagtattggaataactccaatccatcatgccaagagaacatggagcaattttatactcaaatcaaaggtattaacatggagcatattctatgtccgccgtgtcgatacaagatggggataaccaatcaattcattgaatatgattctggtcaaatgtttgagagcctttcgaaaacctccaagcatggtttagaatgcaatgatcaagagttggcccttgagaaactctttgatacaagatcaggtagagaaaaattgcatgccaaaaaggttgaagtatcaggaccatggaagaggtgccccaagcgtgttctgtacacgagggatattctaacattgatagagtatcacttgaacataacatccaaaggatatagagtgtttatttacagtggagaccattccttgcttgttccttttacttcaactttggagtggctaaagaaactaaactacaaggaaatcgagaaatggcacccttggtacttggagaatcagattgctgggtactcaattaggtacgagaacaatatattgtttgcgacaataaaggtccactgagatgcaatttgaaggtttcaagtccaaaagagctgaaacaggggcctgaaaatgcaacttggagcaaaatggtaaaactatgagactctaaattgtggagattccttgcgagagggaaccatcttgatatgaggcagaactgtggcactcaagttcaatctttagatcacttaagaggggttgagtgcaacccttgtacgttgggacaccacaacatggatgtaatcaaacatttcaggcttggccgaac

SEQ ID NO: 54652 - DNA, 1713 bp, Zea Mays
gctagctagcccgccggcgtgacgtgcaccgcgcacgcgtccatttcgcctaccacttccgccgaccagctgtatctctctggctttccccttctcttcgtcgccgctcatcacaagcctgtcgtcgtcgtaaacacagagagggagctcgtccatgtcctcctgattcctcttggcgatcgagggagtggccgaccggcgataatctagctatagccagcctcgccatgcctcgccagaggaccctcacctccgaggcggccggcgggcggctgctgctcgtggtggtcgcggtcctgctatgcctgtccgtgcctctggggcgtgcggcacccccgggcgcggaggtcgcggagttccctgggttcacgggcaaactcccctccaagcactacgccgggtacgtaacagttggtcaacatgagcaacgaaagagacacctgtactactaccttgccgtctctgaaaggaacccaagcttggatcctgtggtcatctggataaatggcggtccagcatgttcagggtttagtgcatttctgcattcatttggaccttttcgaatggagggctcccaagttcatatcaacgacggtccacgagtagccgtgaacccttactcatggacaaagatggctagcctcctcttggtcgactcgccagcaggtgtgggctactcgtacgctgatcatgaagatgactacaccacagatgacacaagcagggtagcggacctgtatgactttctgtcaaagtggttcgctgaatacgcagaatttctgtcgaatcctttctacgtagctggatgctcgtacagtggagtgatagtacctgtacttgcacacgaaattataaagagtaatgaagaatccggtggggtcaagatcaacttcaagggatattcactatgtaatcccgctattgatgttgacatagagaacaatgcacatgttccatatgcatttcgaatgggtttgatttcagatgaattgtttcagagtttagttactacatgtaatggaaagtattggaataactccaatccatcatgccaagagaacatggagcaattttatactcaaatcaaaggtattaacatggagcatattctatgtccgccgtgtcgatacaagatggggataaccaatcaattcattgaatatgattctggtcaaatgtttgagagcctttcgaaaacctccaagcatggtttagaatgcaatgatcaagagttggcccttgagaaactctttgatacaagatcaggtagagaaaaattgcatgccaaaaaggttgaagtatcaggaccatggaagaggtgccccaagcgtgttctgtacacgagggatattctaacattgatagagtatcacttgaacataacatccaaaggatatagagtgtttatttacagtggagaccattccttgcttgttccttttacttcaactttggagtggctaaagaaactaaactacaaggaaatcgagaaatggcacccttggtacttggagaatcagattgctgggtactcaattaggtacgagaacaatatattgtttgcgacaataaagggggctggccatgttccatcggactatctgccatttgaagtatttgctgcctatcaaaggtccactgagatgcaatttgaaggtttcaagtccaaaagagctgaaacaggggcctgaaaatgcaacttggagcaaaatg

SEQ ID NO: 54653 - DNA, 1837 bp, Zea Mays
cacgcgtccatttcgcctaccacttccgccgaccagctgtatctctctggctttccccttctcttcgtcgccgctcatcacaagcctgtcgtcgtcgtaaacacagagagggagctcgtccatgtcctcctgattcctcttggcgatcgagggagtggccgaccggcgataatctagctatagccagcctcgccatgcctcgccagaggaccctcacctccgaggcggccggcgggcggctgctgctcgtggtggtcgcggtcctgctatgcctgtccgtgcctctggggcgtgcggcacccccgggcgcggaggtcgcggagttccctgggttcacgggcaaactcccctccaagcactacgccgggtacgtaacagttggtcaacatgagcaacgaaagagacacctgtactactaccttgccgtctctgaaaggaacccaagcttggatcctgtggtcatctggataaatggcggtccagcatgttcagggtttagtgcatttctgcattcatttggaccttttcgaatggagggctcccaagttcatatcaacgacggtccacgagtagccgtgaacccttactcatggacaaagatggctagcctcctcttggtcgactcgccagcaggtgtgggctactcgtacgctgatcatgaagatgactacaccacagatgacacaagcagggtagcggacctgtatgactttctgtcaaagtggttcgctgaatacgcagaatttctgtcgaatcctttctacgtagctggatgctcgtacagtggagtgatagtacctgtacttgcacacgaaattataaagagaaatgaagaatccggtggggtcaagatcaacttcaagggatattcactatgtaatcccgctattgatgttgacatagagaacaatgcacatgttccatatgcatttcgaatgggtttgatttcagatgaattgtttcagagtttagttactacatgtaatggaaagtattggaataactccaatccatcatgccaagagaacatggagcaattttatactcaaatcaaaggtattaacatggagcatattctatgtccgccgtgtcgatacaagatggggataaccaatcaattcattgaatatgattctggtcaaatgtttgagagcctttcgaaaacctccaagcatggtttagaatgcaatgatcaagagttggcccttgagaaactctttgatacaagatcaggtagagaaaaattgcatgccaaaaaggttgaagtatcaggaccatggaagaggtgccccaagcgtgttctgtacacgagggatattctaacattgatagagtatcacttgaacataacatccaaaggatatagagtgtttatttacagtggagaccattccttgcttgttccttttacttcaactttggagtggctaaagaaactaaactacaaggaaatcgagaaatggcacccttggtacttggagaatcagattgctgggtactcaattaggtacgagaacaatatattgtttgcgacaataaagcaaagtgtgatagctcaatagctgaccggacgagatccagaagaatctacagttgtactacgagcagcagccgcactgaacagacaatatgaagagcaaccgtcaaagtttcaacccgccggacaaaccaagacccgacaactaaaaagccctaagatgaggcacgaccggaacctatgaaaccggtcagagaacgggaccaagggagcaacctgcttgatcttcgcggtggtatctatcatccgggactgcagctccatgaaggcctgcacatgagcaaagcaaggaactttcag

SEQ ID NO: 54654 - DNA, 1561 bp, Zea Mays
cgccgaccagctgtatctctctggctttccccttctcttcgtcgccgctcatcacaagcctgtcgtcgtcgtaaacacagagagggagctcgtccatgtcctcctgattcctcttggcgatcgagggagtggccgaccggcgataatctagctatagccagcctcgccatgcctcgccagaggaccctcacctccgaggcggccggcgggcggctgctgctcgtggtggtcgcggtcctgctatgcctgtccgtgcctctggggcgtgcggcacccccgggcgcggaggtcgcggagttccctgggttcacgggcaaactcccctccaagcactacgccgggtacgtaacagttggtcaacatgagcaacgaaagagacacctgtactactaccttgccgtctctgaaaggaacccaagcttggatcctgtggtcatctggataaatggcggtccagcatgttcagggtttagtgcatttctgcattcatttggaccttttcgaatggagggctcccaagttcatatcaacgacggtccacgagtagccgtgaacccttactcatggacaaagatggctagcctcctcttggtcgactcgccagcaggtgtgggctactcgtacgctgatcatgaagatgactacaccacagatgacacaagcagggtagcggacctgtatgactttctgtcaaagtggttcgctgaatacgcagaatttctgtcgaatcctttctacgtagctggatgctcgtacagtggagtgatagtacctgtacttgcacacgaaattataaagagaaatgaagaatccggtggggtcaagatcaacttcaagggatattcactatgtaatcccgctattgatgttgacatagagaacaatgcacatgttccatatgcatttcgaatgggtttgatttcagatgaattgtttcagagtttagttactacatgtaatggaaagtattggaataactccaatccatcatgccaagagaacatggagcaattttatactcaaatcaaaggtattaacatggagcatattctatgtccgccgtgtcgatacaagatggggataaccaatcaattcattgaatatgattctggtcaaatgtttgagagcctttcgaaaacctccaagcatggtttagaatgcaatgatcaagagttggcccttgagaaactctttgatacaagatcaggtagagaaaaattgcatgccaaaaaggttgaagtatcaggaccatggaagaggtgccccaagcgtgttctgtacacgagggatattctaacattgatagagtatcacttgaacataacatccaaaggatatagagtgtttatttacagtggagaccattccttgcttgttccttttacttcaactttggagtggctaaagaaactaaactacaaggaaatcgagaaatggcacccttggtacttggagaatcagattgctgggtactcaattaggtacgagaacaatatattgtttgcgacaataaagtgttctgttttacttgtttggttcctcgattcgtctgtcatgtggg

SEQ ID NO: 54655 - DNA, 2374 bp, Zea Mays
cgcctaccacttccgccgaccagctgtatctctctggctttccccttctcttcgtcgccgctcatcacaagcctgtcgtcgtcgtaaacacagagagggagctcgtccatgtcctcctgattcctcttggcgatcgagggagtggccgaccggcgataatctagctatagccagcctcgccatgcctcgccagaggaccctcacctccgaggcggccggcgggcggctgctgctcgtggtggtcgcggtcctgctatgcctgtccgtgcctctggggcgtgcggcacccccgggcgcggaggtcgcggagttccctgggttcacgggcaaactcccctccaagcactacgccgggtacgtaacagttggtcaacatgagcaacgaaagagacacctgtactactaccttgccgtctctgaaaggaacccaagcttggatcctgtggtcatctggataaatggcggtccagcatgttcagggtttagtgcatttctgcattcatttggaccttttcgaatggagggctcccaagttcatatcaacgacggtccacgagtagccgtgaacccttactcatggacaaagatggctagcctcctcttggtcgactcgccagcaggtgtgggctactcgtacgctgatcatgaagatgactacaccacagatgacacaagcagggtagcggacctgtatgactttctgtcaaagtggttcgctgaatacgcagaatttctgtcgaatcctttctacgtagctggatgctcgtacagtggagtgatagtacctgtacttgcacacgaaattataaagagtaatgaagaatccggtggggtcaagatcaacttcaagggatattcactatgtaatcccgctattgatgttgacatagagaacaatgcacatgttccatatgcatttcgaatgggtttgatttcagatgaattgtttcagagtttagttactacatgtaatggaaagtattggaataactccaatccatcatgccaagagaacatggagcaattttatactcaaatcaaaggtattaacatggagcatattctatgtccgccgtgtcgatacaagatggggataaccaatcaattcattgaatatgattctggtcaaatgtttgagagcctttcgaaaacctccaagcatggtttagaatgcaatgatcaagagttggcccttgagaaactctttgatacaagatcaggtagagaaaaattgcatgccaaaaaggttgaagtatcaggaccatggaagaggtgccccaagcgtgttctgtacacgagggatattctaacattgatagagtatcacttgaacataacatccaaaggatatagagtgtttatttacagtggagaccattccttgcttgttccttttacttcaactttggagtggctaaagaaactaaactacaaggaaatcgagaaatggcacccttggtacttggagaatcagattgctgggtactcaattaggtacgagaacaatatattgtttgcgacaataaagaactgacttcggctccagaataaacctggcaacagatggacgtggggggaaaatgaaatacacgataccgtattttgcatcacagcaccatacaagaaaatgaaattgaactcgcccatggtcaagatggtcttcctcatttacttacacttttcctgcaaacaaaagcagccgtcatcaaaccaacggaaagcaaggcacatataacatctcactcaaagttggacagctgcaataaaagttttccagctacgcatttaatgttatatgtttcaaaagaaaaacatatccagtagaatttagttgagcaactggaataacttgcaagttctacgaccatatcatattgcatgatttcgcatttttcatcatatgccatttattggaataacacaacaggcaacatcgaatcaatagaataacacaacaagcaacattgaaccaattgcaggagttgactataacaggaatggaggtgtgcctagcttagttagtcagggtgacaggtttggttgtgcattccaacgacctagattcgagtactgttcaacttaggtttgggtggcaatttcttcttctcaatgaaaaaccaactagttcctcctaggttggatctgagaccaatgacatttcaaaaaatgaaaccttccactctcagatacatttggctgctttcttaatacattcaaaatcatttggatgactgctgtttagggatattgcctgcagcaacaatatacaaaaagactagtaccacctttcacttttactactagtctactaaaaggtgaccagaggcagtgaaatgtgaaagtaggtccgcaagttttctccagtgaatttgac

SEQ ID NO: 54656 - DNA, 2383 bp, Zea Mays
cgtccatttcgcctaccacttccgccgaccagctgtatctctctggctttccccttctcttcgtcgccgctcatcacaagcctgtcgtcgtcgtaaacacagagagggagctcgtccatgtcctcctgattcctcttggcgatcgagggagtggccgaccggcgataatctagctatagccagcctcgccatgcctcgccagaggaccctcacctccgaggcggccggcgggcggctgctgctcgtggtggtcgcggtcctgctatgcctgtccgtgcctctggggcgtgcggcacccccgggcgcggaggtcgcggagttccctgggttcacgggcaaactcccctccaagcactacgccgggtacgtaacagttggtcaacatgagcaacgaaagagacacctgtactactaccttgccgtctctgaaaggaacccaagcttggatcctgtggtcatctggataaatggcggtccagcatgttcagggtttagtgcatttctgcattcatttggaccttttcgaatggagggctcccaagttcatatcaacgacggtccacgagtagccgtgaacccttactcatggacaaagatggctagcctcctcttggtcgactcgccagcaggtgtgggctactcgtacgctgatcatgaagatgactacaccacagatgacacaagcagggtagcggacctgtatgactttctgtcaaagtggttcgctgaatacgcagaatttctgtcgaatcctttctacgtagctggatgctcgtacagtggagtgatagtacctgtacttgcacacgaaattataaagagaaatgaagaatccggtggggtcaagatcaacttcaagggatattcactatgtaatcccgctattgatgttgacatagagaacaatgcacatgttccatatgcatttcgaatgggtttgatttcagatgaattgtttcagagtttagttactacatgtaatggaaagtattggaataactccaatccatcatgccaagagaacatggagcaattttatactcaaatcaaaggtattaacatggagcatattctatgtccgccgtgtcgatacaagatggggataaccaatcaattcattgaatatgattctggtcaaatgtttgagagcctttcgaaaacctccaagcatggtttagaatgcaatgatcaagagttggcccttgagaaactctttgatacaagatcaggtagagaaaaattgcatgccaaaaaggttgaagtatcaggaccatggaagaggtgccccaagcgtgttctgtacacgagggatattctaacattgatagagtatcacttgaacataacatccaaaggatatagagtgtttatttacagtggagaccattccttgcttgttccttttacttcaactttggagtggctaaagaaactaaactacaaggaaatcgagaaatggcacccttggtacttggagaatcagattgctgggtactcaattaggtacgagaacaatatattgtttgcgacaataaagaactgacttcggctccagaataaacctggcaacagatggacgtggggggaaaatgaaatacacgataccgtattttgcatcacagcaccatacaagaaaatgaaattgaactcgcccatggtcaagatggtcttcctcatttacttacacttttcctgcaaacaaaagcagccgtcatcaaaccaacggaaagcaaggcacatataacatctcactcaaagttggacagctgcaataaaagttttccagctacgcatttaatgttatatgtttcaaaagaaaaacatatccagtagaatttagttgagcaactggaataacttgcaagttctacgaccatatcatattgcatgatttcgcatttttcatcatatgccatttattggaataacacaacaggcaacatcgaatcaatagaataacacaacaagcaacattgaaccaattgcaggagttgactataacaggaatggaggtgtgcctagcttagttagtcagggtgacaggtttggttgtgcattccaacgacctagattcgagtactgttcaacttaggtttgggtggcaatttcttcttctcaatgaaaaaccaactagttcctcctaggttggatctgagaccaatgacatttcaaaaaatgaaaccttccactctcagatacatttggctgctttcttaatacattcaaaatcatttggatgactgctgtttagggatattgcctgcagcaacaatatacaaaaagactagtaccacctttcacttttactactagtctactaaaaggtgaccagaggcagtgaaatgtgaaagtaggtccgcaagttttctccagtgaatttgac

SEQ ID NO: 54657 - DNA, 1897 bp, Zea Mays
cttctcttcgtcgccgctcatcacaagcctgtcgtcgtcgtaaacacagagagggagctcgtccatgtcctcctgattcctcttggcgatcgagggagtggccgaccggcgataatctagctatagccagcctcgccatgcctcgccagaggaccctcacctccgaggcggccggcgggcggctgctgctcgtggtggtcgcggtcctgctatgcctgtccgtgcctctggggcgtgcggcacccccgggcgcggaggtcgcggagttccctgggttcacgggcaaactcccctccaagcactacgccgggtacgtaacagttggtcaacatgagcaacgaaagagacacctgtactactaccttgccgtctctgaaaggaacccaagcttggatcctgtggtcatctggataaatggcggtccagcatgttcagggtttagtgcatttctgcattcatttggaccttttcgaatggagggctcccaagttcatatcaacgacggtccacgagtagccgtgaacccttactcatggacaaagatggctagcctcctcttggtcgactcgccagcaggtgtgggctactcgtacgctgatcatgaagatgactacaccacagatgacacaagcagggtagcggacctgtatgactttctgtcaaagtggttcgctgaatacgcagaatttctgtcgaatcctttctacgtagctggatgctcgtacagtggagtgatagtacctgtacttgcacacgaaattataaagagaaatgaagaatccggtggggtcaagatcaacttcaagggatattcactatgtaatcccgctattgatgttgacatagagaacaatgcacatgttccatatgcatttcgaatgggtttgatttcagatgaattgtttcagagtttagttactacatgtaatggaaagtattggaataactccaatccatcatgccaagagaacatggagcaattttatactcaaatcaaaggtattaacatggagcatattctatgtccgccgtgtcgatacaagatggggataaccaatcaattcattgaatatgattctggtcaaatgtttgagagcctttcgaaaacctccaagcatggtttagaatgcaatgtcagtatttgatctactaatggactctatttcactaattttttagtcatgatcaagagttggcccttgagaaactctttgatacaagatcaggtagagaaaaattgcatgccaaaaaggttgaagtatcaggaccatggaagaggtgccccaagcgtgttctgtacacgagggatattctaacattgatagagtatcacttgaacataacatccaaaggatatagagtgtttatttacagtggagaccattccttgcttgttccttttacttcaactttggagtggctaaagaaactaaactacaaggaaatcgagaaatggcacccttggtacttggagaatcagattgctgggtactcaattaggtacgagaacaatatattgtttgcgacaataaagggggctggccatgttccatcggactatctgccatttgaagtatttgctgcctatcaaaggtggatagacggggctgcttctctctgatagcgcttgtcgtactcttgtgctgcaaaatctttgcataataattaataaatccgaatagagtaccgaggccaactgggagatcacctctgttgttgacattgaaaaccaatgtaagagtggttaatggctactccttctattctagattattacaagtcatttcaacttccttcgagaggtttaagtatctcaaatttgactaaaactacagagaaaactataaagatttaggacatcggatatatgtgctatgaaaatttaattaattagtaa

SEQ ID NO: 54658 - DNA, 1444 bp, Zea Mays
cttctcttcgtcgccgctcatcacaagcctgtcgtcgtcgtaaacacagagagggagctcgtccatgtcctcctgattcctcttggcgatcgagggagtggccgaccggcgataatctagctatagccagcctcgccatgcctcgccagaggaccctcacctccgaggcggccggcgggcggctgctgctcgtggtggtcgcggtcctgctatgcctgtccgtgcctctggggcgtgcggcacccccgggcgcggaggtcgcggagttccctgggttcacgggcaaactcccctccaagcactacgccgggtacgtaacagttggtcaacatgagcaacgaaagagacacctgtactactaccttgccgtctctgaaaggaacccaagcttggatcctgtggtcatctggataaatggcggtccagcatgttcagggtttagtgcatttctgcattcatttggaccttttcgaatggagggctcccaagttcatatcaacgacggtccacgagtagccgtgaacccttactcatggacaaagatggctagcctcctcttggtcgactcgccagcaggtgtgggctactcgtacgctgatcatgaagatgactacaccacagatgacacaagcagggtagcggacctgtatgactttctgtcaaagtggttcgctgaatacgcagaatttctgtcgaatcctttctacgtagctggatgctcgtacagtggagtgatagtacctgtacttgcacacgaaattataaagagtaatgaagaatccggtggggtcaagatcaacttcaagggatattcactatgtaatcccgctattgatgttgacatagagaacaatgcacatgttccatatgcatttcgaatgggtttgatttcagatgaattgtttcagagtttagttactacatgtaatggaaagtattggaataactccaatccatcatgccaagagaacatggagcaattttatactcaaatcaaaggtattaacatggagcatattctatgtccgccgtgtcgatacaagatggggataaccaatcaattcattgaatatgattctggtcaaatgtttgagagcctttcgaaaacctccaagcatggtttagaatgcaattggagaccattccttgcttgttccttttacttcaactttggagtggctaaagaaactaaactacaaggaaatcgagaaatggcacccttggtacttggagaatcagattgctgggtactcaattaggtacgagaacaatatattgtttgcgacaataaagagaggtgggctccacatgatagccgtagccgcgagagcaggcatcctcttccttcaccgcacacacatccttccctacctcttcgtcctccaacacttgccatggtggcctctttcttggctgccaagtgtactgacaacaagtggatgtc

SEQ ID NO: 54659 - DNA, 1799 bp, Zea Mays
cgtcactctactctactctactcgcctgcacggcaagccgcacgccaactgtttcgcggccgttactgcatccagctagctagcccgccggcgtgacgtgcaccgcgcacgcgtccatttcgcctaccacttccgccgaccagctgtatctctctggctttccccttctcttcgtcgccgctcatcacaagcctgtcgtcgtcgtaaacacagagagggagctcgtccatgtcctcctgattcctcttggcgatcgagggagtggccgaccggcgataatctagctatagccagcctcgccatgcctcgccagaggaccctcacctccgaggcggccggcgggcggctgctgctcgtggtggtcgcggtcctgctatgcctgtccgtgcctctggggcgtgcggcacccccgggcgcggaggtcgcggagttccctgggttcacgggcaaactcccctccaagcactacgccgggtacgtaacagttggtcaacatgagcaacgaaagagacacctgtactactaccttgccgtctctgaaaggaacccaagcttggatcctgtggtcatctggataaatggcggtccagcatgttcagggtttagtgcatttctgcattcatttggaccttttcgaatggagggctcccaagttcatatcaacgacggtccacgagtagccgtgaacccttactcatggacaaagatggctagcctcctcttggtcgactcgccagcaggtgtgggctactcgtacgctgatcatgaagatgactacaccacagatgacacaagcagggtagcggacctgtatgactttctgtcaaagtggttcgctgaatacgcagaatttctgtcgaatcctttctacgtagctggatgctcgtacagtggagtgatagtacctgtacttgcacacgaaattataaagagaaatgaagaatccggtggggtcaagatcaacttcaagggatattcactatgtaatcccgctattgatgttgacatagagaacaatgcacatgttccatatgcatttcgaatgggtttgatttcagatgaattgtttcagagtttagttactacatgtaatggaaagtattggaataactccaatccatcatgccaagagaacatggagcaattttatactcaaatcaaaggtattaacatggagcatattctatgtccgccgtgtcgatacaagatggggataaccaatcaattcattgaatatgattctggtcaaatgtttgagagcctttcgaaaacctccaagcatggtttagaatgcaatgatcaagagttggcccttgagaaactctttgatacaagatcaggtagagaaaaattgcatgccaaaaaggttgaagtatcaggaccatggaagaggtgccccaagcgtgttctgtacacgagggatattctaacattgatagagtatcacttgaacataacatccaaaggatatagagtgtttatttacagtggagaccattccttgcttgttccttttacttcaactttggagtggctaaagaaactaaactacaaggaaatcgagaaatggcacccttggtacttggagaatcagattgctgggtactcaattaggtacgagaacaatatattgtttgcgacaataaagagaggtgggctccacatgatagccgtagccgcgagagcaggcatcctcttccttcaccgcacacacatccttccctacctcttcgtcctccaacacttgccatggtggcctctttcttggctgccaagtgtactgacaacaagtggatgtc

SEQ ID NO: 54660 - DNA, 539 bp, Zea Mays
tggaatctgtagcgtgccactatacaacgacagtactcgcgcagctccgtgccccgctgcgcctcgtccaacgccatcgcctcatcctcagcagagtggtgggaatacaagttgcataccgcgccaccagacgagcttgccatgtcgacggcggtgatggccacctccatccctggcaccctcactactgctcctggcggccaggtccgctgctatgcacctcgccacggacccacggatatttacttccacctcgtgtgtggccgcaccgtcgccagtaggagaaggaaaggcgaggccgcgaggagatagtgtcgtggcctgtcccgacaacgcgatgtcgtttgaggggagggagggaggatggacctcctggcggctgcccgagtgggccgagccgcaccgcgatgattgtttggggaggagggatgacgcttcgtcgcttcctccggcgtggcatggaaagtttgagacagaggggattgagctcctggcgacaaactgagttggcactgcgccgttgtgccgctgtgtgtgac

SEQ ID NO: 54661 - DNA, 1093 bp, Zea Mays
gtttggtagaattgagctgtatgcacgatctggttcgggttatatagccttctataaacaatggacatccatattcaatatcttactggcgccttttttagaaaaagaaaaagaaaaagtaacataacagtaagcacacaatattgaacctatttatgttgagatgaagtctcattactcgcatagcacatcaatatgtcagaagaatacaggaggggaggccaagaactgttctcgtcattaggtctgcaagaaccactgagaagcattggggtttcgtttgcttctgttgctcccatagcgggctacagaagccttagaaagttgccgcctagatattcatctttcactggcataaatgagaccgacataaatgaaatgaatatctttggttgtcaagagctcatttgaagtattaagagactgtcagcaatgccagatcaccaatgcatgcatgctcatcaagccccagaaaatctgctaaagaaggcagaacctcgaaggaggtcttgtccacctgttttacaaaaaatctccaagcaagaaatccaataaagttgtctaccctagacgaagaattagatcaaagcctttttaggtgaaatgccactatgatgaggtcttgtagattacagagaacataataagcttagcaaagcagttcgatgtcagcgttatggattgtccaaagcctccgggtggcaactcaacctttgttccaccaagcaaagctgctgcaacagcaagtcagaaggtacagataaaacagaaagaaaatccataccaataatccatctaattctacaattttcatgcctaccccaatagttattgggaataaaacactctacgcacgattcagtcaaggaagcaaaatccacatagatctaggcactaagcgaaatgaatgcaccaaccaccaatttttaagaaaaccatgatacaccacatttgtataatgactggaaggaatttgctggtccacctttgttagctcaactaatgccttgagccaccttgtcgagatgtgcatcacggccgcagcaacctgaagacgcaaatattccggttcttatcagcatcgatacaaaat

SEQ ID NO: 54662 - DNA, 588 bp, Zea Mays
ttccagtacggccatgctgccgtggtatactgctgaaaggaaacaaactccaagaaagcaaaaaacccacagggcaatggatgatattaaagaaagcatcgccgaactgaagtattacaagcacaacattttcaaaccacagaaatcaaagcggtagctgcacgtcgagtagttgaatcgactgatagctaaccagaattggagatgggttttcaggtcaaagccgcatgccttgctttggggttatgttctgtgcaagtgtgcatccattagtgcttgggtttataccgatctcaatggggttttatgaaagtttcatgaacactaaataatttgatgtggcatagtatttattgataaagggagatgataaaagtttcgtataaaagagtttaatggaagataaaacttatctatactgtttccaatacatgagggatttggaaacagtgatatgaaactcctattgagatttgagatcatatcacgacactagtacttcatgattttctgaagccttcctggatgtgtctcatagttgctacatcacatgcacacatagtaacggttaattaaagggattgaaaa

SEQ ID NO: 54663 - DNA, 807 bp, Zea Mays
ccaccaccctccttggtagcacctaattgcctctgagctcagaatcaggaacttgtcacatagtgatgtagacatggttttagactttgttaggaagcacataaattcaggcactccattattagctgggaattctgtttatgtggattttctatttctgaagaagtacatgccacagcttgcagccgtcttctctcatgtaattgtcgatgtgagcagtataatggctttatgcatacgatggtaccccaaagaaaggaaacaaactccaagaaagcaaaaaacccacagggcaatggatgatattaaagaaagcatcgccgaactgaagtattacaagcacaacattttcaaaccacagaaatcaaagcggtagctgcacgtcgagtagttgaatcgactgatagctaaccagaattggagatgggttttcaggtcaaagccgcatgccttgctttggggttatgttctgtgcaagtgtgcatccattagtgcttgggtttataccgatctcaatggggttttatgaaagtttcatgaacactaaataatttgatgtggcatagtatttattgataaagggagatgataaaagtttcgtataaaagagtttaatggaagataaaacttatctatactgtttccaatacatgagggatttggaaacagtgatatgaaactcctattgagatttgagatcatatcacgacactagtacttcatgattttctgaagccttcctggatgtgtctcatagttgctacatcacatgcacacatagtaacggttaattaaagggattgaaaa

SEQ ID NO: 54664 - DNA, 1397 bp, Zea Mays
atgtcaactccacaagacagtagcagtcgtcgcagtggcataggagcagctcctgctgatgctggtagctctagagatcccactccatctgatgcagcaacccaagggacaaggaatgatgttgttgaaatagatgatgctgcacaggttgggtgtaagaggaagttgaagtctaaagtatgggaggattttgttagagttactgtatcagctcaagatcaatatttttttactgggtccgaccctgaattgcaggattcaactgtatcagctcaagatcaatatttttttaaatgagtaagcttgcaaatatgttctcggctctttgtctggatgctgaaagcaatgaagatgttggccgagctgaagtaccacaggcgtcttccagcacagacaaaactgctgcaagcaaacctgataaaaatgagcagaatgacacaactgcagtaaactatgaggaggcagcacttgtatcatcatctagtgattacaggatgcctttggtgtggatagacttggaaatgaccgggtcctgacttagttataagccagagcaaagattgtttagataatatggatgaatggtgcaaaactcatcatgcagctagtggtttgacggaaagagtactgcagagtgaactttctgagcatgatgcagaggcaaaagttttagactttgttaggaagcacataaattcaggcactccattattagctgggaattctgtttatgtggattttctatttctgaagaagtacatgccacagcttgcagccgtcttctctcatgtaattgtcgatgtgagcagtataatggctttatgcatacgatggtaccccaaagaaaggaaacaaactccaagaaagcaaaaaacccacagggcaatggatgatattaaagaaagcatcgccgaactgaagtattacaagcacaacattttcaaaccacagaaatcaaagcggtagctgcacgtcgagtagttgaatcgactgatagctaaccagaattggagatgggttttcaggtcaaagccgcatgccttgctttggggttatgttctgtgcaagtgtgcatccattagtgcttgggtttataccgatctcaatggggttttatgaaagtttcatgaacactaaataatttgatgtggcatagtatttattgataaagggagatgataaaagtttcgtataaaagagtttaatggaagataaaacttatctatactgtttccaatacatgagggatttggaaacagtgatatgaaactcctattgagatttgagatcatatcacgacactagtacttcatgattttctgaagccttcctggatgtgtctcatagttgctacatcacatgcacacatagtaacggttaattaaagggattgaaaa

SEQ ID NO: 54665 - DNA, 1461 bp, Zea Mays
atgtcaactccacaagacagtagcagtcgtcgcagtggcataggagcagctcctgctgatgctggtagctctagagatcccactccatctgatgcagcaacccaagggacaaggaatgatgttgttgaaatagatgatgctgcacaggttgggtgtaagaggaagttgaagtctaaagtatgggaggattttgttagagttactgtatcagctcaagatcaatatttttttactgggtccgaccctgaattgcaggattcaactgtatcagctcaagatcaatatttttttaaatgagtaagcttgcaaatatgttctcggctctttgtctggatgctgaaagcaatgaagatgttggccgagctgaagtaccacaggcgtcttccagcacagacaaaactgctgcaagcaaacctgataaaaatgagcagaatgacacaactgcagtaaactatgaggaggcagcacttgtatcatcatctagtgattacaggatgcctttggtgtggatagacttggaaatgaccggtttggatataacaaaagatcggattttggagattgcttgtatcataacggatggcaaacttacaaaacaaatagagttataagccagagcaaagattgtttagataatatggatgaatggtgcaaaactcatcatgcagctagtggtttgacggaaagagtactgcagagtgaactttctgagcatgatgcagaggcaaaagttttagactttgttaggaagcacataaattcaggcactccattattagctgggaattctgtttatgtggattttctatttctgaagaagtacatgccacagcttgcagccgtcttctctcatgtaattgtcgatgtgagcagtataatggctttatgcatacgatggtaccccaaagaaaggaaacaaactccaagaaagcaaaaaacccacagggcaatggatgatattaaagaaagcatcgccgaactgaagtattacaagcacaacattttcaaaccacagaaatcaaagcggtagctgcacgtcgagtagttgaatcgactgatagctaaccagaattggagatgggttttcaggtcaaagccgcatgccttgctttggggttatgttctgtgcaagtgtgcatccattagtgcttgggtttataccgatctcaatggggttttatgaaagtttcatgaacactaaataatttgatgtggcatagtatttattgataaagggagatgataaaagtttcgtataaaagagtttaatggaagataaaacttatctatactgtttccaatacatgagggatttggaaacagtgatatgaaactcctattgagatttgagatcatatcacgacactagtacttcatgattttctgaagccttcctggatgtgtctcatagttgctacatcacatgcacacatagtaacggttaattaaagggattgaaaa

SEQ ID NO: 54666 - DNA, 2144 bp, Zea Mays
aaagttccctaaccggctaaccctaatttcacggccgcccacccgccagcgccctgcgcccagccggcaccctaagttcccacttcccagttcccacccgccagccgccaaccgcccagcccgctgccccgctcccgccccgagctgcgcggctgcgcccccaagctgcgcgcctgcgccgtccccgaggcccgagctgtgcctgcgtcgtccgtcgtggcccgagctgcgcctgcgccgtccccgaggcccgagctgcgcggctgcgcccccgagctgcgccgtccgtcggcccccactcgtcgttcctcccgtcgcgcggcgcagcgctcacgcaaggccctcggaccagcagatcgacggcttcaccgcggatcgaccagcagatcaacgccgcccttcagaccctcaggattcaactgtatcagctcaagatcaatatttttttaaatgagtaagcttgcaaatatgttctcggctctttgtctggatgctgaaagcaatgaagatgttggccgagctgaagtaccacaggcgtcttccagcacagacaaaactgctgcaagcaaacctgataaaaatgagcagaatgacacaactgcagtaaactatgaggaggcagcacttgtatcatcatctagtgattacaggatgcctttggtgtggatagacttggaaatgaccggtttggatataacaaaagatcggattttggagattgcttgtatcataacggatggcaaacttacaaaacaaatagaggttgtcgtcgaaacgaagtgcttttgttggtttgttctatagagcttttgtaaaatgtgatgatgttgtgctgaatcactttaatatttcctatgaaacatccagatcacattctttggggcactgagatctttgtttgaagattaaatagaaagataatgacatgctactctctctgcccctaattatctctgtttgttaaaattatgttgtggtggcatgatttttattaaatattgagggagcagtggtttcaactagaaatatgttcacggatttgaccccagcttgcacaccacattatggtaaaaggtttcaactagaaatatgttcacggatatgatacttcaaatgctttaacacagagttcgtgccaatgctaccttagtgattatatcattaagaaaagaaagtgttcattatttgtaattcgctagtcatgtcaatgcctcatacatgtcagcaccatgtagaaattgaattatttaacatgattgccttgctattttgcagggtcctgacttagttataagccagagcaaagattgtttagataatatggatgaatggtgcaaaactcatcatgcagctagtggtttgacggaaagagtactgcagagtgaactttctgagcatgatgcagaggcaaaagttttagactttgttaggaagcacataaattcaggcactccattattagctgggaattctgtttatgtggattttctatttctgaagaagtacatgccacagcttgcagccgtcttctctcatgtaattgtcgatgtgagcagtataatggctttatgcatacgatggtaccccaaagaaaggaaacaaactccaagaaagcaaaaaacccacagggcaatggatgatattaaagaaagcatcgccgaactgaagtattacaagcacaacattttcaaaccacagaaatcaaagcggtagctgcacgtcgagtagttgaatcgactgatagctaaccagaattggagatgggttttcaggtcaaagccgcatgccttgctttggggttatgttctgtgcaagtgtgcatccattagtgcttgggtttataccgatctcaatggggttttatgaaagtttcatgaacactaaataatttgatgtggcatagtatttattgataaagggagatgataaaagtttcgtataaaagagtttaatggaagataaaacttatctatactgtttccaatacatgagggatttggaaacagtgatatgaaactcctattgagatttgagatcatatcacgacactagtacttcatgattttctgaagccttcctggatgtgtctcatagttgctacatcacatgcacacatagtaacggttaattaaagggattgaaaa

SEQ ID NO: 54667 - DNA, 989 bp, Zea Mays
caaaactgctgcaagcaaacctgaatgacacaactgcagtaaactatgaggaggcagcacttgtatcatcatctagtgattacaggatgcctttggtgtggatagacttggaaatgaccgggtcctgacttagttataagccagagcaaagattgtttagataatatggatgaatggtgcaaaactcatcatgcagctagtggtttgacggaaagagtactgcagagtgaactttctgagcatgatgcagaggcaaaagttttagactttgttaggaagcacataaattcaggcactccattattagctgggaattctgtttatgtggattttctatttctgaagaagtacatgccacagcttgcagccgtcttctctcatgtaattgtcgatgtgagcagtataatggctttatgcatacgatggtaccccaaagaaaggaaacaaactccaagaaagcaaaaaacccacagggcaatggatgatattaaagaaagcatcgccgaactgaagtattacaagcacaacattttcaaaccacagaaatcaaagcggtagctgcacgtcgagtagttgaatcgactgatagctaaccagaattggagatgggttttcaggtcaaagccgcatgccttgctttggggttatgttctgtgcaagtgtgcatccattagtgcttgggtttataccgatctcaatggggttttatgaaagtttcatgaacactaaataatttgatgtggcatagtatttattgataaagggagatgataaaagtttcgtataaaagagtttaatggaagataaaacttatctatactgtttccaatacatgagggatttggaaacagtgatatgaaactcctattgagatttgagatcatatcacgacactagtacttcatgattttctgaagccttcctggatgtgtctcatagttgctacatcacatgcacacatagtaacggttaattaaagggattgaaaa

SEQ ID NO: 54668 - DNA, 399 bp, Zea Mays
atggcgagtggggaattgcatattgtgtcaagggtgggtccagaaaaagagctaaaagcaatacagtacttggagagaagagagtgtgagtacgaccagaaaatatccattgatttctacaaggaaggagatcccttgaaaccagctgtgacgggcgtcttagtgttcgtttccactccagatccaattggcaacaagtactatcttggccctgctcctctgcaggatatggcaaggcaaattgctacagccaatggccctactggctataatagggattacctgttctcaatggagaaggcattagccagcattagccacgaagatgattcgatcatagagcttgcaaacgaggtgaggaaggtgctcaacagaacaaaggagaccaagatcactggt

SEQ ID NO: 54669 - DNA, 1557 bp, Zea Mays
tccatgtccttgctggatgatcttatctgcttcaagccccatcctgcccttttctaatgcttcacttgattaccaatttggctgcatgcccattgagtgacacataacttctgttcaagagatgataccatcttttgtggtgtgtttgacggccatggaccttatggccatttggttgccaagagagtaagagatctgctgcctctaaagttaggagaaggtttgacgacggaagatggtagagtaacatccactggcaacattaagctcaacacacatgatgtagcttcaccagaacacatagacaaaggaagtactgccatttcctctgaagctcagcagaatggagagtatccagagaccttcccagcattgagaacttcattcttgaaggcattccgtgtaatggatagggatctcaaattacataaaagcattgactgctttttcagtgggactacagcggtggcagtgatcaagcaggaacacaatcttataattggcaatttgggggattcaagagctgtcttaggcaccagagatgaaaataaccagcttattgctgttcaattgacagttgatctcaaacctaacattccaagcgaagcacagagaatcaggcaacgcaggggcagaatattcgcgcttcccgaggagccggaggttgctcgtgtttggcttccaaagtacaactctcctggactggccatggctagggcatttggagacttctgtctgaaggaccatggtgtaatttctacgcctgacgtctcctatcaccacatcacggagaaagacgaatttgtggtgctggctactgacggggtctgggacgtgctatcaaacgatgaggttgttagcactgtctgccgagccacatctcaggcctctgcagcccggtttctcgtcgagtcggctcaccgcgcttggcggactcggttccccacttctaagatcgatgactgcgctgttgtctgcctgttcctgaacacagacaaagcgagcgaatcgtcgagttctttggccaagaacttggcagatgctgtagaagctagcagtgctgggcgcgccacaactgtccaggtgagcgctggtgcatctacagatgttgccgccctggtaccagtaccagatgggaacgaggtgtctattgctgaaaccatcacaaagctggtcacgctcatggatttgcccaaggatggttgaggctcctgtgattgggacctgaacgaagatataccacatcggtgggtttctgcttgcagttttttttcctgaacgcaagtgtggctagaatttgcagttttgcttcgtgtaaagtaccgcgtcagtttagcgtgatttgttccagtttttgtaatatttcaattcatgttagtattgatgcgtccgtgcgtcgtcgagatcgtagtattctgtaggaaggaggctactgagtttttgtgcttcctgtaaatatattcatcattctatctctggtgtctgatctatatcatcattgctttgggggtcggtcttattaatataaataaggattatataatcatatcggacgaa

SEQ ID NO: 54670 - DNA, 1669 bp, Zea Mays
cagacatctagtgttgtgagattcttgatgtatttttttcccactgttcttgatcagatctaagcaactttattcttattctggattagtttacctgacatatgctgtgttccagatttttattccacggagaagctcagaacttctgttcaagagatgataccatcttttgtggtgtgtttgacggccatggaccttatggccatttggttgccaagagagtaagagatctgctgcctctaaagttaggagaaggtttgacgacggaagatggtagagtaacatccactggcaacattaagctcaacacacatgatgtagcttcaccagaacacatagacaaaggaagtactgccatttcctctgaagctcagcagaatggagagtatccagagaccttcccagcattgagaacttcattcttgaaggcattccgtgtaatggatagggatctcaaattacataaaagcattgactgctttttcagtgggactacagcggtggcagtgatcaagcaggaacacaatcttataattggcaatttgggggattcaagagctgtcttaggcaccagagatgaaaataaccagcttattgctgttcaattgacagttgatctcaaacctaacattccaagcgaagcacagagaatcaggcaacgcaggggcagaatattcgcgcttcccgaggagccggaggttgctcgtgtttggcttccaaagtacaactctcctggactggccatggctagggcatttggagacttctgtctgaaggaccatggtgtaatttctacgcctgacgtctcctatcaccacatcacggagaaagacgaatttgtggtgctggctactgacggggtgagcagattgtcaacctacgcaccgtttattccgagtgtttttaggtccttctgacctcctctctttgcaactaggtctgggacgtgctatcaaacgatgaggttgttagcactgtctgccgagccacatctcaggcctctgcagcccggtttctcgtcgagtcggctcaccgcgcttggcggactcggttccccacttctaagatcgatgactgcgctgttgtctgcctgttcctgaacacagacaaagcgagcgaatcgtcgagttctttggccaagaacttggcagatgctgtagaagctagcagtgctgggcgcgccacaactgtccaggtgagcgctggtgcatctacagatgttgccgccctggtaccagtaccagatgggaacgaggtgtctattgctgaaaccatcacaaagctggtcacgctcatggatttgcccaaggatggttgaggctcctgtgattgggacctgaacgaagatataccacatcggtgggtttctgcttgcagttttttttcctgaacgcaagtgtggctagaatttgcagttttgcttcgtgtaaagtaccgcgtcagtttagcgtgatttgttccagtttttgtaatatttcaattcatgttagtattgatgcgtccgtgcgtcgtcgagatcgtagtattctgtaggaaggaggctactgagtttttgtgcttcctgtaaatatattcatcattctatctctggtgtctgatctatatcatcattgctttgggggtcggtcttattaatataaataaggattatataatcatatcggacgaa

SEQ ID NO: 54671 - DNA, 3343 bp, Zea Mays
aatttggggtctcaaacagaacgcgaagtctcgccgactccgacaaccttgcgttcctgtctctgcgtctcgtcgcctcagattcacccccaccacttcctccctccccttggatggaggcaggcagattcccgttccattccagactcgcagtacagtacacacagcaaaagcaccacccgggccggcttcctctagactagattagtgttgctaagagcctttttaactacgggattacgcaagtctcgtatactcatccagagagagacacggaggacctgggtttggttgcgctgcttgactcgctccgtgttccaagcgccttttgagcattcaggcagatataaaattcctctttttacactacaatccccgctgaatcagcagcagcaactctctccctctccgttcttggtggtccgagacccttggccgtacgctctgcctcactcctccgtctcttgcttcccttgccgccggcggcgcgcggcgccgggcgcggatcggcggcgggtgcatggtggaggccgccgccgggcgccggacaggcaccagccgtcggcggcctagcggcagcggaggggagcaccggcacctggtcgcgctcgccgtcgccgcgcgcgtcgccatggtcaccacccggtccgtgggtccagcagcagtagcggaaggtgatggagcgggagctgctgtaacagatgccggcgccgctggcggtggcggacgatgcatggaggacttcttcgactgcctcctcggcttgctcggcgcgttaggcatgacatgggctgcggcgcggccccagcggcagccgcgcccgccgctgcctcgcggggctgcgggggcggggcctgcgccaactgactcccggcgtttcgcggcggagctcagggccacccccggccggatcgccggcaatggcgcctgcgccgtcgcgtcactgtacacgctgcagggcaagaagggcgtcaaccaggatgctatgatcttctgggaggtaaaaggaaaattaaaaggagaaaataaagaaccatattttccctgctttcttgtctgcgcttttcctcagacatctagtgttgtgagattcttgatgtatttttttcccactgttcttgatcagatctaagcaactttattcttattctggattagtttacctgacatatgctgtgttccagatttttattccacggagaagctcaggtttagatttgacttttctgtacaagctaatttgatcttgatgctagcctcaggaagttgtttgtttttattcttgcggccacagcttatgcgtgttgttatgagttacgcaacatgagcacacagcatcaaactattcaagaattgaactttgactcaaatcctatatatatttcgcactggttgctgtgggatgttgctggtggagaattcctagttggtagtcttattcaagcgcaataattgatggagttggaatacttcatggcggttggaagggctccacacgattctcctccttatccaatactagttttttttttccttctccatgtccttgctggatgatcttatctgcttcaagccccatcctgcccttttctaatgcttcacttgattaccaatttggctgcatgcccattgagtgacacatgtacggatactatcttattttttcggactcatatttgccttccttaagttatgataactttcatgatttgactgctatagtagtaatttctaaaaaactgcacacgggtctcagtgaaaacataagcataactcacaataagaaaccatgtacctgtccagttttactgggcacgtgtaaaatttgctactcctgttatttctgtgcagcgtatgtttgattttgacaactatttttactggtggacagaacttctgttcaagagatgataccatcttttgtggtgtgtttgacggccatggaccttatggccatttggttgccaagagagtaagagatctgctgcctctaaagttaggagaaggtttgacgacggaagatggtagagtaacatccactggcaacattaagctcaacacacatgatgtagcttcaccagaacacatagacaaaggaagtactgccatttcctctgaagctcagcagaatggagagtatccagagaccttcccagcattgagaacttcattcttgaaggcattccgtgtaatggatagggatctcaaattacataaaagcattgactgctttttcagtgggactacagcggtggcagtgatcaagcaggaacacaatcttataattggcaatttgggggattcaagagctgtcttaggcaccagagatgaaaataaccagcttattgctgttcaattgacagttgatctcaaacctaacattccaagcgaagcacagagaatcaggcaacgcaggggcagaatattcgcgcttcccgaggagccggaggttgctcgtgtttggcttccaaagtacaactctcctggactggccatggctagggcatttggagacttctgtctgaaggaccatggtgtaatttctacgcctgacgtctcctatcaccacatcacggagaaagacgaatttgtggtgctggctactgacggggtctgggacgtgctatcaaacgatgaggttgttagcactgtctgccgagccacatctcaggcctctgcagcccggtttctcgtcgagtcggctcaccgcgcttggcggactcggttccccacttctaagatcgatgactgcgctgttgtctgcctgttcctgaacacagacaaagcgagcgaatcgtcgagttctttggccaagaacttggcagatgctgtagaagctagcagtgctgggcgcgccacaactgtccaggtgagcgctggtgcatctacagatgttgccgccctggtaccagtaccagatgggaacgaggtgtctattgctgaaaccatcacaaagctggtcacgctcatggatttgcccaaggatggttgaggctcctgtgattgggacctgaacgaagatataccacatcggtgggtttctgcttgcagttttttttcctgaacgcaagtgtggctagaatttgcagttttgcttcgtgtaaagtaccgcgtcagtttagcgtgatttgttccagtttttgtaatatttcaattcatgttagtattgatgcgtccgtgcgtcgtcgagatcgtagtattctgtaggaaggaggctactgagtttttgtgcttcctgtaaatatattcatcattctatctctggtgtctgatctatatcatcattgctttgggggtcggtcttattaatataaataaggattatataatcatatcggacgaa

SEQ ID NO: 54672 - DNA, 972 bp, Zea Mays
cccgtaccgaagccacagattcggtttcaacaggctggttttacgagttgcactggtttgcaataaacgggattagttgtagggtcttaactcaatgtattgctacaaatacctatttaaaatgatatgaaccatcaagtaatggtaagaacagattgggagagtacaaaaatagatgtgatgtatagagctatcaaatgcaagttttcaacttatccccatctgactaatatgttgctgtcaactgctggctctgttctcgttgaggcatcgcctcacgatttattttggggcggtgggagggagggagaaggcctgaattacttgggtaggttgttgatgcagttgagatcagagattctggggacagtcccagcaagcgctgaagtaggggaggcagattgatcctgaagcgagcaaatcttgtttagcaggagtgttgattgcaagaccagacgttaaggtgtggctgggtcccgattgctacagtggatggtgctagtgaaacgaagcgcaaatgagattggttaaattatctgtatgcctgtgaagaacaaacataccatgggtcttgctcttttgtcgaacaatttcatctggccctcggggtataggaattatgaaatacaaaggaggaacaccaacagtcatgcatagaatgtggtagtcctggtagatgaatgtgtttgataaggtgataaggactaatacattggaccagaagtagaagacgtgcttgttcagtaatggttgtttagtaaaaaggagggcgaattatttaataaaattaaatgcatcattgcaccatgaagtcttttgcctttgtttcacttaggcccatcaacagggagagtaggtttttgggtacatgtttgatgcatctctaatctgtacctctgttttgtttctattcggtgtctgtctttctttgaaggtgtgtccgcctgctccgcatgggtggggttcgtgacc

SEQ ID NO: 54673 - DNA, 2447 bp, Zea Mays
ccccagaccgctgcatccgctgaacatgccgctgcctcagccgctgctcggcggcgcctcgcccgctccggcgcgagcggcctcatccttcctccacccccttctccacacgcgccaccgcgtctccactgcacctgccgctgcctcctccttcgtgcctgcatctcactcctcccacgcgaacgacgccatgctcctccgccgtgccgccgacgtggccgaccgttctgcgggactcacctccccgcacccgaacttcgggtgcgtcatcgcacggccccagcttaataccgacagcgctgattcctgggtggtcggcgaagggttcctctatgcgcaggggacgccctgcgccgagctcctcgcctcacaggaggccggtgagcacgcgcgcggcggcacggcatacctcaatctcgagcctggggactgctttggtgacaacacagccgtcggatccctcgtccaggaattacaagagttgtggtgggtcttagacatcccttgaagcacttgagagggaaggcaattcaagcattacgaaatgaaggcattcaagttgatgttgtgggggaggatctgcagagtaaattgttcaaggaagctctgaagtcatgcctcactgtaaatgctccattgctttacagagctgcctttcatgtccctttttcggtcctgaagtatgctatgacagcagatggaaaaatagcagcaagtagtggacatgcttcttggataagtggcaaagcatcaagagggcgtgtatttgaattgcgtggcagaagtgacgctgttattgttggtggaaatacaatcctcgattaactgcaaggcatgttaaaggacatgttccagtgcgtatagtgatgtcacagtctcttaaccttccagaggaagcaaatttatggaatcttaacgatgcctatacgattgttgcgactcagagaggtgctcggcgagattttcaaaggaagcttgctatgaagggtgttgaagtagtagagtttgacatgctgaatccaagagctgttatgtcatattgttatgatcgtggttatcttgctgtattatgggaatgtggtggaacactagctgcttctgctatatctgcgagtgttatccataaggtctatgcattctgggctccgaaaataattgggggattaaatgcacctacgccagttggtgaactggggatgagtcaaatgactcaggcaataaatttaattgatgtctcgtacgagcagattgacagggacatgctcatgagtggattcatcgaacccattcctgatctttcacctgttataccatccgtggaagaaataccttccattgatccagaagtatctccatatgaaacaaatattatttccttttacaagacttgggatatttttggggctttctcaaacttttctcctcattcaattcaaatgcctgatgaaaatggagattatttcacatggccaacagtggaacactattaccaggctcataagtttgttggtgttgacaatcctcaagcaagagacattgttcaagaaataaagctagcaaagagtcctgaagaggctgctagaataggaaggacccgacaaaaagggttccctgaactggtaagaacagattgggagagtacaaaaatagatgtgatgtatagagctatcaaatgcaagttttcaacttatccccatctgactaatatgttgctgtcaactgctggctctgttctcgttgaggcatcgcctcacgatttattttggggcggtgggagggagggagaaggcctgaattacttgggtaggttgttgatgcagttgagatcagagattctggggacagtcccagcaagcgctgaagtaggggaggcagattgatcctgaagcgagcaaatcttgtttagcaggagtgttgattgcaagaccagacgttaaggtgtggctgggtcccgattgctacagtggatggtgctagtgaaacgaagcgcaaatgagattggttaaattatctgtatgcctgtgaagaacaaacataccatgggtcttgctcttttgtcgaacaatttcatctggccctcggggtataggaattatgaaatacaaaggaggaacaccaacagtcatgcatagaatgtggtagtcctggtagatgaatgtgtttgataaggtgataaggactaatacattggaccagaagtagaagacgtgcttgttcagtaatggttgtttagtaaaaaggagggcgaattatttaataaaattaaatgcatcattgcaccatgaagtcttttgcctttgtttcacttaggcccatcaacagggagagtaggtttttgggtacatgtttgatgcatctctaatctgtacctctgttttgtttctattcggtgtctgtctttctttgaaggtgtgtccgcctgctccgcatgggtggggttcgtgacc

SEQ ID NO: 54674 - DNA, 2475 bp, Zea Mays
agccccagaccgctgcatccgctgaacatgccgctgcctcagccgctgctcggcggcgcctcgcccgctccggcgcgagcggcctcatccttcctccacccccttctccacacgcgccaccgcgtctccactgcacctgccgctgcctcctccttcgtgcctgcatctcactcctcccacgcgaacgacgccatgctcctccgccgtgccgccgacgtggccgaccgttctgcgggactcacctccccgcacccgaacttcgggtgcgtcatcgcacggccccagcttaataccgacagcgctgattcctgggtggtcggcgaagggttcctctatgcgcaggggacgccctgcgccgagctcctcgcctcacaggaggccggtgagcacgcgcgcggcggcacggcatacctcaatctcgagcctggggactgctttggtgacaacacagccgtcggatccctcgtccaggaattacaagagttgtggtgggtcttagacatcccttgaagcacttgagagggaaggcaattcaagcattacgaaatgaaggcattcaagttgatgttgtgggggaggatctgcagagtaaattgttcaagttgttgtctgcaggaagctctgaagtcatgcctcactgtaaatgctccattgctttacagagctgcctttcatgtccctttttcggtcctgaagtatgctatgacagcagatggaaaaatagcagcaagtagtggacatgcttcttggataagtggcaaagcatcaagagggcgtgtatttgaattgcgtggcagaagtgacgctgttattgttggtggaaatacagtgcgttttgacgatcctcgattaactgcaaggcatgttaaaggacatgttccagtgcgtatagtgatgtcacagtctcttaaccttccagaggaagcaaatttatggaatcttaacgatgcctatacgattgttgcgactcagagaggtgctcggcgagattttcaaaggaagcttgctatgaagggtgttgaagtagtagagtttgacatgctgaatccaagagctgttatgtcatattgttatgatcgtggttatcttgctgtattatgggaatgtggtggaacactagctgcttctgctatatctgcgagtgttatccataaggtctatgcattctgggctccgaaaataattgggggattaaatgcacctacgccagttggtgaactggggatgagtcaaatgactcaggcaataaatttaattgatgtctcgtacgagcagattgacagggacatgctcatgagtggattcatcgaacccattcctgatctttcacctgttataccatccgtggaagaaataccttccattgatccagaagtatctccatatgaaacaaatattatttccttttacaagacttgggatatttttggggctttctcaaacttttctcctcattcaattcaaatgcctgatgaaaatggagattatttcacatggccaacagtggaacactattaccaggctcataagtttgttggtgttgacaatcctcaagcaagagacattgttcaagaaataaagctagcaaagagtcctgaagaggctgctagaataggaaggacccgacaaaaagggttccctgaactggtaagaacagattgggagagtacaaaaatagatgtgatgtatagagctatcaaatgcaagttttcaacttatccccatctgactaatatgttgctgtcaactgctggctctgttctcgttgaggcatcgcctcacgatttattttggggcggtgggagggagggagaaggcctgaattacttgggtaggttgttgatgcagttgagatcagagattctggggacagtcccagcaagcgctgaagtaggggaggcagattgatcctgaagcgagcaaatcttgtttagcaggagtgttgattgcaagaccagacgttaaggtgtggctgggtcccgattgctacagtggatggtgctagtgaaacgaagcgcaaatgagattggttaaattatctgtatgcctgtgaagaacaaacataccatgggtcttgctcttttgtcgaacaatttcatctggccctcggggtataggaattatgaaatacaaaggaggaacaccaacagtcatgcatagaatgtggtagtcctggtagatgaatgtgtttgataaggtgataaggactaatacattggaccagaagtagaagacgtgcttgttcagtaatggttgtttagtaaaaaggagggcgaattatttaataaaattaaatgcatcattgcaccatgaagtcttttgcctttgtttcacttaggcccatcaacagggagagtaggtttttgggtacatgtttgatgcatctctaatctgtacctctgttttgtttctattcggtgtctgtctttctttgaaggtgtgtccgcctgctccgcatgggtggggttcgtgacc

SEQ ID NO: 54675 - DNA, 3550 bp, Zea Mays
cccagccccagaccgctgcatccgctgaacatgccgctgcctcagccgctgctcggcggcgcctcgcccgctccggcgcgagcggcctcatccttcctccacccccttctccacacgcgccaccgcgtctccactgcacctgccgctgcctcctccttcgtgcctgcatctcactcctcccacgcgaacgacgccatgctcctccgccgtgccgccgacgtggccgaccgttctgcgggactcacctccccgcacccgaacttcgggtgcgtcatcgcacggccccagcttaataccgacagcgctgattcctgggtggtcggcgaagggttcctctatgcgcaggggacgccctgcgccgagctcctcgcctcacaggaggccggtgagcacgcgcgcggcggcacggcatacctcaatctcgagcctggggactgctttggtgacaacacagccgtcggatccctcgtccaggcaggaattacaagagttgtggtgggtcttagacatcccttgaagcacttgagagggaaggcaattcaagcattacgaaatgaaggcattcaagttgatgttgtgggggaggatctgcagagtaaattgttcaaggaagctctgaagtcatgcctcactgtaaatgctccattgctttacagagctgcctttcatgtccctttttcggtcctgaagtatgctatgacagcagatggaaaaatagcagcaagtagtggacatgcttcttggataagtggcaaagcatcaagagggcgtgtatttgaattgcgtggcagaagtgacgctgttattgttggtggaaatacaatcctcgattaactgcaaggcatgttaaaggacatgttccagtgcgtatagtgatgtcacagtctcttaaccttccagaggaagcaaatttatggaatcttaacgatgcctatacgattgttgcgactcagagaggtgctcggcgagattttcaaaggaagcttgctatgaagggtgttgaagtagtagagtttgacatgctgaatccaagagctgttatgtcatattgttatgatcgtggttatcttgctgtattatgggaatgtggtggaacactagctgcttctgctatatctgcgagtgttatccataaggtctatgcattctgggctccgaaaataattgggggattaaatgcacctacgccagttggtgaactggggatgagtcaaatgactcaggcaataaatttaattgatgtctcgtacgagcagattgacagggacatgctcatgagtggattcatcgaacccattcctgatctttcacctgttataccatccgtggaagaaataccttccattgatccagaagtatctccatatgaaacaaatattatttccttttacaagacttgggatatttttggggctttctcaaacttttctcctcattcaattcaaatgcctgatgaaaatggagattatttcacatggccaacagtggaacactattaccaggctcataagtttgttggtgttgacaatcctcaagcaagagacattgttcaagaaataaagctagcaaagagtcctgaagaggctgctagaataggaaggacccgacaaaaagggttccctgaactggtatgtccgattattgtatttaggcctgttcagtggtggtttagaacaggtttggatatttggccagcttcctaaaccaaacgttatgcttacggcttagatggtttgatttgctggtgtatgcgggttcaaaccggaggacggcaacatggcctgtcacaccgatgctgcagtccagggctcggacagggttggtgccctcagtctcttcagtgctcgctgcatctgctccacctgcaccatgcacgatgacgaggtcagctgcctccatgctgtcgtggccgcaggggcactggtgaacctgattccgctgttgtggaggtggtcagtggcaggcccagggagacaaccggcactgccatggcggtttggctggttcaaaccacggttttactcaacccgtaccgaagccacagattcggtttcaacaggctggttttacgagttgcactggtttgcaataaacggtgaacagccgtaattacattctatttttaactgattgtagtgggaagggatgaagggaccttgctttctggtacctaacaaagtatgatatcatccttctgatgaaagatattctagaagaggaatctatatatctagtataggctttgccacttccacttatcatttagtataaatacatgcttgaaagctacaatggtgcccacaagtccattatagtcccaccaaaatttattttataatatcaacgactgttgtagaatccgtactattttcctcaacctctcctctggttaactcagacacagcaacaacgggactgcaaccactaggtagcatgggtgcaaaatcattagcctgggacttccctttcagatactttctactgttcaaagttcatggtattatggattgcctgatgccaaacatctacgtgctttctatttacagggattagttgtagggtcttaactcaatgtattgctacaaatacctatttaaaatgatatgaaccatcaagtaatggtaattaatacactatcaacatcaactatatctactccgtagtatgcatacctaatgtattctcgttcttacttggttttcgaattgcttttgtttttcaggtaagaacagattgggagagtacaaaaatagatgtgatgtatagagctatcaaatgcaagttttcaacttatccccatctgactaatatgttgctgtcaactgctggctctgttctcgttgaggcatcgcctcacgatttattttggggcggtgggagggagggagaaggcctgaattacttgggtaggttgttgatgcagttgagatcagagattctggggacagtcccagcaagcgctgaagtaggggaggcagattgatcctgaagcgagcaaatcttgtttagcaggagtgttgattgcaagaccagacgttaaggtgtggctgggtcccgattgctacagtggatggtgctagtgaaacgaagcgcaaatgagattggttaaattatctgtatgcctgtgaagaacaaacataccatgggtcttgctcttttgtcgaacaatttcatctggccctcggggtataggaattatgaaatacaaaggaggaacaccaacagtcatgcatagaatgtggtagtcctggtagatgaatgtgtttgataaggtgataaggactaatacattggaccagaagtagaagacgtgcttgttcagtaatggttgtttagtaaaaaggagggcgaattatttaataaaattaaatgcatcattgcaccatgaagtcttttgcctttgtttcacttaggcccatcaacagggagagtaggtttttgggtacatgtttgatgcatctctaatctgtacctctgttttgtttctattcggtgtctgtctttctttgaaggtgtgtccgcctgctccgcatgggtggggttcgtgacc

SEQ ID NO: 54676 - DNA, 2832 bp, Zea Mays
cccagccccagaccgctgcatccgctgaacatgccgctgcctcagccgctgctcggcggcgcctcgcccgctccggcgcgagcggcctcatccttcctccacccccttctccacacgcgccaccgcgtctccactgcacctgccgctgcctcctccttcgtgcctgcatctcactcctcccacgcgaacgacgccatgctcctccgccgtgccgccgacgtggccgaccgttctgcgggactcacctccccgcacccgaacttcgggtgcgtcatcgcacggccccagcttaataccgacagcgctgattcctgggtggtcggcgaagggttcctctatgcgcaggggacgccctgcgccgagctcctcgcctcacaggaggccggtgagcacgcgcgcggcggcacggcatacctcaatctcgagcctggggactgctttggtgacaacacagccgtcggatccctcgtccaggaattacaagagttgtggtgggtcttagacatcccttgaagcacttgagagggaaggcaattcaagcattacgaaatgaaggcattcaagttgatgttgtgggggaggatctgcagagtaaattgttcaaggaagctctgaagtcatgcctcactgtaaatgctccattgctttacagagctgcctttcatgtccctttttcggtcctgaagtatgctatgacagcagatggaaaaatagcagcaagtagtggacatgcttcttggataagtggcaaagcatcaagagggcgtgtatttgaattgcgtggcagaagtgacgctgttattgttggtggaaatacagtgcgttttgacgatcctcgattaactgcaaggcatgttaaaggacatgttccagtgcgtatagtgatgtcacagtctcttaaccttccagaggaagcaaatttatggaatcttaacgatgcctatacgattgttgcgactcagagaggtgctcggcgagattttcaaaggaagcttgctatgaagggtgttgaagtagtagagtttgacatgctgaatccaagagctgttatgtcatattgttatgatcgtggttatcttgctgtattatgggaatgtggtggaacactagctgcttctgctatatctgcgagtgttatccataaggtctatgcattctgggctccgaaaataattgggggattaaatgcacctacgccagttggtgaactggggatgagtcaaatgactcaggcaataaatttaattgatgtctcgtacgagcagattgacagggacatgctcatgagtggattcatcgaacccattcctgatctttcacctgttataccatccgtggaagaaataccttccattgatccagaagtatctccatatgaaacaaatattatttccttttacaagacttgggatatttttggggctttctcaaacttttctcctcattcaattcaaatgcctgatgaaaatggagattatttcacatggccaacagtggaacactattaccaggctcataagtttgttggtgttgacaatcctcaagcaagagacattgttcaagaaataaagctagcaaagagtcctgaagaggctgctagaataggaaggacccgacaaaaagggttccctgaactgatggtttgatttgctggtgtatgcgggttcaaaccggaggacggcaacatggcctgtcacaccgatgctgcagtccagggctcggacagggttggtgccctcagtctcttcagtgctcgctgcatctgctccacctgcaccatgcacgatgacgaggtcagctgcctccatgctgtcgtggccgcaggggcactggtgaacctgattccgctgttgtggaggtggtcagtggcaggcccagggagacaaccggcactgccatggcggtttggctggttcaaaccacggttttactcaacccgtaccgaagccacagattcggtttcaacaggctggttttacgagttgcactggtttgcaataaacggtaagaacagattgggagagtacaaaaatagatgtgatgtatagagctatcaaatgcaagttttcaacttatccccatctgactaatatgttgctgtcaactgctggctctgttctcgttgaggcatcgcctcacgatttattttggggcggtgggagggagggagaaggcctgaattacttgggtaggttgttgatgcagttgagatcagagattctggggacagtcccagcaagcgctgaagtaggggaggcagattgatcctgaagcgagcaaatcttgtttagcaggagtgttgattgcaagaccagacgttaaggtgtggctgggtcccgattgctacagtggatggtgctagtgaaacgaagcgcaaatgagattggttaaattatctgtatgcctgtgaagaacaaacataccatgggtcttgctcttttgtcgaacaatttcatctggccctcggggtataggaattatgaaatacaaaggaggaacaccaacagtcatgcatagaatgtggtagtcctggtagatgaatgtgtttgataaggtgataaggactaatacattggaccagaagtagaagacgtgcttgttcagtaatggttgtttagtaaaaaggagggcgaattatttaataaaattaaatgcatcattgcaccatgaagtcttttgcctttgtttcacttaggcccatcaacagggagagtaggtttttgggtacatgtttgatgcatctctaatctgtacctctgttttgtttctattcggtgtctgtctttctttgaaggtgtgtccgcctgctccgcatgggtggggttcgtgacc

SEQ ID NO: 54677 - DNA, 3371 bp, Zea Mays
cggctcccagccccagaccgctgcatccgctgaacatgccgctgcctcagccgctgctcggcggcgcctcgcccgctccggcgcgagcggcctcatccttcctccacccccttctccacacgcgccaccgcgtctccactgcacctgccgctgcctcctccttcgtgcctgcatctcactcctcccacgcgaacgacgccatgctcctccgccgtgccgccgacgtggccgaccgttctgcgggactcacctccccgcacccgaacttcgggtgcgtcatcgcacggccccagcttaataccgacagcgctgattcctgggtggtcggcgaagggttcctctatgcgcaggggacgccctgcgccgagctcctcgcctcacaggaggccggtgagcacgcgcgcggcggcacggcatacctcaatctcgagcctggggactgctttggtgacaacacagccgtcggatccctcgtccaggcaggaattacaagagttgtggtgggtcttagacatcccttgaagcacttgagagggaaggcaattcaagcattacgaaatgaaggcattcaagttgatgttgtgggggaggatctgcagagtaaattgttcaaggaagctctgaagtcatgcctcactgtaaatgctccattgctttacagagctgcctttcatgtccctttttcggtcctgaagtatgctatgacagcagatggaaaaatagcagcaagtagtggacatgcttcttggataagtggcaaagcatcaagagggcgtgtatttgaattgcgtggcagaagtgacgctgttattgttggtggaaatacagtgcgttttgacgatcctcgattaactgcaaggcatgttaaaggacatgttccagtgcgtatagtgatgtcacagtctcttaaccttccagaggaagcaaatttatggaatcttaacgatgcctatacgattgttgcgactcagagaggtgctcggcgagattttcaaaggaagcttgctatgaagggtgttgaagtagtagagtttgacatgctgaatccaagagctgttatgtcatattgttatgatcgtggttatcttgctgtattatgggaatgtggtggaacactagctgcttctgctatatctgcgagtgttatccataaggtctatgcattctgggctccgaaaataattgggggattaaatgcacctacgccagttggtgaactggggatgagtcaaatgactcaggcaataaatttaattgatgtctcgtacgagcagattgacagggacatgctcatgagtggattcatcgaacccattcctgatctttcacctgttataccatccgtggaagaaataccttccattgatccagaagtatctccatatgaaacaaatattatttccttttacaagacttgggatatttttggggctttctcaaacttttctcctcattcaattcaaatgcctgatgaaaatggagattatttcacatggccaacagtggaacactattaccaggctcataagtttgttggtgttgacaatcctcaagcaagagacattgttcaagaaataaagctagcaaagagtcctgaagaggctgctagaataggaaggacccgacaaaaagggttccctgaactgatggtttgatttgctggtgtatgcgggttcaaaccggaggacggcaacatggcctgtcacaccgatgctgcagtccagggctcggacagggggcactggtgaacctgattccgctgttgtggaggtggtcagtggcaggcccagggagacaaccggcactgccatggcggtttggctggttcaaaccacggttttactcaacccgtaccgaagccacagattcggtttcaacaggctggttttacgagttgcactggtttgcaataaacggtgaacagccgtaattacattctatttttaactgattgtagtgggaagggatgaagggaccttgctttctggtacctaacaaagtatgatatcatccttctgatgaaagatattctagaagaggaatctatatatctagtataggctttgccacttccacttatcatttagtataaatacatgcttgaaagctacaatggtgcccacaagtccattatagtcccaccaaaatttattttataatatcaacgactgttgtagaatccgtactattttcctcaacctctcctctggttaactcagacacagcaacaacgggactgcaaccactaggtagcatgggtgcaaaatcattagcctgggacttccctttcagatactttctactgttcaaagttcatggtattatggattgcctgatgccaaacatctacgtgctttctatttacagggattagttgtagggtcttaactcaatgtattgctacaaatacctatttaaaatgatatgaaccatcaagtaatggtaattaatacactatcaacatcaactatatctactccgtagtatgcatacctaatgtattctcgttcttacttggttttcgaattgcttttgtttttcaggtaagaacagattgggagagtacaaaaatagatgtgatgtatagagctatcaaatgcaagttttcaacttatccccatctgactaatatgttgctgtcaactgctggctctgttctcgttgaggcatcgcctcacgatttattttggggcggtgggagggagggagaaggcctgaattacttgggtaggttgttgatgcagttgagatcagagattctggggacagtcccagcaagcgctgaagtaggggaggcagattgatcctgaagcgagcaaatcttgtttagcaggagtgttgattgcaagaccagacgttaaggtgtggctgggtcccgattgctacagtggatggtgctagtgaaacgaagcgcaaatgagattggttaaattatctgtatgcctgtgaagaacaaacataccatgggtcttgctcttttgtcgaacaatttcatctggccctcggggtataggaattatgaaatacaaaggaggaacaccaacagtcatgcatagaatgtggtagtcctggtagatgaatgtgtttgataaggtgataaggactaatacattggaccagaagtagaagacgtgcttgttcagtaatggttgtttagtaaaaaggagggcgaattatttaataaaattaaatgcatcattgcaccatgaagtcttttgcctttgtttcacttaggcccatcaacagggagagtaggtttttgggtacatgtttgatgcatctctaatctgtacctctgttttgtttctattcggtgtctgtctttctttgaaggtgtgtccgcctgctccgcatgggtggggttcgtgacc

SEQ ID NO: 54678 - DNA, 2630 bp, Zea Mays
cggctcccagccccagaccgctgcatccgctgaacatgccgctgcctcagccgctgctcggcggcgcctcgcccgctccggcgcgagcggcctcatccttcctccacccccttctccacacgcgccaccgcgtctccactgcacctgccgctgcctcctccttcgtgcctgcatctcactcctcccacgcgaacgacgccatgctcctccgccgtgccgccgacgtggccgaccgttctgcgggactcacctccccgcacccgaacttcgggtgcgtcatcgcacggccccagcttaataccgacagcgctgattcctgggtggtcggcgaagggttcctctatgcgcaggggacgccctgcgccgagctcctcgcctcacaggaggccggtgagcacgcgcgcggcggcacggcatacctcaatctcgagcctggggactgctttggtgacaacacagccgtcggatccctcgtccaggcaggaattacaagagttgtggtgggtcttagacatcccttgaagcacttgagagggaaggcaattcaagcattacgaaatgaaggcattcaagttgatgttgtgggggaggatctgcagagtaaattgttcaaggaagctctgaagtcatgcctcactgtaaatgctccattgctttacagagctgcctttcatgtccctttttcggtcctgaagtatgctatgacagcagatggaaaaatagcagcaagtagtggacatgcttcttggataagtggcaaagcatcaagagggcgtgtatttgaattgcgtggcagaagtgacgctgttattgttggtggaaatacagtgcgttttgacgatcctcgattaactgcaaggcatgttaaaggacatgttccagtgcgtatagtgatgtcacagtctcttaaccttccagaggaagcaaatttatggaatcttaacgatgcctatacgattgttgcgactcagagaggtgctcggcgagattttcaaaggaagcttgctatgaagggtgttgaagtagtagagtttgacatgctgaatccaagagctgttatgtcatattgttatgatcgtggttatcttgctgtattatgggaatgtggtggaacactagctgcttctgctatatctgcgagtgttatccataaggtctatgcattctgggctccgaaaataattgggggattaaatgcacctacgccagttggtgaactggggatgagtcaaatgactcaggcaataaatttaattgatgtctcgtacgagcagattgacagggacatgctcatgagtggattcatcgaacccattcctgatctttcacctgttataccatccgtggaagaaataccttccattgatccagaagtatctccatatgaaacaaatattatttccttttacaagacttgggatatttttggggctttctcaaacttttctcctcattcaattcaaatgcctgatgaaaatggagattatttcacatggccaacagtggaacactattaccaggctcataagtttgttggtgttgacaatcctcaagcaagagacattgttcaagaaataaagctagcaaagagtcctgaagaggctgctagaataggaaggacccgacaaaaagggttccctgaactgatggtttgatttgctggtgtatgcgggttcaaaccggaggacggcaacatggcctgtcacaccgatgctgcagtccagggctcggacagggttggtgccctcagtctcttcagtgctcgctgcatctgctccacctgcaccatgcacgatgacgaggtaagaacagattgggagagtacaaaaatagatgtgatgtatagagctatcaaatgcaagttttcaacttatccccatctgactaatatgttgctgtcaactgctggctctgttctcgttgaggcatcgcctcacgatttattttggggcggtgggagggagggagaaggcctgaattacttgggtaggttgttgatgcagttgagatcagagattctggggacagtcccagcaagcgctgaagtaggggaggcagattgatcctgaagcgagcaaatcttgtttagcaggagtgttgattgcaagaccagacgttaaggtgtggctgggtcccgattgctacagtggatggtgctagtgaaacgaagcgcaaatgagattggttaaattatctgtatgcctgtgaagaacaaacataccatgggtcttgctcttttgtcgaacaatttcatctggccctcggggtataggaattatgaaatacaaaggaggaacaccaacagtcatgcatagaatgtggtagtcctggtagatgaatgtgtttgataaggtgataaggactaatacattggaccagaagtagaagacgtgcttgttcagtaatggttgtttagtaaaaaggagggcgaattatttaataaaattaaatgcatcattgcaccatgaagtcttttgcctttgtttcacttaggcccatcaacagggagagtaggtttttgggtacatgtttgatgcatctctaatctgtacctctgttttgtttctattcggtgtctgtctttctttgaaggtgtgtccgcctgctccgcatgggtggggttcgtgacc

SEQ ID NO: 54679 - DNA, 2461 bp, Zea Mays
cggctcccagccccagaccgctgcatccgctgaacatgccgctgcctcagccgctgctcggcggcgcctcgcccgctccggcgcgagcggcctcatccttcctccacccccttctccacacgcgccaccgcgtctccactgcacctgccgctgcctcctccttcgtgcctgcatctcactcctcccacgcgaacgacgccatgctcctccgccgtgccgccgacgtggccgaccgttctgcgggactcacctccccgcacccgaacttcgggtgcgtcatcgcacggccccagcttaataccgacagcgctgattcctgggtggtcggcgaagggttcctctatgcgcaggggacgccctgcgccgagctcctcgcctcacaggaggccggtgagcacgcgcgcggcggcacggcatacctcaatctcgagcctggggactgctttggtgacaacacagccgtcggatccctcgtccaggcaggaattacaagagttgtggtgggtcttagacatcccttgaagcacttgagagggaaggcaattcaagcattacgaaatgaaggcattcaagttgatgttgtgggggaggatctgcagagtaaattgttcaaggaagctctgaagtcatgcctcactgtaaatgctccattgctttacagagctgcctttcatgtccctttttcggtcctgaagtatgctatgacagcagatggaaaaatagcagcaagtagtggacatgcttcttggataagtggcaaagcatcaagagggcgtgtatttgaattgcgtggcagaagtgacgctgttattgttggtggaaatacaatcctcgattaactgcaaggcatgttaaaggacatgttccagtgcgtatagtgatgtcacagtctcttaaccttccagaggaagcaaatttatggaatcttaacgatgcctatacgattgttgcgactcagagaggtgctcggcgagattttcaaaggaagcttgctatgaagggtgttgaagtagtagagtttgacatgctgaatccaagagctgttatgtcatattgttatgatcgtggttatcttgctgtattatgggaatgtggtggaacactagctgcttctgctatatctgcgagtgttatccataaggtctatgcattctgggctccgaaaataattgggggattaaatgcacctacgccagttggtgaactggggatgagtcaaatgactcaggcaataaatttaattgatgtctcgtacgagcagattgacagggacatgctcatgagtggattcatcgaacccattcctgatctttcacctgttataccatccgtggaagaaataccttccattgatccagaagtatctccatatgaaacaaatattatttccttttacaagacttgggatatttttggggctttctcaaacttttctcctcattcaattcaaatgcctgatgaaaatggagattatttcacatggccaacagtggaacactattaccaggctcataagtttgttggtgttgacaatcctcaagcaagagacattgttcaagaaataaagctagcaaagagtcctgaagaggctgctagaataggaaggacccgacaaaaagggttccctgaactggtaagaacagattgggagagtacaaaaatagatgtgatgtatagagctatcaaatgcaagttttcaacttatccccatctgactaatatgttgctgtcaactgctggctctgttctcgttgaggcatcgcctcacgatttattttggggcggtgggagggagggagaaggcctgaattacttgggtaggttgttgatgcagttgagatcagagattctggggacagtcccagcaagcgctgaagtaggggaggcagattgatcctgaagcgagcaaatcttgtttagcaggagtgttgattgcaagaccagacgttaaggtgtggctgggtcccgattgctacagtggatggtgctagtgaaacgaagcgcaaatgagattggttaaattatctgtatgcctgtgaagaacaaacataccatgggtcttgctcttttgtcgaacaatttcatctggccctcggggtataggaattatgaaatacaaaggaggaacaccaacagtcatgcatagaatgtggtagtcctggtagatgaatgtgtttgataaggtgataaggactaatacattggaccagaagtagaagacgtgcttgttcagtaatggttgtttagtaaaaaggagggcgaattatttaataaaattaaatgcatcattgcaccatgaagtcttttgcctttgtttcacttaggcccatcaacagggagagtaggtttttgggtacatgtttgatgcatctctaatctgtacctctgttttgtttctattcggtgtctgtctttctttgaaggtgtgtccgcctgctccgcatgggtggggttcgtgacc

SEQ ID NO: 54680 - DNA, 2516 bp, Zea Mays
ccagcatccagcctggcaaaacgccgccacggctcccagccccagaccgctgcatccgctgaacatgccgctgcctcagccgctgctcggcggcgcctcgcccgctccggcgcgagcggcctcatccttcctccacccccttctccacacgcgccaccgcgtctccactgcacctgccgctgcctcctccttcgtgcctgcatctcactcctcccacgcgaacgacgccatgctcctccgccgtgccgccgacgtggccgaccgttctgcgggactcacctccccgcacccgaacttcgggtgcgtcatcgcacggccccagcttaataccgacagcgctgattcctgggtggtcggcgaagggttcctctatgcgcaggggacgccctgcgccgagctcctcgcctcacaggaggccggtgagcacgcgcgcggcggcacggcatacctcaatctcgagcctggggactgctttggtgacaacacagccgtcggatccctcgtccaggcaggaattacaagagttgtggtgggtcttagacatcccttgaagcacttgagagggaaggcaattcaagcattacgaaatgaaggcattcaagttgatgttgtgggggaggatctgcagagtaaattgttcaagttgttgtctgcaggaagctctgaagtcatgcctcactgtaaatgctccattgctttacagagctgcctttcatgtccctttttcggtcctgaagtatgctatgacagcagatggaaaaatagcagcaagtagtggacatgcttcttggataagtggcaaagcatcaagagggcgtgtatttgaattgcgtggcagaagtgacgctgttattgttggtggaaatacagtgcgttttgacgatcctcgattaactgcaaggcatgttaaaggacatgttccagtgcgtatagtgatgtcacagtctcttaaccttccagaggaagcaaatttatggaatcttaacgatgcctatacgattgttgcgactcagagaggtgctcggcgagattttcaaaggaagcttgctatgaagggtgttgaagtagtagagtttgacatgctgaatccaagagctgttatgtcatattgttatgatcgtggttatcttgctgtattatgggaatgtggtggaacactagctgcttctgctatatctgcgagtgttatccataaggtctatgcattctgggctccgaaaataattgggggattaaatgcacctacgccagttggtgaactggggatgagtcaaatgactcaggcaataaatttaattgatgtctcgtacgagcagattgacagggacatgctcatgagtggattcatcgaacccattcctgatctttcacctgttataccatccgtggaagaaataccttccattgatccagaagtatctccatatgaaacaaatattatttccttttacaagacttgggatatttttggggctttctcaaacttttctcctcattcaattcaaatgcctgatgaaaatggagattatttcacatggccaacagtggaacactattaccaggctcataagtttgttggtgttgacaatcctcaagcaagagacattgttcaagaaataaagctagcaaagagtcctgaagaggctgctagaataggaaggacccgacaaaaagggttccctgaactggtaagaacagattgggagagtacaaaaatagatgtgatgtatagagctatcaaatgcaagttttcaacttatccccatctgactaatatgttgctgtcaactgctggctctgttctcgttgaggcatcgcctcacgatttattttggggcggtgggagggagggagaaggcctgaattacttgggtaggttgttgatgcagttgagatcagagattctggggacagtcccagcaagcgctgaagtaggggaggcagattgatcctgaagcgagcaaatcttgtttagcaggagtgttgattgcaagaccagacgttaaggtgtggctgggtcccgattgctacagtggatggtgctagtgaaacgaagcgcaaatgagattggttaaattatctgtatgcctgtgaagaacaaacataccatgggtcttgctcttttgtcgaacaatttcatctggccctcggggtataggaattatgaaatacaaaggaggaacaccaacagtcatgcatagaatgtggtagtcctggtagatgaatgtgtttgataaggtgataaggactaatacattggaccagaagtagaagacgtgcttgttcagtaatggttgtttagtaaaaaggagggcgaattatttaataaaattaaatgcatcattgcaccatgaagtcttttgcctttgtttcacttaggcccatcaacagggagagtaggtttttgggtacatgtttgatgcatctctaatctgtacctctgttttgtttctattcggtgtctgtctttctttgaaggtgtgtccgcctgctccgcatgggtggggttcgtgacc

SEQ ID NO: 54681 - DNA, 1585 bp, Zea Mays
gaacatgccgctgcctcagccgctgctcggcggcgcctcgcccgctccggcgcgagcggcctcatccttcctccacccccttctccacacgcgccaccgcgtctccactgcacctgccgctgcctcctccttcgtgcctgcatctcactcctcccacgcgaacgacgccatgctcctccgccgtgccgccgacgtggccgaccgttctgcgggactcacctccccgcacccgaacttcgggtgcgtcatcgcacggccccagcttaataccgacagcgctgattcctgggtggtcggcgaagggttcctctatgcgcaggggacgccctgcgccgagctcctcgcctcacaggaggccggtgagcacgcgcgcggcggcacggcatacctcaatctcgagcctggggactgctttggtgacaacacagccgtcggatccctcgtccaggcaggaattacaagagttgtggtgggtcttagacatcccttgaagcacttgagagggaaggcaattcaagcattacgaaatgaaggcattcaagttgatgttgtgggggaggatctgcagagtaaattgttcaaggaagctctgaagtcatgcctcactgtaaatgctccattgctttacagagctgcctttcatgtccctttttcggtcctgaagtatgctatgacagcagatggaaaaatagcagcaagtagtggacatgcttcttggataagtggcaaagcatcaagagggcgtgtatttgaattgcgtggcagaagtgacgctgttattgttggtggaaatacagtgcgttttgacgatcctcgattaactgcaaggcatgttaaaggacatgttccagtgcgtatagtgatgtcacagtctcttaaccttccagaggaagcaaatttatggaatcttaacgatgcctatacgattgttgcgactcagagaggtgctcggcgagattttcaaaggaagcttgctatgaagggtgttgaagtagtagagtttgacatgctgaatccaagagctgttatgtcatattgttatgatcgtggttatcttgctgtattatgggaatgtggtggaacactagctgcttctgctatatctgcgagtgttatccataaggtctatgcattctgggctccgaaaataattgggggattaaatgcacctacgccagttggtgaactggggatgagtcaaatgactcaggcaataaatttaattgatgtctcgtacgagcagagtttagaatccatggagtttgcaactctggagttagagtgttttgcaggatctggccaattccttagatttttactttggagccataccaaacacaccctttgttatgactggaaaagtatatgggcgccggcctaagcagccaggggaagataagctagactaagcagataagtactcagataagatagctagagttgtttagattttccttaaataaaggtagtttgtttagatccccttaaaaggaggaagtcttgttaggccagggcaatatataagccctctatgcctttagtttgtaatcaggaaagattaatcaaagaaagagattgagtcttg

SEQ ID NO: 54682 - DNA, 2113 bp, Zea Mays
aattttcacttggcctcctcatcttttcctccttttcggccggcgtcatcgccgaacgcggatacaccgatacacataccccggctagctgtctggactctggagtgtcctccgggctaagcaaacccatagcccgatcagatcgatggcaccggcgccccgcgcttccagcttcttctcggtgctcctcgtcctcctctttgcgctgtcggtggggtgcgcgtccgccaccggcgtcttccaggtgcgccgcaagttcccgcgccacggaggacggggtgtggcggagcacctcgcggcgctgcggaggcatgacgccaaccgccacggccggctccttggcgccgtcgacttggccctcggcggcgtcgggctccccacagataccggcctgtactacacccggatcgagatcggctcgccgcccaagggctactacgtgcaggtggacaccggcagcgatatcctctgggtcaactgcatccgctgcgatggctgccccaccagaagcggacttgggatagagctgacgcagtacgatccggctgggagcgggaccacggtggggtgcgagcaggagttctgcgttgccaacagcgcgggcggcgtgccccccacgtgcccctcgacgtcgtcgccgtgccagttcaggatcacctacggagatgggagcacaaccaccggcttctacgtcacagacttcgtgcagtacaaccaggtgtccggcaacggccagaccaccacgtccaatgccagcatcacctttgggtgtggtgctcagcttggtggggatttgggatcctcgaaccaggcccttgatgggattcttgggttcggccagtcggattcgtcgatgctatcgcagttggctgctgctcgtagagtgaggaagatttttgctcactgcttggacactgtgcgtggtggtggcatcttcgctatcgggaatgtggtacagcccaaagtaaagacgacgccgttggtgcccaacgtgacacactacaatgtcaatctgcaaggaatttctgttggtggtgctacacttcagcttccaacaagtacttttgattctggtgacagtaaaggcactatcattgacagtgggacaacactggcatatcttccgagggaagtttataggactttgttggctgcggtctttgataagtaccaagatttgcccttacataattatcaagacttcgtgtgttttcaattttctggaagtatagatgatggatttcccgtaatcacctttagttttgagggagaccttacactgaatgtttacccagatgattaccttttccagaacaggaatgatttatactgtatgggattcctggatggtggtgtacagactaaagatgggaaagatatgctcctcttaggagttcacgagctctgtcgcagacctggtcctctcaaacaaactagtagtttatgacttggaaaaagaagttattggatggacagactacaactgctcctcgagcattaaaattgaggatgacaagactggctcagtgtacactgtcgacgcacaaaacatctccgctgggtggagatttcaatggcacaactccttaattctgttgatattaataaggacaatctggagctgtttggttatagcctaacgctggatctaggactaaagccccgtttgtttccttccaagattatataatccagctcgtggattatataagcacctattgacctgcttatagattatcataatctagatatccggattatataattcacctaataatctatattgtttgtttaactctcaatttatttaagctagattatataatatagatggtaaacaaacaaggcctaaaacatattttctgtaacaaaaaatagttgagttcagaagttcaacaaagagtacagaatattatatagattgtcccttgtgttttagacgtaaactgtagcaacatatcaagctactaaaatgactttagttgatgtcaggctgttttgcaccttctgcgtttctatcagatatatcatcaggtgtacgtgttactgtgcaatgtaccgtctgttcaggaaggatttgtgtaaatgtagtaattcaatcgtagaaactcag

SEQ ID NO: 54683 - DNA, 2285 bp, Zea Mays
gtaaagtatacttgtatatggagataatatttttagagacatatagtaaagtataatataaagtatagattgagtgagaaatgtgggatgaatgattagagctggcctaagatgtgaaagtcagcttttaaacatcggagtggctgagtgggagaggtctggtttaaacaccgaccgttgaaagcaacgccgattcaattttcacttggcctcctcatcttttcctccttttcggccggcgtcatcgccgaacgcggatacaccgatacacataccccggctagctgtctggactctggagtgtcctccgggctaagcaaacccatagcccgatcagatcgatggcaccggcgccccgcgcttccagcttcttctcggtgctcctcgtcctcctctttgcgctgtcggtggggtgcgcgtccgccaccggcgtcttccaggtgcgccgcaagttcccgcgccacggaggacggggtgtggcggagcacctcgcggcgctgcggaggcatgacgccaaccgccacggccggctccttggcgccgtcgacttggccctcggcggcgtcgggctccccacagataccggcctgtactacacccggatcgagatcggctcgccgcccaagggctactacgtgcaggtggacaccggcagcgatatcctctgggtcaactgcatccgctgcgatggctgccccaccagaagcggacttgggatagagctgacgcagtacgatccggctgggagcgggaccacggtggggtgcgagcaggagttctgcgttgccaacagcgcgggcggcgtgccccccacgtgcccctcgacgtcgtcgccgtgccagttcaggatcacctacggagatgggagcacaaccaccggcttctacgtcacagacttcgtgcagtacaaccaggtgtccggcaacggccagaccaccacgtccaatgccagcatcacctttgggtgtggtgctcagcttggtggggatttgggatcctcgaaccaggcccttgatgggattcttgggttcggccagtcggattcgtcgatgctatcgcagttggctgctgctcgtagagtgaggaagatttttgctcactgcttggacactgtgcgtggtggtggcatcttcgctatcgggaatgtggtacagcccaaagtaaagacgacgccgttggtgcccaacgtgacacactacaatgtcaatctgcaaggaatttctgttggtggtgctacacttcagcttccaacaagtacttttgattctggtgacagtaaaggcactatcattgacagtgggacaacactggcatatcttccgagggaagtttataggactttgttggctgcggtctttgataagtaccaagatttgcccttacataattatcaagacttcgtgtgttttcaattttctggaagatgatggatttcccgtaatcacctttagttttgagggagaccttacactgaatgtttacccagatgattaccttttccagaacaggaatgatttatactgtatgggattcctggatggtggtgtacagactaaagatgggaaagatatgctcctcttaggagacctggtcctctcaaacaaactagtagtttatgacttggaaaaagaagttattggatggacagactacaactgctcctcgagcattaaaattgaggatgacaagactggctcagtgtacactgtcgacgcacaaaacatctccgctgggtggagatttcaatggcacaactccttaattctgttgatattaataaggacaatctggagctgtttggttatagcctaacgctggatctaggactaaagccccgtttgtttccttccaagattatataatccagctcgtggattatataagcacctattgacctgcttatagattatcataatctagatatccggattatataattcacctaataatctatattgtttgtttaactctcaatttatttaagctagattatataatatagatggtaaacaaacaaggcctaaaacatattttctgtaacaaaaaatagttgagttcagaagttcaacaaagagtacagaatattatatagattgtcccttgtgttttagacgtaaactgtagcaacatatcaagctactaaaatgactttagttgatgtcaggctgttttgcaccttctgcgtttctatcagatatatcatcaggtgtacgtgttactgtgcaatgtaccgtctgttcaggaaggatttgtgtaaatgtagtaattcaatcgtagaaactcag

SEQ ID NO: 54684 - DNA, 2768 bp, Zea Mays
atgacacttgagtcatacacttgcgaaaactgcatctggcagaaggagaaaactctttatcatctcttcctcagatgcaacttcgctaaggcctgctggaattcaattggtttggtgccccctagaattgctaatccagaggaggctgcagcaaatctcaagcagcagctcaatgttcccttctccatggagatcattattctcatgacttggagcatttggaagtgtcgtaatgcttggctttttcagaacaaagatccaacggtgcagcaatgcaagcatgagttcacaaaagaattactcctggaggaggaggcgatagaggacgacgtgcgtccctgccgagatctggagagcaagaagccggaggcggctaggactgccaagcgttgggaagtggtaagatccttggagttctctggtcagccgacgtcaccggcgtgtcctcactggtgtgttatagccacgcctgttccttactagggattgtttttttccaaatatgcaagaaaatgtgatgtccacactagaatataaggatgatgcttgctatatatgagtagggtcctgaccacatggctaattttcttgatattcatgttaaatttggagaatttcttatgggtttcatgaagcttgtttgtagttaattaaacagcctcctggtatataggacaacgaatgtatattgttatgtatttgtatttattatcctgaagcgtagtttgtactttgtagaatgatattttgcagcaccgtagtctgaacttggtgttggtgtcatattgaatgtttttccttcccattttttttacctaaaaatggtgaatgagtgcaaatttgtcttgatgttcagacaattctgcgacaatgaactgaagcttatgctgattgctgactgattattcaactagttgtcacttgtggctactacctctttcttgattagctactggatctttttttgttcagcttgtgcatggtaagttaggcaaatatcaatcaattgcattcaccagcatgtggccatatttgcaggacatcaattaggctcacattgattagcttattggaaattatatccctcatggttgctctcaaatgtggactagtgttcctaactgcatttaaactttgagttcctacaagtatgtatctgatcgttttttgaaatctcattataatgttatatttttgaacctgaacatctggttgtaatgcaggatatcaactagtgggattacaaattattcaaatggcaacgctgtttaacttaagctctttactttaagcatgctcttaagtatatatttctcactttgatgcctgaaaattctgattctttgttttgtgaagctacattgagtcatgaggtcaccagtctctccgcaattgctagggaaagatttgctttgatttatcacttccccagaccctactcatgtgggagccccttcggcattaggtctgccattttttcttgatttgtgaagttacaaccaattaacatgtgatctgcagacctgaaatactaaatgaagtttgttattaactattaaaatttcatttgaaacaatcataacgatttttgttgacgttatttctctacctcaaatgtggcttgtgcagccttcagcatagttgttacttcaaatttcattccaattacataaaagctgctgaaaagttgcccacgcagcaacatgtctttttataagcggttacctaatgatttttgtcacataggtcccatctccccttttacacttacatggtttcgacttatttttcatttatacatggttgatttggtggcccataccatttttagtccaatatgatattttgtatatatgcagtaattggtttaaaattttatatttctaatgatcaattattacattttcctggaagatatttttttgtattgaactctaattttcaaatgccaatttaattatggtgaaaatattcctgtgataaaatcatgtaacctggacatatgattgtcccccagatatatgttctccgtttatcagggattttgcatctgttgcctggacttgattccctgtcgctgatctgtgttaagtgtctactctggaaccatagacttgattccctgtcgctgatctgcgttagatgtctactcggcacccctgatgtgttgttgtgcttcgaattccactacattgcaatgtaaagatccattctttactaaaactatttccagcagtttatccatattcatcctcatattcaaacttcactctgcaaacaatacagtctatattacaaaacagtgctagcatggtagtttacaagtgtgaccatatgtgaactgctggaggcggtctaatatattaactgctagcatggtagtttacaagtgtcatgcatcatcagtgaactggccaacctggtgaatcaaataaactgaactcaaagtaaattagtaaattaccacaccaagactgctagtctgctagtgattatagtgctgattgctgaaagtggtagtattttatgtaccaggctcagttatctatataccattgactaggtgtttaattgcttacttgcttagctaagggcatgtacagtggagagacaccaaaacggttctctaagcacaggagacaactaagagactctattgtacaatggagtgtctataaacgtagtctattaataaatacataattaaatgtatttgtatagcatcagatcgatagaacagacgacaaattggtacagtgggaagtgag

SEQ ID NO: 54685 - DNA, 2105 bp, Zea Mays
gaagaataaagatattgctttacaataacatttttatatgttatttatctttaccatgcgtctttatgtaacttttgaactacgttttttagacgtgcttttgtcaccggtcggtccaaggctttagcaaatcttgattccacaactgtccactgccaattcttggcaataaatcctttattgatgcaacaccaccgccttacaatttcattgcaacacatcaacctttttataataatccttccaataataatatggtgagctcatctcaaccacctactgttccattgcaataacatcagcatactgcaccaaaaattaagattgtttgtcgtgcatgacttgaccatctcagtgcgcacgacgccacttatcatttgacctctccatcatgaatttgcatcaacatgtaagatgtaacctatgaaatatactatgatattgtacattggtctgactactatctgtattccactcaactgtctatatatatactctgtattccacttcaaacgactcaataaccacagtatatataaccacaataaatgccttcattatttacagaagtttctattagtatatatggtgtcactaataacttctattccctcgttgcagaaatggatcattgagaacatatgaaggccgataaaatggaaaaagaaaacttatttgaaaaaaaatcatatgtagaaatttcttactgtcatatttcatgttatctctgatgtcttaattcatatacggtgcagagaaatcaaattgcaagtcacacatcttaccactcatgcatggctcagtgtcagtgaggttcacatcatcttatatataaaaaagttaacatactatagatataccatgggcgggctaacgtattgggctttttgcttgtataaaagaatataaacaggccgaggtcaggttcgcttctgggccgtgttaggggatgtgtgtcagctatgtcacacagtgacacagccattcagcagccggagtcgtttgtggggactcgatatttgtgtgtctgaaatccaaacgccgctgcactccatactggtcaatccatctatctatctatagattaaatgtgaaacggagttacgcagccaagcaaaaagctccgctctgtatattttgccaaggtgatgagcaattggtatatgataactgactgatatatagtcgtccatcatgttcattcaatctcatcccattttgcttagttttgatagtgaaagtggattgagacgactcagcaagcaatggttcactatcagaatctggctctttaccgagtgtcaaacaagttgtcgagtgtttttttcggacacttgacaaaaaagttcattgccgagtgtctaacaaaaaaaaacaaccggtaaaaaaaactcggcaaaggataactagatagaagaaaacagtgcatgatgactaaaaacaaacggtaactagaggagacatcttactttatctgaatggagaaattagtttctttcgcggaaaacttgaaatttgcaaatttgaagcatttagttctgcctacatatacggtgtgcctacctgtacgtgcaaatgattaacacatacgccatatatatatacacgaaatatgtactaattaataagctgacagagaatgtagctataggatgcatgcatgtgctatgaggagctgtttgaaagaaacgaaaagaaaaacgaaactggccaaaagttagagttgcaccgagttctgaacttctgatgcgtggctgctgtgtagtacgtacgtgatccagatctaacgcttgcttcatcacaagagctccccaggtgtgtgtagtatgcaactttctttgcatcaagaagctaagagaagaagagagagggtacagccttcatcatcactggacactaataacaggtagtaacagcaaatataagagactgttgatatctgagtgtgtacatggcaacaaggctgtactctctctcttctccctttagccttgatgaaatatcatagtttctccctctccctctctctatctgttaccgacagcactccatgtacattttccctctctatctctctctctctctctctcctcttcgatctatca

SEQ ID NO: 54686 - DNA, 428 bp, Zea Mays
gattacttcaacttgtttgtcttctcaacattaaagacacagagggtgtacaagtacttggagcagcgcaccttgaacttgacaacatccttgctcctcttgatcttcacggaatgggcatcattcctcctcgctgtgagaaggaagcccttgatctcgtggatctactttggtcgcaagtttatttcacaaatgattagacaaacaaaagagataggtttatacttgacaatcaactacaaaatactaacatggtagcaaaaaagaaaaactaattgccactacaaagaaaacaagcacccacacacatgctacactaagttacagtggtagtttatatataatagtacaatgctagtgcgttgcgactattagtgcacaactatcttgtaattaaaaatggaagctcaaagaatatcaagagattg

SEQ ID NO: 54687 - DNA, 282 bp, Zea Mays
tgctgcactgctggcagaagcgcatctcgcggccggcgacgacgatgacaggtgtcttggattgcgcctcgcagaccttgtggcggtggtggtcgtcgcgacacttgcttaggtctgccttgcagccgtccaccgcgcacgacgggcactgcgccccgccggcgctgccgggccccgagtgcaggcgcttcatcgggctggcggacgacactgcggttgcagccgccggctccttcgtggtcgtgccgtccgctgcctcaaactcgcctagctcaccgagct

SEQ ID NO: 54688 - DNA, 2897 bp, Zea Mays
ggtgatttgtggtctgggtctgaggggggagcaatcaaagtatggtatgcagaactgattcagaagtcacttgtttcacaaacagaagaaaaacataagacccttttagttgaaagatcatctattgatcttagggacatggtcagtgatggaggggcctgtcctttgcctgctgtagatgtaaaacttctgttgtctgacaattctagatcaaaagtatggagtgctggttacctctcatttgcactctgggattctcgcactaaaggccttctaaaagtggtaaacattgatggccaagttgatacccgtttcgacatcttatctgctcaggattcatatagctatgagacaaagcaaactctgttctctccgaggaaagagaaagctcgcagtcctgttggtttcttgcagagatcacggaatgctttgttgggagcagctgatgcagtccggagagttgctgttaaagcaggttttggtgatgacactcgtagaattgaagcatttacaatgtcaacggatgggatgatctggacaggatcggcaaatggctctcttgcccaatgggatggcagtggtaatcgtttgcaagagttcctgcatcattcgtcatctgtccaatgcatttacaattttggaacaagaatatgggtgggttacatggatggcaacatccagctgttggaccttgaaggcaacttgttaggaggatggattgcacatagtagtccaattctgagtatggctgttggaggttcatatatctttacactggctggtcatggaggaatccgtggatggaacttggcatcaccagggcctcttgacaacattttgcgctcagagttgatggagaaagattcatcatacaaaagttttgaatacatgaaagtattagtgggttcttggaatgttgggcaagaaaaggcatcctacgagtctttaagagcttggctaaaactcccatcgccagaagttgggttggttgtacttggattgcaggaggtggacatgggtgctggttttcttgcaatgtctgcagccaaagaaacggtaggactagagggaagtacaaatggagagtggtggttggatgtaattggccagattttaaaggttcattcctttgtgcgtgttggttcaagacagatggctggattactcattgctggtgagaataaatcttaagcagttcattggagacattgagaatgcggcagtgccatgtggattagggcgagcaatcggcaataagggtgcagtaggcttgagaatgagaatacatggtagaaacatttgctttgtaaattgtcatttttctgcacatatggaagctgtgagcagacggaatgaagactttgaccatgtctttagatcaatgacattttcttctccttcaaatggattattgacaacatcagtttctggttctgctgctcagcttcttcgaggaacaaatggatcaagactgcctgagttgtcagatactgacttgatcgtgtttcttggtgacttcaattaccggctttataacatttctttcgatgaggcaatgggcttggtttcccggcgatgctttgactggttgagagagaatgatcagctgcgagcagaaatgaaatctgggagagtcttccagggattacgtgaaggagaatttaagttcccccctacttataaatttgagaagcacatagcaggcttatctggttatgataatagtgagaaaaggcgcattccagcctggtgtgacagagttctatatcgagacagccgaactagttcacagattgagtgttctttggaatgtcctgtagtctgttcgatatcactgtaagtagttcgttgtttgcttatcttatataatgcttttaattaatttgcaatggctgttattccatttttttaggtacgactcttgtatggaagcaacagacagtgatcataaacctgtcaaatgtgtgttcaatttagatattgctcatgtggacaaacaaacaatgaggcagaagtatggagaaataatgggttcaaataaggaagtgcttgactcacttcagggcttggaggctttgcctgaagtagatatcagcacgaatgacatcattctgcaagatcaaaacccttttgttgtgaaactgcacaacagaagtacaaaagagttggcttgttttgagatcattggtcagacaccaaagtcatctggcacacctttctcaggtttcccttcttggctgaaggtttctccggcagtcggtataatttctcccagacaatctgttgaagtgacgttgcaacatggacaaatacgaagtcaagattatcttactgggacttcaggggacagttctggagctgcgcaagagaaggttgcaacgctattggttacagtaaccagagtggactcgacagctgggagacggcacaaaatacaagtacagcaccggtgccgcagggagacgtattcgtcaagaggttataacttggcggatcgattctttgcttgaaccagagaattcagaagtgctgggccaacgatgttgatgtcccagtgtgcatagagatttgcatgttgtagaacaaaaatcctgtgatgagagtggcataaaaacgcggatttggagagttcaaatttattaatagtgtcggaaagagcactggacgagtacagagtacagacgtaccgcgataaagactgcaaagctgatattttctgaagagctcactcgaataagcattcaatcctgcagcgcaccagcacatactgggggtttcctttttaaaaaattctccaaaagtctaaagccctaattagtcatatcctaaattcgtaacagtctcaatttcctttcctttttttcccttaagtgctggattctaaaaccctgattacg

SEQ ID NO: 54689 - DNA, 2850 bp, Zea Mays
cgaaagtagagctataaattccccctgtagttatcctgcattccaagaactttctccagggattctcgcactaaaggccttctaaaagtggtaaacattgatggccaagttgatacccgtttcgacatcttatctgctcaggattcatatagctatgagacaaagcaaactctgttctctccgaggaaagagaaagctcgcagtcctgttggtttcttgcagagatcacggaatgctttgttgggagcagctgatgcagtccggagagttgctgttaaagcaggttttggtgatgacactcgtagaattgaagcatttacaatgtcaacggatgggatgatctggacaggatcggcaaatggctctcttgcccaatgggatggcagtggtaatcgtttgcaagagttcctgcatcattcgtcatctgtccaatgcatttacaattttggaacaagaatatgggtgggttacatggatggcaacatccagctgttggaccttgaaggcaacttgttaggaggatggattgcacatagtagtccaattctgagtatggctgttggaggttcatatatctttacactggctggtcatggaggaatccgtggatggaacttggcatcaccagggcctcttgacaacattttgcgctcagagttgatggagaaagattcatcatacaaaagttttgaatacatgaaagtattagtgggttcttggaatgttgggcaagaaaaggcatcctacgagtctttaagagcttggctaaaactcccatcgccagaagttgggttggttgtacttggattgcaggaggtggacatgggtgctggttttcttgcaatgtctgcagccaaagaaacggtaggactagagggaagtacaaatggagagtggtggttggatgtaattggccagattttaaaggttcattcctttgtgcgtgttggttcaagacagatggctggattactcattgctgtatgggtgagaataaatcttaagcagttcattggagacattgagaatgcggcagtgccatgtggattagggcgagcaatcggcaataagggtgcagtaggcttgagaatgagaatacatggtagaaacatttgctttgtaaattgtcatttttctgcacatatggaagctgtgagcagacggaatgaagactttgaccatgtctttagatcaatgacattttcttctccttcaaatggattattgacaacatcagtttctggttctgctgctcagcttcttcgaggaacaaatggatcaagactgcctgagttgtcagatactgacttgatcgtgtttcttggtgacttcaattaccggctttataacatttctttcgatgaggcaatgggcttggtttcccggcgatgctttgactggttgagagagaatgatcagctgcgagcagaaatgaaatctgggagagtcttccagggattacgtgaaggagaatttaagttcccccctacttataaatttgagaagcacatagcaggcttatctggtatcaaaactctgtttaaattcttagttactgtactggattgattacattagcataagctacatggcaataatttgtatgcacttcttttaatgatctcttgaagcacttattttggttattttatctagttaactttaatttgacttataggttatgataatagtgagaaaaggcgcattccagcctggtgtgacagagttctatatcgagacagccgaactagttcacagattgagtgttctttggaatgtcctgtagtctgttcgatatcactgtaagtagttcgttgtttgcttatcttatataatgcttttaattaatttgcaatggctgttattccatttttttaggtacgactcttgtatggaagcaacagacagtgatcataaacctgtcaaatgtgtgttcaatttagatattgctcatgtggacaaacaaacaatgaggcagaagtatggagaaataatgggttcaaataaggaagtgcttgactcacttcagggcttggaggctttgcctgaagtagatatcagcacgaatgacatcattctgcaagatcaaaacccttttgttgtgaaactgcacaacagaagtacaaaagagttggcttgttttgagatcattggtcagacaccaaagtcatctggcacacctttctcaggtttcccttcttggctgaagtcggtataatttctcccagacaatctgttgaagtgacgttgcaacatggacaaatacgaagtcaagattatcttactgggacttcaggggacagttctggagctgcgcaagagaaggttgcaacgctattggttacagtaaccagagtggactcgacagctgggagacggcacaaaatacaagtacagcaccggtgccgcagggagacgtattcgtcaagaggttataacttggcggatcgattctttgcttgaaccagagaattcagaagtgctgggccaacgatgttgatgtcccagtgtgcatagagatttgcatgttgtagaacaaaaatcctgtgatgagagtggcataaaaacgcggatttggagagttcaaatttattaatagtgtcggaaagagcactggacgagtacagagtacagacgtaccgcgataaagactgcaaagctgatattttctgaagagctcactcgaataagcattcaatcctgcagcgcaccagcacatactgggggtttcctttttaaaaaattctccaaaagtctaaagccctaattagtcatatcctaaattcgtaacagtctcaatttcctttcctttttttcccttaagtgctggattctaaaaccctgattacg

SEQ ID NO: 54690 - DNA, 3687 bp, Zea Mays
atggcgaatcccggcggcaccaaccccttcgcttcccccgccgacgccgcctcatcgccgtgggacgacctccccgacgacttcttcctctccacttccatcacctccccgtccccgtccccaccccctatcccgccccccatcccatccacctcgccccgtcacgccacgccccaccgatccacctccctcccgcccgcctccactccctccgctgctacctccgcctccgtctccgtctccgcttccttctccgacccgcgcccccgcgccgctccggcatcgcatcagcatcagcatcagccccagctcctccatcccagccactcactccccgccttccccgccgcggcctcccgctccccggccgccgcagcacaagtatggccaccgcccccggggccccaccactcgggctcaatcccggagttcgccgccgctccggcctccagcgcacacctcccgcccgcgcgcaccgcggtgcgcgccgaccgcccgcccccgctcgatctgcgcccgcgcccgcccagggagtcccaggccggtgcggcgcttcgcgttctcgcctgctgctgcgatgcttcccggtccgaggccggcgccgccgcccgtctctgggcagcgggcgaggccggcgtcagggcatgggacctcgcagacgccttccggtcgccgtctcagcagcgttggggcgacgagtcgtctgcgccctttagggagtcgcgcaggacgcccccggcgctctgcctcgcggcggaccccgctcgcagcgtggtgtggagcggccatgcggacggccggatcatgggatggaccgcggatcctggaccggaggcgggggagtgcctctcgtgggaggcacaccgtgggccagtgttcgcgttggccgtctcttcctatgggattctcgcactaaaggccttctaaaagtggtaaacattgatggccaagttgatacccgtttcgacatcttatctgctcaggattcatatagctatgagacaaagcaaactctgttctctccgaggaaagagaaagctcgcagtcctgttggtttcttgcagagatcacggaatgctttgttgggagcagctgatgcagtccggagagttgctgttaaagcaggttttggtgatgacactcgtagaattgaagcatttacaatgtcaacggatgggatgatctggacaggatcggcaaatggctctcttgcccaatgggatggcagtggtaatcgtttgcaagagttcctgcatcattcgtcatctgtccaatgcatttacaattttggaacaagaatatgggtgggttacatggatggcaacatccagctgttggaccttgaaggcaacttgttaggaggatggattgcacatagtagtccaattctgagtatggctgttggaggttcatatatctttacactggctggtcatggaggaatccgtggatggaacttggcatcaccagggcctcttgacaacattttgcgctcagagttgatggagaaagattcatcatacaaaagttttgaatacatgaaagtattagtgggttcttggaatgttgggcaagaaaaggcatcctacgagtctttaagagcttggctaaaactcccatcgccagaagttgggttggttgtacttggattgcaggaggtggacatgggtgctggttttcttgcaatgtctgcagccaaagaaacggtaggactagagggaagtacaaatggagagtggtggttggatgtaattggccagattttaaaggttcattcctttgtgcgtgttggttcaagacagatggctggattactcattgctggtgagaataaatcttaagcagttcattggagacattgagaatgcggcagtgccatgtggattagggcgagcaatcggcaataagggtgcagtaggcttgagaatgagaatacatggtagaaacatttgctttgtaaattgtcatttttctgcacatatggaagctgtgagcagacggaatgaagactttgaccatgtctttagatcaatgacattttcttctccttcaaatggattattgacaacatcagtttctggttctgctgctcagcttcttcgaggaacaaatggatcaagactgcctgagttgtcagatactgacttgatcgtgtttcttggtgacttcaattaccggctttataacatttctttcgatgaggcaatgggcttggtttcccggcgatgctttgactggttgagagagaatgatcagctgcgagcagaaatgaaatctgggagagtcttccagggattacgtgaaggagaatttaagttcccccctacttataaatttgagaagcacatagcaggcttatctggtatcaaaactctgtttaaattcttagttactgtactggattgattacattagcataagctacatggcaataatttgtatgcacttcttttaatgatctcttgaagcacttattttggttattttatctagttaactttaatttgacttataggttatgataatagtgagaaaaggcgcattccagcctggtgtgacagagttctatatcgagacagccgaactagttcacagattgagtgttctttggaatgtcctgtagtctgttcgatatcactgtaagtagttcgttgtttgcttatcttatataatgcttttaattaatttgcaatggctgttattccatttttttaggtacgactcttgtatggaagcaacagacagtgatcataaacctgtcaaatgtgtgttcaatttagatattgctcatgtggacaaacaaacaatgaggcagaagtatggagaaataatgggttcaaataaggaagtgcttgactcacttcagggcttggaggctttgcctgaagtagatatcagcacgaatgacatcattctgcaagatcaaaacccttttgttgtgaaactgcacaacagaagtacaaaagagttggcttgttttgagatcattggtcagacaccaaagtcatctggcacacctttctcaggtttcccttcttggctgaagtcggtataatttctcccagacaatctgttgaagtgacgttgcaacatggacaaatacgaagtcaagattatcttactgggacttcaggggacagttctggagctgcgcaagagaaggttgcaacgctattggttacagtaaccagagtggactcgacagctgggagacggcacaaaatacaagtacagcaccggtgccgcagggagacgtattcgtcaagaggttataacttggcggatcgattctttgcttgaaccagagaattcagaagtgctgggccaacgatgttgatgtcccagtgtgcatagagatttgcatgttgtagaacaaaaatcctgtgatgagagtggcataaaaacgcggatttggagagttcaaatttattaatagtgtcggaaagagcactggacgagtacagagtacagacgtaccgcgataaagactgcaaagctgatattttctgaagagctcactcgaataagcattcaatcctgcagcgcaccagcacatactgggggtttcctttttaaaaaattctccaaaagtctaaagccctaattagtcatatcctaaattcgtaacagtctcaatttcctttcctttttttcccttaagtgctggattctaaaaccctgattacg

SEQ ID NO: 54691 - DNA, 3726 bp, Zea Mays
atggcgaatcccggcggcaccaaccccttcgcttcccccgccgacgccgcctcatcgccgtgggacgacctccccgacgacttcttcctctccacttccatcacctccccgtccccgtccccaccccctatcccgccccccatcccatccacctcgccccgtcacgccacgccccaccgatccacctccctcccgcccgcctccactccctccgctgctacctccgcctccgtctccgtctccgcttccttctccgacccgcgcccccgcgccgctccggcatcgcatcagcatcagcatcagccccagctcctccatcccagccactcactccccgccttccccgccgcggcctcccgctccccggccgccgcagcacaagtatggccaccgcccccggggccccaccactcgggctcaatcccggagttcgccgccgctccggcctccagcgcacacctcccgcccgcgcgcaccgcggtgcgcgccgaccgcccgcccccgctcgatctgcgcccgcgcccgcccagggagtcccaggccggtgcggcgcttcgcgttctcgcctgctgctgcgatgcttcccggtccgaggccggcgccgccgcccgtctctgggcagcgggcgaggccggcgtcagggcatgggacctcgcagacgccttccggtcgccgtctcagcagcgttggggcgacgagtcgtctgcgccctttagggagtcgcgcaggacgcccccggcgctctgcctcgcggcggaccccgctcgcagcgtggtgtggagcggccatgcggacggccggatcatgggatggaccgcggatcctggaccggaggcgggggagtgcctctcgtgggaggcacaccgtgggccagtgttcgcgttggccgtctcttcctatggtgatttgtggtctgggtctgaggggggagcaatcaaagtatggtatgcagaactgattcagaagtcacttgtttcacaaacagaagaaaaacataagacccttttagttgaaagatcatctattgatcttagggacatggtcagtgatggaggggcctgtcctttgcctgctgtagatgtaaaacttctgttgtctgacaattctagatcaaaagtatggagtgctggttacctctcatttgcactctgggattctcgcactaaaggccttctaaaagtggtaaacattgatggccaagttgatacccgtttcgacatcttatctgctcaggattcatatagctatgagacaaagcaaactctgttctctccgaggaaagagaaagctcgcagtcctgttggtttcttgcagagatcacggaatgctttgttgggagcagctgatgcagtccggagagttgctgttaaagcaggttttggtgatgacactcgtagaattgaagcatttacaatgtcaacggatgggatgatctggacaggatcggcaaatggctctcttgcccaatgggatggcagtggtaatcgtttgcaagagttcctgcatcattcgtcatctgtccaatgcatttacaattttggaacaagaatatgggtgggttacatggatggcaacatccagctgttggaccttgaaggcaacttgttaggaggatggattgcacatagtagtccaattctgagtatggctgttggaggttcatatatctttacactggctggtcatggaggaatccgtggatggaacttggcatcaccagggcctcttgacaacattttgcgctcagagttgatggagaaagattcatcatacaaaagttttgaatacatgaaagtattagtgggttcttggaatgttgggcaagaaaaggcatcctacgagtctttaagagcttggctaaaactcccatcgccagaagttgggttggttgtacttggattgcaggaggtggacatgggtgctggttttcttgcaatgtctgcagccaaagaaacggtaggactagagggaagtacaaatggagagtggtggttggatgtaattggccagattttaaaggttcattcctttgtgcgtgttggttcaagacagatggctggattactcattgctgtatgggtgagaataaatcttaagcagttcattggagacattgagaatgcggcagtgccatgtggattagggcgagcaatcggcaataagggtgcagtaggcttgagaatgagaatacatggtagaaacatttgctttgtaaattgtcatttttctgcacatatggaagctgtgagcagacggaatgaagactttgaccatgtctttagatcaatgacattttcttctccttcaaatggattattgacaacatcagtttctggttctgctgctcagcttcttcgaggaacaaatggatcaagactgcctgagttgtcagatactgacttgatcgtgtttcttggtgacttcaattaccggctttataacatttctttcgatgaggcaatgggcttggtttcccggcgatgctttgactggttgagagagaatgatcagctgcgagcagaaatgaaatctgggagagtcttccagggattacgtgaaggagaatttaagttcccccctacttataaatttgagaagcacatagcaggcttatctggttatgataatagtgagaaaaggcgcattccagcctggtgtgacagagttctatatcgagacagccgaactagttcacagattgagtgttctttggaatgtcctgtagtctgttcgatatcactgtacgactcttgtatggaagcaacagacagtgatcataaacctgtcaaatgtgtgttcaatttagatattgctcatgtggacaaacaaacaatgaggcagaagtatggagaaataatgggttcaaataaggaagtgcttgactcacttcagggcttggaggctttgcctgaagtagatatcagcacgaatgacatcattctgcaagatcaaaacccttttgttgtgaaactgcacaacagaagtacaaaagagttggcttgttttgagatcattggtcagacaccaaagtcatctggcacacctttctcaggtttcccttcttggctgaaggtttctccggcagtcggtataatttctcccagacaatctgttgaagtgacgttgcaacatggacaaatacgaagtcaagattatcttactgggacttcaggggacagttctggagctgcgcaagagaaggttgcaacgctattggttacagtaaccagagtggactcgacagctgggagacggcacaaaatacaagtacagcaccggtgccgcagggagacgtattcgtcaagaggttataacttggcggatcgattctttgcttgaaccagagaattcagaagtgctgggccaacgatgttgatgtcccagtgtgcatagagatttgcatgttgtagaacaaaaatcctgtgatgagagtggcataaaaacgcggatttggagagttcaaatttattaatagtgtcggaaagagcactggacgagtacagagtacagacgtaccgcgataaagactgcaaagctgatattttctgaagagctcactcgaataagcattcaatcctgcagcgcaccagcacatactgggggtttcctttttaaaaaattctccaaaagtctaaagccctaattagtcatatcctaaattcgtaacagtctcaatttcctttcctttttttcccttaagtgctggattctaaaaccctgattacg

SEQ ID NO: 54692 - DNA, 1071 bp, Zea Mays
gagcgaacagagtggttgtcccctcattcgagatgtaaagtcggccctctcctccttacctcaatgtattgctcgtaagttttataactcagaagaatcatgctaaatagcccaatgatgatacatgtaaactattttcttgtcgtgaaccttgaagccaggatggaaagacctcttcgaattataaatctcaacctaatttgagcttgagtctgatgacatgttttgcaccgcaggattatctcctaaaatctgcatttttattttctaacaatatgttaagtcttgagcacttaaattcatttaatctgaattagttaggtctacacaagatgtgaagtttatacaattccaactaacggtcaacgtcgtagctctgataatcaatgtagttgctgctgtcagttctggaaacgtgctgttgaatgttgttcaggtttgagttcagctctgagatctattggtagttgcattatttatcatcatttaacttgtaaaagctgcaatttcttcagttttgtgcatgtccagacaatatttctaaaaaatgtgtttggtggaattctaatttttgctcccttggctgacagttgctgtgggttaacctaattatggatactttgggtgcccttgcattagcaacagaaccacctacaaaccatcttatggagagacccccagtagggagaagaattaggattttagaagctcgatgattttgttttgccttcaaagaagtatgctgacgtgatcattcctcgaggtggtgataaccgtgtaacagttgatctgattgttcaacacatccgtacaaaacttggtcagcatgacttgtgcaaaatctatccaaatgttcatgttgttcaatcaacttttcagatccgaggaatgcatactcttatccgtgatagggacatcaccacacctgactttgtattttattcagatcgattgatccgtttggtagtggagcatggccttggacatttgccatttacagaaaagcaggttattaccccaacaggtattttgcaagtggcaccttatatcttgtagctgcttagctgtgca

SEQ ID NO: 54693 - DNA, 1120 bp, Zea Mays
ctcatcctgactccgcccccaccgccgcgagcgcccggttcggatccagcaccccctacacctccaccggtcctcaggtgcccccgcctcaccgccgttcgtcgtcacccgtcggcgcgacgtcggtccggtacgctgtgccctgcagggagaaaggagcaggcattggcaacattcgtccgccaccgccgcttccgtctctagcgatctcgagacctcccgcgccaccaccgacaccgagctccacatcgacgggcttccccattccgagcacagctgatttgctccccatgtcctctttctcaccaccactgtcgtccccaggtcctccgcaagtgagttgaaccggcgtcggtgccggtgcctgggtccctcgcttcagcttccgcttccggctccggcctcactgttgttcctccctgcagtccgcggagttgagcaggttcatcgacaagtctgggactcatgtcatcgacggggtcaagatgggaggcaaggacgtggtgtgtgcgtgaagcatctcaagggctctagccttatgtagagcgacgtgtagccctgctcaaggagctcgccggcgacaggttcttggaggattccacgacaaaatggttgtgacagcgagcagggggtgagggagcgaacagagtggttgtcccctcattcgagatgtaaagtcggccctctcctccttacctcaatgtattgctcttgctgtgggttaacctaattatggatactttgggtgcccttgcattagcaacagaaccacctacaaaccatcttatggagagacccccagtagggagaaggtggtgataaccgtgtaacagttgatctgattgttcaacacatccgtacaaaacttggtcagcatgacttgtgcaaaatctatccaaatgttcatgttgttcaatcaacttttcagatccgaggaatgcatactcttatccgtgatagggacatcaccacacctgactttgtattttattcagatcgattgatccgtttggtagtggagcatggccttggacatttgccatttacagaaaagcaggttattaccccaacaggtattttgcaagtggcaccttatatcttgtagctgcttagctgtgca

SEQ ID NO: 54694 - DNA, 1127 bp, Zea Mays
tggccctattccttaccttgtgatccctctcatcctgactccgcccccaccgccgcgagcgcccggttcggatccagcaccccctacacctccaccggtcctcaggtgcccccgcctcaccgccgttcgtcgtcacccgtcggcgcgacgtcggtccggtacgctgtgccctgcagggagaaaggagcaggcattggcaacattcgtccgccaccgccgcttccgtctctagcgatctcgagacctcccgcgccaccaccgacaccgagctccacatcgacgggcttccccattccgagcacagctgatttgctccccatgtcctctttctcaccaccactgtcgtccccaggtcctccgcaagtgagttgaaccggcgtcggtgccggtgcctgggtccctcgcttcagcttccgcttccggctccggcctcactgttgttcctccctgcagtccgcggagttgagcaggttcatcgacaagtctgggactcatgtcatcgacggggtcaagatgggaggcaaggacgtggtgtgtgcgtgaagcatctcaagggctctagccttatgtagagcgacgtgtagccctgctcaaggagctcgccggcgacaggttcttggaggattccacgacaaaatggttgtgacagcgagcagggggtgagggagcgaacagagtggttgtcccctcattcgagatgtaaagtcggccctctcctccttacctcaatgtattgctcttgctgtgggttaacctaattatggatactttgggtgcccttgcattagcaacagaaccacctacaaaccatcttatggagagacccccagtagggagaagttgatctgattgttcaacacatccgtacaaaacttggtcagcatgacttgtgcaaaatctatccaaatgttcatgttgttcaatcaacttttcagatccgaggaatgcatactcttatccgtgatagggacatcaccacacctgactttgtattttattcagatcgattgatccgtttggtagtggagcatggccttggacatttgccatttacagaaaagcaggttattaccccaacaggtattttgcaagtggcaccttatatcttgtagctgcttagctgtgca

SEQ ID NO: 54695 - DNA, 1302 bp, Zea Mays
tccatttatcttgatcatttggatcgttggatgggcgatcctcaagttcacatgcatatgaaccgtctttttctggtcaaggattcaaatctccagaaacacccgattcgacagtgcctgtcaagcatccttctgcgatggaacctgtgacttcctctcaaagacctggcagctcaacatcgtcaacatcagagcgcattggtgcaaactcagccgcgggtgctcctggcttgtcaccaagctcttcaataggatctcttaccgctgaaaaatcgactttgaaccctaatgctaaggaattcaagctaaatcctaatgccaagagtttcactccgtcagcatctctgaggccaccacaccctacatcatctgatgcatcatattactatcctaataacatgccggcgatgccacttggacccggtttgcctgtgggcatggggttcccaccggcatatggcgcccagcctgtcatgtacaatactcaacctggagcatcaccgcacggttacatgcatcctgctggtccacagtatgggcaacaaatgacgattggggggcagactcgtccagtttattattatgcgcctgagatgcaacaatacagaggaagaaacttttagatataccattctgaactgctcttagatggaagtcgctgcaatccccacaagtgggattttgaccagcaaaaaccgctattacaatggaaaaaactggtcctgttgtgttgctcggattggttggacaaaaaagcgcaccgactttgtgttgctcggattgcctggtcaaaatgctcttcattgtcctgtatcagtgttgctcggaagcaggttcactggaatttcatattatttttgtcagactattgatgttgtaaattgaattgcgggtcatctgttcgacccggaaatgacattcataaatgtgtgaggttgccccatgtaacatttatgtgttccttaacgttgttctgatgtaagatttggacgaaatggatcaaattgctgacctatctgctcgtttatacccagctggagtagcaagcatggaggggacgtagagtcttactagcgtttgggatggagacctaaaaattgttagggcttacgtttataatttgcgaaccagggtggttataagattgttgccattatcgtgtagtcactggattgaaaggtgttggtgggcattgacatctgatgtggttcatgtgttggtaatggacggcggtattatagggaagtaggtagtgtttggtttaccatgggtaatggtatcgcaatggaagttaaaaagcgg

SEQ ID NO: 54696 - DNA, 2601 bp, Zea Mays
ttcggatttccttccgccttccgacagcggctgtctcggcgacccaaccccagcctgaccccacctcccgccgccgccgccgccgccgccgccgcgccttcgtcgtcaggagcagggtcccggtggctgcgtctctctcccctgcccccctgctccacactcggttcacgcgtcggctcgctaccgcaggccctcgactcgtacgcccgtccccggcggcgatccggccggcaccgtaaccctaggactccgacggagcaggaatgatgagtcatgaacagcaaattgtccctcctagtaagggttctgtgaatggattcccccatagaaaactggataaggagggcagtggaacgcaaagtagaataaatttggtgaggtcatcctctggtggttttactaattcaggcgtcgtcttaaaaatggctcaggtcataaaggatggttctgccagaggacaaagatatcctgctgttcttgtaaagaaacctgagactatgataataccggcaagggagcttgtacaagtttttgccaaggacatagaacttggcggcgagctgccaaaagttcctggcaatgacaaaaggaaggacttgctgattgattctgctattacccgctatcattatctcgaagagagggaacttgagcgctgggcaccagatggaggagattcagagtgtattgaactggagaagtatgaccggaagggaaataggagctgggaccagtttgaaaccaatgcagcattatttggggtaaagagtactttcaatgaagaaatttataccacaaagcttgagagaggtcctcacatgagagagcttgaaaagcatgcttcgagaatagctagagaaatagagggagaagataccagagatattcaccttgcagaggagagaggcttattcctgggtgatgacctggaccatgatgaagagataaaatattcagcagtgcgtagagacaccgataacagcaagtacaagccaccatttactaaggtcccaagcagtacatgccatgttgattcgtttaacaggacagtcaatattgatccgaatgattcactggcatgttcatcaacaatggacaaagaatcatcatcccacatatttgatgacactgatgcatctgccactatccatacaaatagcgttagccagccaacatctgattatctgtcagatagacccttgtccaatgatgaaaacaggttggacagaaagctgaacaaagagagtaatgaaaacatggataacagaaagttgcaacatgaggataatttacctgatggtgccagacctcttatttcggaagcgttggatgggcgatcctcaagttcacatgcatatgaaccgtctttttctggtcaaggattcaaatctccagaaacacccgattcgacagtgcctgtcaagcatccttctgcgatggaacctgtgacttcctctcaaagacctggcagctcaacatcgtcaacatcagagcgcattggtgcaaactcagccgcgggtgctcctggcttgtcaccaagctcttcaataggatctcttaccgctgaaaaatcgactttgaaccctaatgctaaggaattcaagctaaatcctaatgccaagagtttcactccgtcagcatctctgaggccaccacaccctacatcatctgatgcatcatattactatcctaataacatgccggcgatgccacttggacccggtttgcctgtgggcatggggttcccaccggcatatggcgcccagcctgtcatgtacaatactcaacctggagcatcaccgcacggttacatgcatcctgctggtccacagtatgggcaacaaatgacgattggggggcagactcgtccagtttattattatgcgcctgagatgcaacaatacagaggaagaaacttttagatataccattctgaactgctcttagatggaagtcgctgcaatccccacaagtgggattttgaccagcaaaaaccgctattacaatggaaaaaactggtcctgttgtgttgctcggattggttggacaaaaaagcgcaccgactttgtgttgctcggattgcctggtcaaaatgctcttcattgtcctgtatcagtgttgctcggaagcaggttcactggaatttcatattatttttgtcagactattgatgttgtaaattgaattgcgggtcatctgttcgacccggaaatgacattcataaatgtgtgaggttgccccatgtaacatttatgtgttccttaacgttgttctgatgtaagatttggacgaaatggatcaaattgctgacctatctgctcgtttatacccagctggagtagcaagcatggaggggacgtagagtcttactagcgtttgggatggagacctaaaaattgttagggcttacgtttataatttgcgaaccagggtggttataagattgttgccattatcgtgtagtcactggattgaaaggtgttggtgggcattgacatctgatgtggttcatgtgttggtaatggacggcggtattatagggaagtaggtagtgtttggtttaccatgggtaatggtatcgcaatggaagttaaaaagcgg

SEQ ID NO: 54697 - DNA, 2745 bp, Zea Mays
cccgattcattcggatttccttccgccttccgacagcggctgtctcggcgacccaaccccagcctgaccccacctcccgccgccgccgccgccgccgccgccgcgccttcgtcgtcaggagcagggtcccggtggctgcgtctctctcccctgcccccctgctccacactcggttcacgcgtcggctcgctaccgcaggccctcgactcgtacgcccgtccccggcggcgatccggccggcaccgtaaccctaggactccgacggagcaggaatgatgagtcatgaacagcaaattgtccctcctagtaagggttctgtgaatggattcccccatagaaaactggataaggagggcagtggaacgcaaagtagaataaatttggtgaggtcatcctctggtggttttactaattcagggcatggaagccattccagggaccggctaatctatgttctaacacaacttattgggcatcatgtggacgtgcatgtgaataacggctctataatctctggaattttccatgcaacaaaccctgacaaagactttggcgtcgtcttaaaaatggctcaggtcataaaggatggttctgccagaggacaaagatatcctgctgttcttgtaaagaaacctgagactatgataataccggcaagggagcttgtacaagtttttgccaaggacatagaacttggcggcgagctgccaaaagttcctggcaatgacaaaaggaaggacttgctgattgattctgctattacccgctatcattatctcgaagagagggaacttgagcgctgggcaccagatggaggagattcagagtgtattgaactggagaagtatgaccggaagggaaataggagctgggaccagtttgaaaccaatgcagcattatttggggtaaagagtactttcaatgaagaaatttataccacaaagcttgagagaggtcctcacatgagagagcttgaaaagcatgcttcgagaatagctagagaaatagagggagaagataccagagatattcaccttgcagaggagagaggcttattcctgggtgatgacctggaccatgatgaagagataaaatattcagcagtgcgtagagacaccgataacagcaagtacaagccaccatttactaaggtcccaagcagtacatgccatgttgattcgtttaacaggacagtcaatattgatccgaatgattcactggcatgttcatcaacaatggacaaagaatcatcatcccacatatttgatgacactgatgcatctgccactatccatacaaatagcgttagccagccaacatctgattatctgtcagatagacccttgtccaatgatgaaaacaggttggacagaaagctgaacaaagagagtaatgaaaacatggataacagaaagttgcaacatgaggataatttacctgatggtgccagacctcttatttcggaagcgttggatgggcgatcctcaagttcacatgcatatgaaccgtctttttctggtcaaggattcaaatctccagaaacacccgattcgacagtgcctgtcaagcatccttctgcgatggaacctgtgacttcctctcaaagacctggcagctcaacatcgtcaacatcagagcgcattggtgcaaactcagccgcgggtgctcctggcttgtcaccaagctcttcaataggatctcttaccgctgaaaaatcgactttgaaccctaatgctaaggaattcaagctaaatcctaatgccaagagtttcactccgtcagcatctctgaggccaccacaccctacatcatctgatgcatcatattactatcctaataacatgccggcgatgccacttggacccggtttgcctgtgggcatggggttcccaccggcatatggcgcccagcctgtcatgtacaatactcaacctggagcatcaccgcacggttacatgcatcctgctggtccacagtatgggcaacaaatgacgattggggggcagactcgtccagtttattattatgcgcctgagatgcaacaatacagaggaagaaacttttagatataccattctgaactgctcttagatggaagtcgctgcaatccccacaagtgggattttgaccagcaaaaaccgctattacaatggaaaaaactggtcctgttgtgttgctcggattggttggacaaaaaagcgcaccgactttgtgttgctcggattgcctggtcaaaatgctcttcattgtcctgtatcagtgttgctcggaagcaggttcactggaatttcatattatttttgtcagactattgatgttgtaaattgaattgcgggtcatctgttcgacccggaaatgacattcataaatgtgtgaggttgccccatgtaacatttatgtgttccttaacgttgttctgatgtaagatttggacgaaatggatcaaattgctgacctatctgctcgtttatacccagctggagtagcaagcatggaggggacgtagagtcttactagcgtttgggatggagacctaaaaattgttagggcttacgtttataatttgcgaaccagggtggttataagattgttgccattatcgtgtagtcactggattgaaaggtgttggtgggcattgacatctgatgtggttcatgtgttggtaatggacggcggtattatagggaagtaggtagtgtttggtttaccatgggtaatggtatcgcaatggaagttaaaaagcgg

SEQ ID NO: 54698 - DNA, 1492 bp, Zea Mays
ggatttccttccgccttccgacagcggctgtctcggcgacccaaccccagcctgaccccacctcccgccgccgccgccgccgccgccgccgcgccttcgtcgtcaggagcagggtcccggtggctgcgtctctctcccctgcccccctgctccacactcggttcacgcgtcggctcgctaccgcaggccctcgactcgtacgcccgtccccggcggcgatccggccggcaccgtaaccctaggactccgacggagcaggaatgatgagtcatgaacagcaaattgtccctcctagtaagggttctgtgaatggattcccccatagaaaactggataaggagggcagtggaacgcaaagtagaataaatttggtgaggtcatcctctggtggttttactaattcagggcatggaagccattccagggaccggctaatctatgttctaacacaacttattgggcatcatgtggacgtgcatgtgaataacggctctataatctctggaattttccatgcaacaaaccctgacaaagactttggcgtcgtcttaaaaatggctcaggtcataaaggatggttctgccagaggacaaagatatcctgctgttcttgtaaagaaacctgagactatgataataccggcaagggagcttgtacaagtttttgccaaggacatagaacttggcggcgagctgccaaaagttcctggcaatgacaaaaggaaggacttgctgattgattctgctattacccgctatcattatctcgaagagagggaacttgagcgctgggcaccagatggaggagattcagagtgtattgaactggagaagtatgaccggaagggaaataggagctgggaccagtttgaaaccaatgcagcattatttggggtaaagagtactttcaatgaagaaatttataccacaaagcttgagagaggtcctcacatgagagagcttgaaaagcatgcttcgagaatagctagagaaatagagggagaagataccagagatattcaccttgcagaggagagaggcttattcctgggtgatgacctggaccatgatgaagagataaaatattcagcagtgcgtagagacaccgataacagcaagtacaagccaccatttactaaggtcccaagcagtacatgccatgttgattcgtttaacaggacagtcaatattgatccgaatgattcactggcatgttcatcaacaatggacaaagaatcatcatcccacatatttgatgacactgatgcatctgccactatccatacaaatagcgttagccagccaacatctgattatctgtcagatagacccttgtccaatgatgaaaacaggttggacagaaagctgaacaaagagagtaatgaaaacatggataacagaaagttgcaacatgaggataatttacctgatggtgccagacctcttatttcggaagttcaatagcacaatatgtgatgctatgctacttctgc

SEQ ID NO: 54699 - DNA, 1357 bp, Zea Mays
atgcacactccctcccacgcgtgcgtggggtgggggcagctggagcacattattagggagcaaaatatattggctgcctacgagattttagagcttttcggtgaatttgtcctggcaaaagtccctactgttgaggtccaaaagtaggttctgctttatgaactgtgattgaattacaattttctaagccatggctcaagattcttttttcacttaacagaatatgatcagcacctattagttttatcatggagcagggaatgccccttagaactgcgtgaagcaattgctagtataatctttgcattaggaagatgttcagacttgcctgagctaatgcatctccgtaatttattaccaccaagtatggaaaggagtttgttgttggcgctgtggaattgcgccctgacagcagtgtcaaccgcacaaattcagaattgtttgctcacaaaagtgaagatctctttcatacagataatcgaaaagctctcggtgaatgctccatcaaatggatcaaagctgaagtcatgaaggctattgcccaagagtacaattttgaatgggattcatctaatactgaagcagaattcagcaagaaatttgaagatctactggtagcatttgctaacagattacttattccctgattattggacatgaatgcatatgaaaggtgtttcatgtgatatcttcaaagcaggtgtttgcattactgctttctaatgcttgaggaactgcacgtttatgtttccgtgcttgggcttaacttaggccatttgatgttccagttgaacgaattcagtgtacatgtatgctcatcctaagaaaccattagctcacaagatattgttttctctatctaatattcagctattatgtgtccctatatttctaatccagtttatagatagattctcccccttttttggactggtggatttggtcaaatcttatgtccttaccacaattagcatgtctgtggattgattttggttgttgcacaacacaatgagaactgcaaaaacaatgtggtactgtagaaggtttgttcgttgtttactaagaatcagggactaatgaatttgtaaacatgatgcagttgattaaggaatttagaagagaataagcaccaactaacagcaagaacgtatatgcctccataactccatggagaacgaaatttttagcaaagtctgaaatgagagcaatctagaaatcacttcatttaccatgtgctggtatgcagaatggctcaggatcttcggtccaccaggtccagccacctaccattgagggctcaatgagctcacctgttgcttctgctccaagagataagccgtcagcattaaattcacct

SEQ ID NO: 54700 - DNA, 550 bp, Zea Mays
gctagctacgcgccacgcgacaggtacgccgccgatttcgtccttactctgttcgtcgccgccaccgtctacgtgcttatcctttccctgttcgaggtggccttccacaaggtggtcaggacgacgacattgcagtggtcaggacgacgacattgcagtgggctgtaatcagatgcagttcagctattttctgtgcaactctaatctcaagtagatcaagcaaccatgttgctgtgttggctacactcgcgaacttgagagttattgcaaccactccatctaaagaggataacaggcttcatgtgaagtgcatcaccttctctcaaccacctgttgggaatgctgctttgagagagttattttagatgtacctagaatgctgcacttgactgagcatatgattattagaaatactattagcgctaatgctgcttatctggagagaggtaagtgttagagggttgatgctatcaaaattgtccctctatccccttggtttccttttgttgttatgttcacaaaagagggtggcaagactacttcaaatcct

SEQ ID NO: 54701 - DNA, 1566 bp, Zea Mays
atcaattgaaccaaccttttagctatttttggtccgctgtattgatgactcgtccttgtttgctaagactttccgagctgttcttcttgacgtatgatcgtcgtttcattcaagaatggttaagcgctggaaaccggacatgcccacagactcaacaagtcctttcgaacacaattatcaccccgaaccaccttgtgagaagcatgatctcacagtggtgcacagacaacgggatcactctgccaccggttgagaaccaagatgaagatctggttacaaacaatgagcgggagacatttcgtaaactgtttgagaggatcgtatcgtcgtcgtcagacctgtctgagcagagggaagccattaaagagctcaggctgcggactaagtgcaacagttcactaagagcagcgataggagagagaccggattcaatctcgcagatgatttccgtagcgtccagcccagagctagaaaacagtgcagaagttgtggaggatacggtgacagctatccttaatctctctatccacgagagcaacaagaagatcattggagacgacccactggcagtcccgttcctgatcaaggccttacagtcaggaaccatggaggcccggagcaacgccgccgccgccatcttcagcctatccgcgctggacggcaacaaggcgaggatcggcgagctcggcgcgatgaggccgctggtggagctcctcgagcacggcagcacggcagcgaggaaagacgcggcctcggccatcttcaacctgtgcacgctgcacgagaacaagtcgcgggccaccaagagcggggccgtcgacgtgacgctgagggccgtcgcctgcgccggggacggctctggctccggctcgctggtggacgagtctctggccgtcctcgcgctgctgtcgggcgaccacgaggcggtggaggaggtcggcgagacgggcggcgtggcctccatgctccacgtcgtgaaggacgacccgtgcaagcgcaacaaggagaacgcggcggccgtgctcttcgcggtctgcgtgtacgaccgcaccaggctgcgggaggtcgccgagcacgagaagctgaacgggtccctgggctggctcgcgcggaacggcacgtcgagggcgcggcgcaaggccgccgggatcctcgacaagatgaagaggtccatgcaccacccgcactactcctgctagtgctgccgccgtggctgtgtgtgatcagggggggaataagggtggtgtgtgttgtgttggactgctcgttgctttcgcgctgtatatatatatatatatatatatatatatatttcagcctgcgtatatagctctatactcttggtctctgtggtttggtacatatatgagggtacattttttttccgtctcgcggagtaagtggtggtggtttccccctctggaacgttcttgttcgtctgaaatttgcacttgatatgtttcttcagggtctttgcatgcacatggtcctgatgcgtatctggtgccgtatatggatttttatttttgtttgtttggtcacattatatgggtggtgtttcctgtg

SEQ ID NO: 54702 - DNA, 1503 bp, Zea Mays
ctgcaacacgagacccggattttatgacgtatgatcgtcgtttcattcaagaatggttaagcgctggaaaccggacatgcccacagactcaacaagtcctttcgaacacaattatcaccccgaaccaccttgtgagaagcatgatctcacagtggtgcacagacaacgggatcactctgccaccggttgagaaccaagatgaagatctggttacaaacaatgagcgggagacatttcgtaaactgtttgagaggatcgtatcgtcgtcgtcagacctgtctgagcagagggaagccattaaagagctcaggctgcggactaagtgcaacagttcactaagagcagcgataggagagagaccggattcaatctcgcagatgatttccgtagcgtccagcccagagctagaaaacagtgcagaagttgtggaggatacggtgacagctatccttaatctctctatccacgagagcaacaagaagatcattggagacgacccactggcagtcccgttcctgatcaaggccttacagtcaggaaccatggaggcccggagcaacgccgccgccgccatcttcagcctatccgcgctggacggcaacaaggcgaggatcggcgagctcggcgcgatgaggccgctggtggagctcctcgagcacggcagcacggcagcgaggaaagacgcggcctcggccatcttcaacctgtgcacgctgcacgagaacaagtcgcgggccaccaagagcggggccgtcgacgtgacgctgagggccgtcgcctgcgccggggacggctctggctccggctcgctggtggacgagtctctggccgtcctcgcgctgctgtcgggcgaccacgaggcggtggaggaggtcggcgagacgggcggcgtggcctccatgctccacgtcgtgaaggacgacccgtgcaagcgcaacaaggagaacgcggcggccgtgctcttcgcggtctgcgtgtacgaccgcaccaggctgcgggaggtcgccgagcacgagaagctgaacgggtccctgggctggctcgcgcggaacggcacgtcgagggcgcggcgcaaggccgccgggatcctcgacaagatgaagaggtccatgcaccacccgcactactcctgctagtgctgccgccgtggctgtgtgtgatcagggggggaataagggtggtgtgtgttgtgttggactgctcgttgctttcgcgctgtatatatatatatatatatatatatatatatttcagcctgcgtatatagctctatactcttggtctctgtggtttggtacatatatgagggtacattttttttccgtctcgcggagtaagtggtggtggtttccccctctggaacgttcttgttcgtctgaaatttgcacttgatatgtttcttcagggtctttgcatgcacatggtcctgatgcgtatctggtgccgtatatggatttttatttttgtttgtttggtcacattatatgggtggtgtttcctgtg

SEQ ID NO: 54703 - DNA, 1565 bp, Zea Mays
aaaaaattccgtctactagttttttacttttccatttgttacaactttctctttcggcgatactgttgcttttgtcgatcgattattgacgtatgatcgtcgtttcattcaagaatggttaagcgctggaaaccggacatgcccacagactcaacaagtcctttcgaacacaattatcaccccgaaccaccttgtgagaagcatgatctcacagtggtgcacagacaacgggatcactctgccaccggttgagaaccaagatgaagatctggttacaaacaatgagcgggagacatttcgtaaactgtttgagaggatcgtatcgtcgtcgtcagacctgtctgagcagagggaagccattaaagagctcaggctgcggactaagtgcaacagttcactaagagcagcgataggagagagaccggattcaatctcgcagatgatttccgtagcgtccagcccagagctagaaaacagtgcagaagttgtggaggatacggtgacagctatccttaatctctctatccacgagagcaacaagaagatcattggagacgacccactggcagtcccgttcctgatcaaggccttacagtcaggaaccatggaggcccggagcaacgccgccgccgccatcttcagcctatccgcgctggacggcaacaaggcgaggatcggcgagctcggcgcgatgaggccgctggtggagctcctcgagcacggcagcacggcagcgaggaaagacgcggcctcggccatcttcaacctgtgcacgctgcacgagaacaagtcgcgggccaccaagagcggggccgtcgacgtgacgctgagggccgtcgcctgcgccggggacggctctggctccggctcgctggtggacgagtctctggccgtcctcgcgctgctgtcgggcgaccacgaggcggtggaggaggtcggcgagacgggcggcgtggcctccatgctccacgtcgtgaaggacgacccgtgcaagcgcaacaaggagaacgcggcggccgtgctcttcgcggtctgcgtgtacgaccgcaccaggctgcgggaggtcgccgagcacgagaagctgaacgggtccctgggctggctcgcgcggaacggcacgtcgagggcgcggcgcaaggccgccgggatcctcgacaagatgaagaggtccatgcaccacccgcactactcctgctagtgctgccgccgtggctgtgtgtgatcagggggggaataagggtggtgtgtgttgtgttggactgctcgttgctttcgcgctgtatatatatatatatatatatatatatatatttcagcctgcgtatatagctctatactcttggtctctgtggtttggtacatatatgagggtacattttttttccgtctcgcggagtaagtggtggtggtttccccctctggaacgttcttgttcgtctgaaatttgcacttgatatgtttcttcagggtctttgcatgcacatggtcctgatgcgtatctggtgccgtatatggatttttatttttgtttgtttggtcacattatatgggtggtgtttcctgtg

SEQ ID NO: 54704 - DNA, 1824 bp, Zea Mays
tctctctcccctccctcctctccaccgccaccgcttcatccccttcatctccacctcctacgaggcggccgccgcctccatgctcggccgcgaccgcagggcctcagctctagcagcgttcaatactgtaggctagcggagaggtgggggatggcgaagccgacgccttcgacgaggctgcagaggcgctcgccaagctcagggacgccgagcttggcccccgcaaggacaggaccggcgacggccgggagaacaagcgcagcacggaggccgccgtgccggagcacttcctttgccccatctcctcagagatcatgagggatcccgtcgtcctcgcctccggccagacgtatgatcgtcgtttcattcaagaatggttaagcgctggaaaccggacatgcccacagactcaacaagtcctttcgaacacaattatcaccccgaaccaccttgtgagaagcatgatctcacagtggtgcacagacaacgggatcactctgccaccggttgagaaccaagatgaagatctggttacaaacaatgagcgggagacatttcgtaaactgtttgagaggatcgtatcgtcgtcgtcagacctgtctgagcagagggaagccattaaagagctcaggctgcggactaagtgcaacagttcactaagagcagcgataggagagagaccggattcaatctcgcagatgatttccgtagcgtccagcccagagctagaaaacagtgcagaagttgtggaggatacggtgacagctatccttaatctctctatccacgagagcaacaagaagatcattggagacgacccactggcagtcccgttcctgatcaaggccttacagtcaggaaccatggaggcccggagcaacgccgccgccgccatcttcagcctatccgcgctggacggcaacaaggcgaggatcggcgagctcggcgcgatgaggccgctggtggagctcctcgagcacggcagcacggcagcgaggaaagacgcggcctcggccatcttcaacctgtgcacgctgcacgagaacaagtcgcgggccaccaagagcggggccgtcgacgtgacgctgagggccgtcgcctgcgccggggacggctctggctccggctcgctggtggacgagtctctggccgtcctcgcgctgctgtcgggcgaccacgaggcggtggaggaggtcggcgagacgggcggcgtggcctccatgctccacgtcgtgaaggacgacccgtgcaagcgcaacaaggagaacgcggcggccgtgctcttcgcggtctgcgtgtacgaccgcaccaggctgcgggaggtcgccgagcacgagaagctgaacgggtccctgggctggctcgcgcggaacggcacgtcgagggcgcggcgcaaggccgccgggatcctcgacaagatgaagaggtccatgcaccacccgcactactcctgctagtgctgccgccgtggctgtgtgtgatcagggggggaataagggtggtgtgtgttgtgttggactgctcgttgctttcgcgctgtatatatatatatatatatatatatatatatttcagcctgcgtatatagctctatactcttggtctctgtggtttggtacatatatgagggtacattttttttccgtctcgcggagtaagtggtggtggtttccccctctggaacgttcttgttcgtctgaaatttgcacttgatatgtttcttcagggtctttgcatgcacatggtcctgatgcgtatctggtgccgtatatggatttttatttttgtttgtttggtcacattatatgggtggtgtttcctgtg

SEQ ID NO: 54705 - DNA, 1846 bp, Zea Mays
catccgccagccctcctggccccattcctctctctcccctccctcctctccaccgccaccgcttcatccccttcatctccacctcctacgaggcggccgccgcctccatgctcggccgcgaccgcagggcctcagctctagcagcgttcaatactgtaggctagcggagaggtgggggatggcgaagccttcgacgaggctgcagaggcgctcgccaagctcagggacgccgagcttggcccccgcaaggacaggaccggcgacggccgggagaacaagcgcagcacggaggccgccgtgccggagcacttcctttgccccatctcctcagagatcatgagggatcccgtcgtcctcgcctccggccagacgtatgatcgtcgtttcattcaagaatggttaagcgctggaaaccggacatgcccacagactcaacaagtcctttcgaacacaattatcaccccgaaccaccttgtgagaagcatgatctcacagtggtgcacagacaacgggatcactctgccaccggttgagaaccaagatgaagatctggttacaaacaatgagcgggagacatttcgtaaactgtttgagaggatcgtatcgtcgtcgtcagacctgtctgagcagagggaagccattaaagagctcaggctgcggactaagtgcaacagttcactaagagcagcgataggagagagaccggattcaatctcgcagatgatttccgtagcgtccagcccagagctagaaaacagtgcagaagttgtggaggatacggtgacagctatccttaatctctctatccacgagagcaacaagaagatcattggagacgacccactggcagtcccgttcctgatcaaggccttacagtcaggaaccatggaggcccggagcaacgccgccgccgccatcttcagcctatccgcgctggacggcaacaaggcgaggatcggcgagctcggcgcgatgaggccgctggtggagctcctcgagcacggcagcacggcagcgaggaaagacgcggcctcggccatcttcaacctgtgcacgctgcacgagaacaagtcgcgggccaccaagagcggggccgtcgacgtgacgctgagggccgtcgcctgcgccggggacggctctggctccggctcgctggtggacgagtctctggccgtcctcgcgctgctgtcgggcgaccacgaggcggtggaggaggtcggcgagacgggcggcgtggcctccatgctccacgtcgtgaaggacgacccgtgcaagcgcaacaaggagaacgcggcggccgtgctcttcgcggtctgcgtgtacgaccgcaccaggctgcgggaggtcgccgagcacgagaagctgaacgggtccctgggctggctcgcgcggaacggcacgtcgagggcgcggcgcaaggccgccgggatcctcgacaagatgaagaggtccatgcaccacccgcactactcctgctagtgctgccgccgtggctgtgtgtgatcagggggggaataagggtggtgtgtgttgtgttggactgctcgttgctttcgcgctgtatatatatatatatatatatatatatatatttcagcctgcgtatatagctctatactcttggtctctgtggtttggtacatatatgagggtacattttttttccgtctcgcggagtaagtggtggtggtttccccctctggaacgttcttgttcgtctgaaatttgcacttgatatgtttcttcagggtctttgcatgcacatggtcctgatgcgtatctggtgccgtatatggatttttatttttgtttgtttggtcacattatatgggtggtgtttcctgtg

SEQ ID NO: 54706 - DNA, 2031 bp, Zea Mays
aacccaccagcacacccatccgccagccctcctggccccattcctctctctcccctccctcctctccaccgccaccgcttcatccccttcatctccacctcctacgaggcggccgccgcctccatgctcggccgcgaccgcagggcctcagctctagcagcgttcaatactgtaggctagcggagaggtgggggatggcgaagccgacgccggtggcctcggcagaggaggcggcggcgatgcggcgccggctgaggcgcctggtggccgcggtggcggccgggagcgccgacgccgaggccttcgacgaggctgcagaggcgctcgccaagctcagggacgccgagcttggcccccgcaaggacaggaccggcgacggccgggagaacaagcgcagcacggaggccgccgtgccggagcacttcctttgccccatctcctcagagatcatgagggatcccgtcgtcctcgcctccggccagcatggacaaatcatgaaaagattcagcttttatggccttggggttatgcttgcatcattccgtcagtatgatacgtatgatcgtcgtttcattcaagaatggttaagcgctggaaaccggacatgcccacagactcaacaagtcctttcgaacacaattatcaccccgaaccaccttgtgagaagcatgatctcacagtggtgcacagacaacgggatcactctgccaccggttgagaaccaagatgaagatctggttacaaacaatgagcgggagacatttcgtaaactgtttgagaggatcgtatcgtcgtcgtcagacctgtctgagcagagggaagccattaaagagctcaggctgcggactaagtgcaacagttcactaagagcagcgataggagagagaccggattcaatctcgcagatgatttccgtagcgtccagcccagagctagaaaacagtgcagaagttgtggaggatacggtgacagctatccttaatctctctatccacgagagcaacaagaagatcattggagacgacccactggcagtcccgttcctgatcaaggccttacagtcaggaaccatggaggcccggagcaacgccgccgccgccatcttcagcctatccgcgctggacggcaacaaggcgaggatcggcgagctcggcgcgatgaggccgctggtggagctcctcgagcacggcagcacggcagcgaggaaagacgcggcctcggccatcttcaacctgtgcacgctgcacgagaacaagtcgcgggccaccaagagcggggccgtcgacgtgacgctgagggccgtcgcctgcgccggggacggctctggctccggctcgctggtggacgagtctctggccgtcctcgcgctgctgtcgggcgaccacgaggcggtggaggaggtcggcgagacgggcggcgtggcctccatgctccacgtcgtgaaggacgacccgtgcaagcgcaacaaggagaacgcggcggccgtgctcttcgcggtctgcgtgtacgaccgcaccaggctgcgggaggtcgccgagcacgagaagctgaacgggtccctgggctggctcgcgcggaacggcacgtcgagggcgcggcgcaaggccgccgggatcctcgacaagatgaagaggtccatgcaccacccgcactactcctgctagtgctgccgccgtggctgtgtgtgatcagggggggaataagggtggtgtgtgttgtgttggactgctcgttgctttcgcgctgtatatatatatatatatatatatatatatatttcagcctgcgtatatagctctatactcttggtctctgtggtttggtacatatatgagggtacattttttttccgtctcgcggagtaagtggtggtggtttccccctctggaacgttcttgttcgtctgaaatttgcacttgatatgtttcttcagggtctttgcatgcacatggtcctgatgcgtatctggtgccgtatatggatttttatttttgtttgtttggtcacattatatgggtggtgtttcctgtg

SEQ ID NO: 54707 - DNA, 438 bp, Zea Mays
caccgcgcccttccacgctgttcctctctgtcgccgtcacctcggatagcggcaacagcacctccacgtccgctgcaacggtactgcttctgctgtaaatggagggagttgagatggggaagccgtactagcgagttgttcaggacgtcatagcaggggaaagcagagatcgagtaagcgcgtaggtagaaaacgcatgctgtgcgtgaaaattcacgtcaatgatctgttgtgtcccatcacctactgaagattttgtggacattgaaatgtagtgaattcatgggtaaggaatttgttagaaaattaggtattattagttttaatttaattcagaagaacagtgtaatatatgtgatgatatgtatgtgcatatatgtaccactattcgtataagcagtaaagaaaaatgaaacatgcacaagtacggaaaacaag

SEQ ID NO: 54708 - DNA, 3221 bp, Zea Mays
caattttggaggtggcttgtattagcagcataactttctggaaacttcatgttatatccttcagttccagaaacattcttctatcaactgtatcggctgcttgtttaaatctgctgttgatgaagagcgacatttggcacttgcacatcaaaactacaggtcagggaagtaccgagaggctctagagcatggtaatgtcgtttacgagaagaatccacgtcgaactgataacctcctcctccttggagctatatactatcagattcgtaattatgacatgtgcattgcaaaaaacgaggaggctcttgccatagatccacattttgctgaatgctacggcaatatggcaaatgcttggaaggagaaaggtgatattgatcttgcaattcgttactatcttactgctattcagctgcgaccaaacttctgtgatgcatggtcaaatctcgctagcgcatatacaaggaaggggagactgaatgaggcagctcaatgttgtagacaggcacttgctataaatcctcgattggttgatgcacatagtaatcttggaaatctgatgaaagctcaaggctttattcaagaggcatacagttgctacatcgaggcgttacgtattgatcctcattttgcaattgcatggtcaaaccttgctggtctgtttatggaggcaggagacctcgacaaggctttaatgtattataaggaagctgttaagcttaagccatctttcgctgatgcatatcttaatcaagggaatgtttataaggctttgggaatgcctcaagatgccattatgtgttatcaacgtgcactgcaggcacgtcctgactatgctatggcttatggtaatcttgctactatttactatgagcaaggccagcttgatatggcaattcgttgttacaatcaagctatagtctacgacccacagtttattgaagcatacaacaacatgggcaacgcacttaaagatgctggaagagtagaagaagcaatcaactgctacagatcctgccttgcactgcaagcaaaccacccgcaagcccttactaatttaggaaacatatacatggagtggaacatgataagcgctgctacttcattttacaaagcagctatatctgtgacatctggattatcttccccacttaacaacttggctgtgatatacaagcaacagggaaactatgctgatgctatcacatgttacactgaagtactccgtatagatcctacagcagctgatgcactagttaatagagggaacacattcaaagagattggcagagttaatgaagcaattcaggattatgttcaggcagcaacaatcaggccaaacatgccagaagcccatgccaacttggcctcagcatacaaggacagtgggcatgtagaaacggctataattagctacaagcaggctctccggctgcgtcctgattttcctgaggcaacctgtaatctcctgcatactctacagtgtgtctgtgactgggaaaacagagatggcatgtttcgagatgttgaagaaattattagaaggcaaataaagatgtcagtacttccaagtgttcaacctttccatgccattgcttatcctattgatccattgcttgctttggaaataagccgtaaatatgcggcccactgttccttgattgcctctcgttttgggctgccgccttttgtgcatccacctcctgttcctgtaaaagcagagggtaaacactgccgactgaaagtaggatatgtgagtagtgattttggtaatcaccccctttcccatctcatgggatcagtatttggaatgcatgatcgtgccaatatcgaggtcttttgctatgcactcagtcaaaacgatggtactgagtggaggcagcgtattcagtctgaggcagaacattttgtcgatgtttctgccatgacttccgataatatcgccaagcttatcaatcaagacaaaatacaaattttgataaatcttaatggctacacaaagggtgccaggaacgaaatttttgcaatgcagccagcacctatccaagtttcgtacatggggttccctggaacaacgggtgctgcatacatagattacttggtcacagatgagtttgtttctccatctagctatgcacatatatattcagaaaagctcgtccatttgcctcattgctattttgtcaatgactacaagcagaaaaatcgagactgtctcactccagtatgtccacacaaaagatctgattatggattacctgaggataaatttatttttgcttgcttcaatcagctttacaaaatggaccctgagatatttgacacatggtgcaatattctcaaacgtgttcccaacagcgcattatggcttttaagattcccggcagctggtgaaactagagtgagagcatatgctgctgccagaggagtaagatcagatcaaattgtattcacagacgttgccatgaaaaatgagcatatacgacgcagtgccctggcagaccttttcctggacactcccctctgcaatgcacacacaacaggcactgacatactgtgggctggtctgccaatgatcacccttccactagagaaaatggcaaccagagtagctggttccctctgcgtagctactgggcttggggaggagatgattgttagcagcatgaagaagtatgaagatagagcagtagaactagcgctgaatccggtgaagcttcaagcgctgactaacaagctcaaggaagttcgtatgacctgcccgttgtttgatacagctcgatgggtgcgcaaccttgaaagggcatactacaagatgtggaacctttactgctccagtcgccacccggagccattcaaggtggtagaggatgacaatgagtccccatttgaccgctaacgagatctcatcagcagcccggctctgtaaataaggcgagagttgtagaatatttagcatcgtgaccgctgttgctccaggtgcttgtttgccgccccctttcctgccgtgcacatcacctctgtggaggctaacttcgtagtatgtatgtactacactgcaaaagaagtcctagggttagcctattgttatcactatttagtttgctatattgtatcgcggtcgtggtttctaaaataaactgcaacctttaggagtgttgatgtgaaatctcattcttaatagcttctgtccaaaaatgagcaaaaaggacttgagtgtg

SEQ ID NO: 54709 - DNA, 3655 bp, Zea Mays
gccgtgcgtccccgaagttccgagtccccattcggtcccccccctctgctctctcgaagcctccaggctccagaacccccaccccctctcctctcgcgccgcgaggggttgatccgtccggcgatctgggccctccggccggcgcccgcgcctgggaggcttttccttacccgccgcacgggcggagatgctctcgctccaacagcagcacggcggcgctgtcgccgccggcggcgatgcgcgccaccacgcaccgcagccgtcggtgctcggtggaggcgcggactggctagtgttcgggggccgcgccgacctggaggagcccgcgaggaatgccccgtcgcccgccttgttccttcttccgcccgcggggctcgatgacagggcggcccagcccgagcccaatcccaagcccgcacagctcgcaggagctgttgatgaagagcgacatttggcacttgcacatcaaaactacaggtcagggaagtaccgagaggctctagagcatggtaatgtcgtttacgagaagaatccacgtcgaactgataacctcctcctccttggagctatatactatcagattcgtaattatgacatgtgcattgcaaaaaacgaggaggctcttgccatagatccacattttgctgaatgctacggcaatatggcaaatgcttggaaggagaaaggtgatattgatcttgcaattcgttactatcttactgctattcagctgcgaccaaacttctgtgatgcatggtcaaatctcgctagcgcatatacaaggaaggggagactgaatgaggcagctcaatgttgtagacaggcacttgctataaatcctcgattggttgatgcacatagtaatcttggaaatctgatgaaagctcaaggctttattcaagaggcatacagttgctacatcgaggcgttacgtattgatcctcattttgcaattgcatggtcaaaccttgctggtctgtttatggaggcaggagacctcgacaaggctttaatgtattataaggaagctgttaagcttaagccatctttcgctgatgcatatcttaatcaagggaatgtttataaggctttgggaatgcctcaagatgccattatgtgttatcaacgtgcactgcaggcacgtcctgactatgctatggcttatgatactcatctcgggtgagatgcgaacaagcttacaagagaatggtcctttctttaccttcaaagtagagccttagtatacctcgtaatacaaaggtaggggaacattttcatgcaggtaatcttgctactatttactatgagcaaggccagcttgatatggcaattcgttgttacaatcaagctatagtctacgacccacagtttattgaagcatacaacaacatgggcaacgcacttaaagatgctggaagagtagaagaagcaatcaactgctacagatcctgccttgcactgcaagcaaaccacccgcaagcccttactaatttaggaaacatatacatggagtggaacatgataagcgctgctacttcattttacaaagcagctatatctgtgacatctggattatcttccccacttaacaacttggctgtgatatacaagcaacagggaaactatgctgatgctatcacatgttacactgaagtactccgtatagatcctacagcagctgatgcactagttaatagagggaacacattcaaagagattggcagagttaatgaagcaattcaggattatgttcaggcagcaacaatcaggccaaacatgccagaagcccatgccaacttggcctcagcatacaaggacagtgggcatgtagaaacggctataattagctacaagcaggctctccggctgcgtcctgattttcctgaggcaacctgtaatctcctgcatactctacagtgtgtctgtgactgggaaaacagagatggcatgtttcgagatgttgaagaaattattagaaggcaaataaagatgtcagtacttccaagtgttcaacctttccatgccattgcttatcctattgatccattgcttgctttggaaataagccgtaaatatgcggcccactgttccttgattgcctctcgttttgggctgccgccttttgtgcatccacctcctgttcctgtaaaagcagagggtaaacactgccgactgaaagtaggatatgtgagtagtgattttggtaatcaccccctttcccatctcatgggatcagtatttggaatgcatgatcgtgccaatatcgaggtcttttgctatgcactcagtcaaaacgatggtactgagtggaggcagcgtattcagtctgaggcagaacattttgtcgatgtttctgccatgacttccgataatatcgccaagcttatcaatcaagacaaaatacaaattttgataaatcttaatggctacacaaagggtgccaggaacgaaatttttgcaatgcagccagcacctatccaagtttcgtacatggggttccctggaacaacgggtgctgcatacatagattacttggtcacagatgagtttgtttctccatctagctatgcacatatatattcagaaaagctcgtccatttgcctcattgctattttgtcaatgactacaagcagaaaaatcgagactgtctcactccagtatgtccacacaaaagatctgattatggattacctgaggataaatttatttttgcttgcttcaatcagctttacaaaatggaccctgagatatttgacacatggtgcaatattctcaaacgtgttcccaacagcgcattatggcttttaagattcccggcagctggtgaaactagagtgagagcatatgctgctgccagaggagtaagatcagatcaaattgtattcacagacgttgccatgaaaaatgagcatatacgacgcagtgccctggcagaccttttcctggacactcccctctgcaatgcacacacaacaggcactgacatactgtgggctggtctgccaatgatcacccttccactagagaaaatggcaaccagagtagctggttccctctgcgtagctactgggcttggggaggagatgattgttagcagcatgaagaagtatgaagatagagcagtagaactagcgctgaatccggtgaagcttcaagcgctgactaacaagctcaaggaagttcgtatgacctgcccgttgtttgatacagctcgatgggtgcgcaaccttgaaagggcatactacaagatgtggaacctttactgctccagtcgccacccggagccattcaaggtggtagaggatgacaatgagtccccatttgaccgctaacgagatctcatcagcagcccggctctgtaaataaggcgagagttgtagaatatttagcatcgtgaccgctgttgctccaggtgcttgtttgccgccccctttcctgccgtgcacatcacctctgtggaggctaacttcgtagtatgtatgtactacactgcaaaagaagtcctagggttagcctattgttatcactatttagtttgctatattgtatcgcggtcgtggtttctaaaataaactgcaacctttaggagtgttgatgtgaaatctcattcttaatagcttctgtccaaaaatgagcaaaaaggacttgagtgtg

SEQ ID NO: 54710 - DNA, 3667 bp, Zea Mays
caagttgcttccgaacagtgacaaaaggccgaaacaaacagcccatctctctcctcatataaaattcgaagcatcctgccgtgcgtccccgaagttccgagtccccattcggtcccccccctctgctctctcgaagcctccaggctccagaacccccaccccctctcctctcgcgccgcgaggggttgatccgtccggcgatctgggccctccggccggcgcccgcgcctgggaggcttttccttacccgccgcacgggcggagatgctctcgctccaacagcagcacggcggcgctgtcgccgccggcggcgatgcgcgccaccacgcaccgcagccgtcggtgctcggtggaggcgcggactggctagtgttcgggggccgcgccgacctggaggagcccgcgaggaatgccccgtcgcccgccttgttccttcttccgcccgcggggctcgatgacagggcggcccagcccgagcccaatcccaagcccgcacagctcgcaggaggcgatcgtgccgactgtttcgactttggactgggagaagtgggcacaaaagctgttgatgaagagcgacatttggcacttgcacatcaaaactacaggtcagggaagtaccgagaggctctagagcatggtaatgtcgtttacgagaagaatccacgtcgaactgataacctcctcctccttggagctatatactatcagattcgtaattatgacatgtgcattgcaaaaaacgaggaggctcttgccatagatccacattttgctgaatgctacggcaatatggcaaatgcttggaaggagaaaggtgatattgatcttgcaattcgttactatcttactgctattcagctgcgaccaaacttctgtgatgcatggtcaaatctcgctagcgcatatacaaggaaggggagactgaatgaggcagctcaatgttgtagacaggcacttgctataaatcctcgattggttgatgcacatagtaatcttggaaatctgatgaaagctcaaggctttattcaagaggcatacagttgctacatcgaggcgttacgtattgatcctcattttgcaattgcatggtcaaaccttgctggtctgtttatggaggcaggagacctcgacaaggctttaatgtattataaggaagctgttaagcttaagccatctttcgctgatgcatatcttaatcaagggaatgtttataaggctttgggaatgcctcaagatgccattatgtgttatcaacgtgcactgcaggcacgtcctgactatgctatggcttatggtaatcttgctactatttactatgagcaaggccagcttgatatggcaattcgttgttacaatcaagctatagtctacgacccacagtttattgaagcatacaacaacatgggcaacgcacttaaagatgctggaagagtagaagaagcaatcaactgctacagatcctgccttgcactgcaagcaaaccacccgcaagcccttactaatttaggaaacatatacatggagtggaacatgataagcgctgctacttcattttacaaagcagctatatctgtgacatctggattatcttccccacttaacaacttggctgtgatatacaagcaacagggaaactatgctgatgctatcacatgttacactgaagtactccgtatagatcctacagcagctgatgcactagttaatagagggaacacattcaaagagattggcagagttaatgaagcaattcaggattatgttcaggcagcaacaatcaggccaaacatgccagaagcccatgccaacttggcctcagcatacaaggacagtgggcatgtagaaacggctataattagctacaagcaggctctccggctgcgtcctgattttcctgaggcaacctgtaatctcctgcatactctacagtgtgtctgtgactgggaaaacagagatggcatgtttcgagatgttgaagaaattattagaaggcaaataaagatgtcagtacttccaagtgttcaacctttccatgccattgcttatcctattgatccattgcttgctttggaaataagccgtaaatatgcggcccactgttccttgattgcctctcgttttgggctgccgccttttgtgcatccacctcctgttcctgtaaaagcagagggtaaacactgccgactgaaagtaggatatgtgagtagtgattttggtaatcaccccctttcccatctcatgggatcagtatttggaatgcatgatcgtgccaatatcgaggtcttttgctatgcactcagtcaaaacgatggtactgagtggaggcagcgtattcagtctgaggcagaacattttgtcgatgtttctgccatgacttccgataatatcgccaagcttatcaatcaagacaaaatacaaattttgataaatcttaatggctacacaaagggtgccaggaacgaaatttttgcaatgcagccagcacctatccaagtttcgtacatggggttccctggaacaacgggtgctgcatacatagattacttggtcacagatgagtttgtttctccatctagctatgcacatatatattcagaaaagctcgtccatttgcctcattgctattttgtcaatgactacaagcagaaaaatcgagactgtctcactccagtatgtccacacaaaagatctgattatggattacctgaggataaatttatttttgcttgcttcaatcagctttacaaaatggaccctgagatatttgacacatggtgcaatattctcaaacgtgttcccaacagcgcattatggcttttaagattcccggcagctggtgaaactagagtgagagcatatgctgctgccagaggagtaagatcagatcaaattgtattcacagacgttgccatgaaaaatgagcatatacgacgcagtgccctggcagaccttttcctggacactcccctctgcaatgcacacacaacaggcactgacatactgtgggctggtctgccaatgatcacccttccactagagaaaatggcaaccagagtagctggttccctctgcgtagctactgggcttggggaggagatgattgttagcagcatgaagaagtatgaagatagagcagtagaactagcgctgaatccggtgaagcttcaagcgctgactaacaagctcaaggaagttcgtatgacctgcccgttgtttgatacagctcgatgggtgcgcaaccttgaaagggcatactacaagatgtggaacctttactgctccagtcgccacccggagccattcaaggtggtagaggatgacaatgagtccccatttgaccgctaacgagatctcatcagcagcccggctctgtaaataaggcgagagttgtagaatatttagcatcgtgaccgctgttgctccaggtgcttgtttgccgccccctttcctgccgtgcacatcacctctgtggaggctaacttcgtagtatgtatgtactacactgcaaaagaagtcctagggttagcctattgttatcactatttagtttgctatattgtatcgcggtcgtggtttctaaaataaactgcaacctttaggagtgttgatgtgaaatctcattcttaatagcttctgtccaaaaatgagcaaaaaggacttgagtgtg

SEQ ID NO: 54711 - DNA, 3616 bp, Zea Mays
caagttgcttccgaacagtgacaaaaggccgaaacaaacagcccatctctctcctcatataaaattcgaagcatcctgccgtgcgtccccgaagttccgagtccccattcggtcccccccctctgctctctcgaagcctccaggctccagaacccccaccccctctcctctcgcgccgcgaggggttgatccgtccggcgatctgggccctccggccggcgcccgcgcctgggaggcttttccttacccgccgcacgggcggagatgctctcgctccaacagcagcacggcggcgctgtcgccgccggcggcgatgcgcgccaccacgcaccgcagccgtcggtgctcggtggaggcgcggactggctagtgttcgggggccgcgccgacctggaggagcccgcgaggaatgccccgtcgcccgccttgttccttcttccgcccgcggggctcgatgacagggcggcccagcccgagcccaatcccaagcccgcacagctcgcaggagctgttgatgaagagcgacatttggcacttgcacatcaaaactacaggtcagggaagtaccgagaggctctagagcatggtaatgtcgtttacgagaagaatccacgtcgaactgataacctcctcctccttggagctatatactatcagattcgtaattatgacatgtgcattgcaaaaaacgaggaggctcttgccatagatccacattttgctgaatgctacggcaatatggcaaatgcttggaaggagaaaggtgatattgatcttgcaattcgttactatcttactgctattcagctgcgaccaaacttctgtgatgcatggtcaaatctcgctagcgcatatacaaggaaggggagactgaatgaggcagctcaatgttgtagacaggcacttgctataaatcctcgattggttgatgcacatagtaatcttggaaatctgatgaaagctcaaggctttattcaagaggcatacagttgctacatcgaggcgttacgtattgatcctcattttgcaattgcatggtcaaaccttgctggtctgtttatggaggcaggagacctcgacaaggctttaatgtattataaggaagctgttaagcttaagccatctttcgctgatgcatatcttaatcaagggaatgtttataaggctttgggaatgcctcaagatgccattatgtgttatcaacgtgcactgcaggcacgtcctgactatgctatggcttatggtaatcttgctactatttactatgagcaaggccagcttgatatggcaattcgttgttacaatcaagctatagtctacgacccacagtttattgaagcatacaacaacatgggcaacgcacttaaagatgctggaagagtagaagaagcaatcaactgctacagatcctgccttgcactgcaagcaaaccacccgcaagcccttactaatttaggaaacatatacatggagtggaacatgataagcgctgctacttcattttacaaagcagctatatctgtgacatctggattatcttccccacttaacaacttggctgtgatatacaagcaacagggaaactatgctgatgctatcacatgttacactgaagtactccgtatagatcctacagcagctgatgcactagttaatagagggaacacattcaaagagattggcagagttaatgaagcaattcaggattatgttcaggcagcaacaatcaggccaaacatgccagaagcccatgccaacttggcctcagcatacaaggacagtgggcatgtagaaacggctataattagctacaagcaggctctccggctgcgtcctgattttcctgaggcaacctgtaatctcctgcatactctacagtgtgtctgtgactgggaaaacagagatggcatgtttcgagatgttgaagaaattattagaaggcaaataaagatgtcagtacttccaagtgttcaacctttccatgccattgcttatcctattgatccattgcttgctttggaaataagccgtaaatatgcggcccactgttccttgattgcctctcgttttgggctgccgccttttgtgcatccacctcctgttcctgtaaaagcagagggtaaacactgccgactgaaagtaggatatgtgagtagtgattttggtaatcaccccctttcccatctcatgggatcagtatttggaatgcatgatcgtgccaatatcgaggtcttttgctatgcactcagtcaaaacgatggtactgagtggaggcagcgtattcagtctgaggcagaacattttgtcgatgtttctgccatgacttccgataatatcgccaagcttatcaatcaagacaaaatacaaattttgataaatcttaatggctacacaaagggtgccaggaacgaaatttttgcaatgcagccagcacctatccaagtttcgtacatggggttccctggaacaacgggtgctgcatacatagattacttggtcacagatgagtttgtttctccatctagctatgcacatatatattcagaaaagctcgtccatttgcctcattgctattttgtcaatgactacaagcagaaaaatcgagactgtctcactccagtatgtccacacaaaagatctgattatggattacctgaggataaatttatttttgcttgcttcaatcagctttacaaaatggaccctgagatatttgacacatggtgcaatattctcaaacgtgttcccaacagcgcattatggcttttaagattcccggcagctggtgaaactagagtgagagcatatgctgctgccagaggagtaagatcagatcaaattgtattcacagacgttgccatgaaaaatgagcatatacgacgcagtgccctggcagaccttttcctggacactcccctctgcaatgcacacacaacaggcactgacatactgtgggctggtctgccaatgatcacccttccactagagaaaatggcaaccagagtagctggttccctctgcgtagctactgggcttggggaggagatgattgttagcagcatgaagaagtatgaagatagagcagtagaactagcgctgaatccggtgaagcttcaagcgctgactaacaagctcaaggaagttcgtatgacctgcccgttgtttgatacagctcgatgggtgcgcaaccttgaaagggcatactacaagatgtggaacctttactgctccagtcgccacccggagccattcaaggtggtagaggatgacaatgagtccccatttgaccgctaacgagatctcatcagcagcccggctctgtaaataaggcgagagttgtagaatatttagcatcgtgaccgctgttgctccaggtgcttgtttgccgccccctttcctgccgtgcacatcacctctgtggaggctaacttcgtagtatgtatgtactacactgcaaaagaagtcctagggttagcctattgttatcactatttagtttgctatattgtatcgcggtcgtggtttctaaaataaactgcaacctttaggagtgttgatgtgaaatctcattcttaatagcttctgtccaaaaatgagcaaaaaggacttgagtgtg

SEQ ID NO: 54712 - DNA, 1264 bp, Zea Mays
gccgtgcgtccccgaagttccgagtccccattcggtcccccccctctgctctctcgaagcctccaggctccagaacccccaccccctctcctctcgcgccgcgaggggttgatccgtccggcgatctgggccctccggccggcgcccgcgcctgggaggcttttccttacccgccgcacgggcggagatgctctcgctccaacagcagcacggcggcgctgtcgccgccggcggcgatgcgcgccaccacgcaccgcagccgtcggtgctcggtggaggcgcggactggctagtgttcgggggccgcgccgacctggaggagcccgcgaggaatgccccgtcgcccgccttgttccttcttccgcccgcggggctcgatgacagggcggcccagcccgagcccaatcccaagcccgcacagctcgcaggaggcgatcgtgccgactgtttcgactttggactgggagaagtgggcacaaaagctgttgatgaagagcgacatttggcacttgcacatcaaaactacaggtcagggaagtaccgagaggctctagagcatggtaatgtcgtttacgagaagaatccacgtcgaactgataacctcctcctccttggagctatatactatcagattcgtaattatgacatgtgcattgcaaaaaacgaggaggctcttgccatagatccacattttgctgaatgctacggcaatatggcaaatgcttggaaggagaaaggtgatattgatcttgcaattcgttactatcttactgctattcagctgcgaccaaacttctgtgatgcatggtcaaatctcgctagcgcatatacaaggaaggggagactgaatgaggcagctcaatgttgtagacaggcacttgctataaatcctcgattggttgatgcacatagtaatcttggaaatctgatgaaagctcaaggctttattcaagaggcatacagttgctacatcgaggcgttacgtattgatcctcattttgcaattgcatggtcaaaccttgctggtctgtttatggaggcaggagacctcgacaaggctttaatgtattataaggaagctgttaagcttaagccatctttcgctgatgcatatcttaatcaagggaatgtttataaggctttgggaatgcctcaagatgccattatgtgttatcaacgtgcactgcaggcacgtcctgactatgctatggcttatgatactcatctcgggtgagatgcgaacaagcttacaagagaatggtcc

SEQ ID NO: 54713 - DNA, 607 bp, Zea Mays
catctagtattggcatccacctcggctccgtttgtttggcagaatttgatccgggcacaaggaataatatatcctatccttagagattttactacaaagaggacctcagatcgttagagacttcgctaacgagaatgcagcttcctacaatgctcgatctcattgtggatcaccgtcatgccagtgtactcactactctggatctcgatccatcgtttacaacaactgttgaaaaaatgatgtcattggaatgttgacacaaataacaaattggtcctccacatctaactggttacaacaattcaaccatgatcagagacgtcttcatcaaagatataaggttaagcatacctaagtggtactacatcaagctcatggtacttcaatcctgaaattcttgaagcacaggtctactacaacaaatatttggtttttgcgcgcctatcaaaagcaccatcagttttgaaccatgaatgtttccatgtaaatataaactaactgttgccctctctatgaatctgtataagttgacacaacacttgcagacacattgttgctagctcttgatcacgctggttgaatgctacttaatatatattgtagtctc

SEQ ID NO: 54714 - DNA, 2572 bp, Zea Mays
ctcccggttgtttcgtcttcctccgttttcctcctctctacgtgctttcatttcatccgtgtcggcttcctcgtttgctcggcttcagcacaaacgcttcatctagtattggcatccacctcggctccgtttgtttggtgagatacaatttcttttctccccggtcgtctgctccttctcggtgggtatctggttctagattggaaatatccaacgccctctcgctttttaaatccttcaatcttccatttgtctgcttggcactgctagattcgtttaggttttccctacagcgtgtgaatatgtcactgccttttttgcataaaatggtttggaaaatgtgcaaacttcatttttctttttttagattccacccttctaccgaaaggtcgtgttctcttgtttgtgctctccaattttgttttttctttttcctgggcttcagggttcgtttctttttcagaaaaaatgatcctttttggttgagctaagttttccttttttatcctcgtctgttttgtttttggtggacatctgatttcattcaggtgaaactgtttgcatcgaagcgcatacttcattttccttttttgtcgatacattgaggttcgaaaaggccactattttacttagctaattgattgagcgtctctgttcttcaaactttttttcaatgtttagggtttagggtttccctggttttagcttttcaagctattccttggtttttgtgctccattctaagacctgtatattgctcgtatttcatttgaccaacaaacattgaggttctaagatgccactattttactttgtgcattgactgaacgtctctattcttcaaattttccccaaagtttactgtttatgcttttccctagatttagcttttggatttaatccctggtttctctgttccattctaagatgtgtgtattgcctgcgtttcatttggccaacaaaacagtttttgtgccattttttaaagtcagaccttactcctgtccctctcccctctttattctattctctggctatctgatgtcgctccatttgtgcaacagaaaaaaaaccttgcactttctttcatcttggaatacgcttgctttcagtctccgtattgtaattgcctgctaagtgattcacaacatctggtgcaaaaagataatagagaaaataaacaaaattacataaaggctcgtagccattggctaattagtgtagttcatacttcatagccttctttgctacaagaataacctgagcaaactcattcctaaaatatatgttggaaaacgttatgtgctgaaaatacatagtgcgcaccgaacactgctattatgttcattagaaaaaggtacataccacttaaaccagttaagaatctgaaaagggtgacagcgcccaacccaacataatttgtaagtgtataggtcaactgctttgctgagtcatgtaacggagaacaactctagatttctaaaatgctttggattcgttaacaaactttgactatttgcaaataacagtgttgctattctaagaagtaatagcagtgttgcttctgattttctacctttccttgagttcttcgtctttatttttttgttcactttacccaaatgtagtttttatttcctgcccgttccgaacatttccttgtctctcattttttatatatgtctcctaagatcagttcatgcatccaacccacattaaaatcaacagacagggtatctattgataaacaaaggtaattactattgcagcttgggatcaaacagggtttacagatttgttgtattactacgggcatgtaaaaagggttaattctatgttctaaacttatttcccgacattcaggcagaatttgatccgggcacaaggaataatatatcctatccttagagattttactacaaaggtaattttcacttacttaaacatgttcttcattcacactactgccatgctaaatggtctgtgatggttacaatttcattttccgcactgaacttatatgttgtctatgctttagtttatgtttattcatgttgtttcgttgaaacatgtcgaagaggacctcagatcgttagagacttcgctaacgagaatgcagcttcctacaatgctcgatctcattgtggatcaccgtcatgccagtgtactcactactctggatctcgatccatcgtttacaacaactgttgaaaaaatgatgtcattggaatgttgacacaaataacaaattggtcctccacatctaactggttacaacaattcaaccatgatcagagacgtcttcatcaaagatataaggttaagcatacctaagtggtactacatcaagctcatggtacttcaatcctgaaattcttgaagcacagatatttggtttttgcgcgcctatcaaaagcaccatcagttttgaaccatgaatgtttccatgtaaatataaactaactgttgccctctctatgaatctgtataagttgacacaacacttgcagacacattgttgctagctcttgatcacgctggttgaatgctacttaatatatattgtagtctc

SEQ ID NO: 54715 - DNA, 2973 bp, Zea Mays
ctcactttctctcccggttgtttcgtcttcctccgttttcctcctctctacgtgctttcatttcatccgtgtcggcttcctcgtttgctcggcttcagcacaaacgcttcatctagtattggcatccacctcggctccgtttgtttggtgagatacaatttcttttctccccggtcgtctgctccttctcggtgggtatctggttctagattggaaatatccaacgccctctcgctttttaaatccttcaatcttccatttgtctgcttggcactgctagattcgtttaggttttccctacagcgtgtgaatatgtcactgccttttttgcataaaatggtttggaaaatgtgcaaacttcatttttctttttttagattccacccttctaccgaaaggtcgtgttctcttgtttgtgctctccaattttgttttttctttttcctgggcttcagggttcgtttctttttcagaaaaaatgatcctttttggttgagctaagttttccttttttatcctcgtctgttttgtttttggtggacatctgatttcattcaggtgaaactgtttgcatcgaagcgcatacttcattttccttttttgtcgatacattgaggttcgaaaaggccactattttacttagctaattgattgagcgtctctgttcttcaaactttttttcaatgtttagggtttagggtttccctggttttagcttttcaagctattccttggtttttgtgctccattctaagacctgtatattgctcgtatttcatttgaccaacaaacattgaggttctaagatgccactattttactttgtgcattgactgaacgtctctattcttcaaattttccccaaagtttactgtttatgcttttccctagatttagcttttggatttaatccctggtttctctgttccattctaagatgtgtgtattgcctgcgtttcatttggccaacaaaacagtttttgtgccattttttaaagtcagaccttactcctgtccctctcccctctttattctattctctggctatctgatgtcgctccatttgtgcaacagaaaaaaaaccttgcactttctttcatcttggaatacgcttgctttcagtctccgtattgtaattgcctgctaagtgattcacaacatctggtgcaaaaagataatagagaaaataaacaaaattacataaaggctcgtagccattggctaattagtgtagttcatacttcatagccttctttgctacaagaataacctgagcaaactcattcctaaaatatatgttggaaaacgttatgtgctgaaaatacatagtgcgcaccgaacactgctattatgttcattagaaaaaggtacataccacttaaaccagttaagaatctgaaaagggtgacagcgcccaacccaacataatttgtaagtgtataggtcaactgctttgctgagtcatgtaacggagaacaactctagatttctaaaatgctttggattcgttaacaaactttgactatttgcaaataacagtgttgctattctaagaagtaatagcagtgttgcttctgattttctacctttccttgagttcttcgtctttatttttttgttcactttacccaaatgtagtttttatttcctgcccgttccgaacatttccttgtctctcattttttatatatgtctcctaagatcagttcatgcatccaacccacattaaaatcaacagacagggtatctattgataaacaaaggtaattactattgcagcttgggatcaaacagggtttacagatttgttgtattactacgggcatgtaaaaagggttaattctatgttctaaacttatttcccgacattcaggcagaatttgatccgggcacaaggaataatatatcctatccttagagattttactacaaaggtaattttcacttacttaaacatgttcttcattcacactactgccatgctaaatggtctgtgatggttacaatttcattttccgcactgaacttatatgttgtctatgctttagtttatgtttattcatgttgtttcgttgaaacatgtcgaagaggacctcagatcgttagagacttcgctaacgagcttcctacaatgctcgatctcattgtggatcaccgtcatgccagtgtactcactactctggatctcgatccatcgtttacaacaactgttgaaaaaatgatgtcattggaatgttgacacaaataacaaattggtcctccacatctaactggttacaacaattcaaccatgatcagagacgtcttcatcaaagatataaggttaagcatacctaagtggtactacatcaagctcatggtacttcaatcctgaaattcttgaagcacaggtctactacaacaagtacaccttttcaaatttgctcctatataatcttatgtccacaattcactagcagtctaataagctagtagcatagttgtttaggcatccttgaagtgtcgcttaggtgacgcttaggcggtaagaagcagcggcaaggtgtccctctcgccttagaccagagactaaggcgtccaccttggctagtaacgtgtcgccatggcgccttgaagtttgctaaggcatcgctttgaagacgccttgaacgtcagtagggatggattaaagggttgctgcaatcaacatgatatcttccactctcccttgtcgttaatacacatcaacaaactatttggcaaaaacaactttcagtccaactaatattttcctttcttttatgcacagatatttggtttttgcgcgcctatcaaaagcaccatcagttttgaaccatgaatgtttccatgtaaatataaactaactgttgccctctctatgaatctgtataagttgacacaacacttgcagacacattgttgctagctcttgatcacgctggttgaatgctacttaatatatattgtagtctc

SEQ ID NO: 54716 - DNA, 3066 bp, Zea Mays
ctcactttctctcccggttgtttcgtcttcctccgttttcctcctctctacgtgctttcatttcatccgtgtcggcttcctcgtttgctcggcttcagcacaaacgcttcatctagtattggcatccacctcggctccgtttgtttggtgagatacaatttcttttctccccggtcgtctgctccttctcggtgggtatctggttctagattggaaatatccaacgccctctcgctttttaaatccttcaatcttccatttgtctgcttggcactgctagattcgtttaggttttccctacagcgtgtgaatatgtcactgccttttttgcataaaatggtttggaaaatgtgcaaacttcatttttctttttttagattccacccttctaccgaaaggtcgtgttctcttgtttgtgctctccaattttgttttttctttttcctgggcttcagggttcgtttctttttcagaaaaaatgatcctttttggttgagctaagttttccttttttatcctcgtctgttttgtttttggtggacatctgatttcattcaggtgaaactgtttgcatcgaagcgcatacttcattttccttttttgtcgatacattgaggttcgaaaaggccactattttacttagctaattgattgagcgtctctgttcttcaaactttttttcaatgtttagggtttagggtttccctggttttagcttttcaagctattccttggtttttgtgctccattctaagacctgtatattgctcgtatttcatttgaccaacaaacattgaggttctaagatgccactattttactttgtgcattgactgaacgtctctattcttcaaattttccccaaagtttactgtttatgcttttccctagatttagcttttggatttaatccctggtttctctgttccattctaagatgtgtgtattgcctgcgtttcatttggccaacaaaacagtttttgtgccattttttaaagtcagaccttactcctgtccctctcccctctttattctattctctggctatctgatgtcgctccatttgtgcaacagaaaaaaaaccttgcactttctttcatcttggaatacgcttgctttcagtctccgtattgtaattgcctgctaagtgattcacaacatctggtgcaaaaagataatagagaaaataaacaaaattacataaaggctcgtagccattggctaattagtgtagttcatacttcatagccttctttgctacaagaataacctgagcaaactcattcctaaaatatatgttggaaaacgttatgtgctgaaaatacatagtgcgcaccgaacactgctattatgttcattagaaaaaggtacataccacttaaaccagttaagaatctgaaaagggtgacagcgcccaacccaacataatttgtaagtgtataggtcaactgctttgctgagtcatgtaacggagaacaactctagatttctaaaatgctttggattcgttaacaaactttgactatttgcaaataacagtgttgctattctaagaagtaatagcagtgttgcttctgattttctacctttccttgagttcttcgtctttatttttttgttcactttacccaaatgtagtttttatttcctgcccgttccgaacatttccttgtctctcattttttatatatgtctcctaagatcagttcatgcatccaacccacattaaaatcaacagacagggtatctattgataaacaaaggcagaatttgatccgggcacaaggaataatatatcctatccttagagattttactacaaagaggacctcagatcgttagagacttcgctaacgagaatgcagcttcctacaatgctcgatctcattgtggatcaccgtcatgccagtgtactcactactctggatctcgatccatcgtttacaacaactgttgaaaaaatgatgtcattggaatgttgacacaaataacaaattggtcctccacatctaactggttacaacaattcaaccatgatcagagacgtcttcatcaaagatataaggtacaaaattctcccttatgtattactgctacgatcttgccatataaaatgtgtgacaagtactaagaaatcttctcaacactaatccttctaagagacagtgtatttatactagccatagtattcttattacttcagtgatatgtctttaaaaattactctttggggagatcaagcatcaaccttttctgccactgtgtttataatcaaagcaacaaccagcctatcgtcatactgcttgttggctttcttgctaaaagattcaaaggttatgatccaatcttttcagaagaacaactgcattatttgtcttaaaaaatatggtaacaaatgttctacttacaatgtaggttaagcatacctaagtggtactacatcaagctcatggtacttcaatcctgaaattcttgaagcacaggtctactacaacaagtacaccttttcaaatttgctcctatataatcttatgtccacaattcactagcagtctaataagctagtagcatagttgtttaggcatccttgaagtgtcgcttaggtgacgcttaggcggtaagaagcagcggcaaggtgtccctctcgccttagaccagagactaaggcgtccaccttggctagtaacgtgtcgccatggcgccttgaagtttgctaaggcatcgctttgaagacgccttgaacgtcagtagggatggattaaagggttgctgcaatcaacatgatatcttccactctcccttgtcgttaatacacatcaacaaactatttggcaaaaacaactttcagtccaactaatattttcctttcttttatgcacagatatttggtttttgcgcgcctatcaaaagcaccatcagttttgaaccatgaatgtttccatgtaaatataaactaactgttgccctctctatgaatctgtataagttgacacaacacttgcagacacattgttgctagctcttgatcacgctggttgaatgctacttaatatatattgtagtctc

SEQ ID NO: 54717 - DNA, 1759 bp, Zea Mays
cactatggtgaaatggtgcatgattctgaagtaaacgatattgttactccctataggacaagttataaagggatgggatttgggcatcaagaccatgaaaaaaggcgaaaatgctgtgttcaccatcccaccagagcttgcatatggtgaagatggctcaccaccagtcatccctccaaatgccacactgcaatttgatgttgagcttctgtcatgggtgtgtatcaaggacatttccaaggatggaggcatcttaaaaaaggtagtagccaagggcgataagtgggagaaccccagagatcctgatgaagttgttgttaagtatgaagcaaggcttgaggatggaacagttgtatcgaaatctgatggtgttgagttcactgtgagagatggcgtattctgccctgccatatcaaaggctgtcaagactatgaagaaaaacgagaaggcccacctcactgtcatgccacaatatggctttggtgtgaaaggtagacaggcatctggagaagaagcttctgtgcctcctaacgcgacattgcacattgatcttcaagtggtgtcctggaggacagtcactgagttaggcagtgacaaaaagatccttaagaagatccttaaggagggcgaaggctatgattgtcccaatgattgtgcagttgtccgagtgaaacttattgggaagttggaggatggtaccttgtttgtcaagaaaggtcatgatggtgaggagccatttgagttcaagactgatgaggatcaagtgattgaagggcttgacaaagcagtactcagcatgaagaaaggagaagtatccttggtcactattcctccacatcatgcctttggaactaatgaaacaactaaagatctggctacagttccaccaaactcatatgtttactacgaaatggagcttgtctcatttgataaggagaaagattcatgggacttgaagaacgttgctgagaagattgaagcagctgctaagaagaaagaagaagggaatgtgtggtttaaaattggcaagtatgccagggcttctaagagatatgaaaaggctttgagctttgtcgagtacgatagctccttcactgaagaagagaagcagctatcgaaaccacttcagataagctgcaagctcaacaatgccgcatgtaaactaagacttaatgattacaaggaagcaaaggaactgtgtaccgaggtcctggaatctgacaacacaaacgtgaaggccttgtacagaagggcacaggcacacatgcatcttgttgatcttgatttggcagaggcagatatcaagaaagctctagaaatagatcctgacaacagggatgtgaagatggggtacaagaggctaaaggagaaggtcaaggagtacaaaagaagggatgccaaattatatggcaacatgatttccaagttgagcaagcttgaagacacggaagataatggccaaatgagtcaggcagtaaacaagaagcgtgagctcttatggccactggcggaaatgcttaggagattcttcactgccgatggtagcaagggttccacgctgtggcttgtgctgaggctattgatcccggtgagtgtttatcgttgtatagatctgatgagtactacacgtatttgttggttgtgtgggttgaggacttgagggcgaagtattcacgtgtactgtactgttaaacttgacttgtctaatagttgcttccactgtctcaaaaagaaagataatcttgttttttcagttgtc

SEQ ID NO: 54718 - DNA, 1858 bp, Zea Mays
cactatggtgaaatggtgcatgattctgaagtaaacgatattgttactccctataggacaagttataaagggatgggatttgggcatcaagaccatgaaaaaaggcgaaaatgctgtgttcaccatcccaccagagcttgcatatggtgaagatggctcaccaccagtcatccctccaaatgccacactgcaatttgatgttgagcttctgtcatgggtgtgtatcaaggacatttccaaggatggaggcatcttaaaaaaggtagtagccaagggcgataagtgggagaaccccagagatcctgatgaagttgttgttaagtatgaagcaaggcttgaggatggaacagttgtatcgaaatctgatggtgttgagttcactgtgagagatggcgtattctgccctgccatatcaaaggctgtcaagactatgaagaaaaacgagaaggcccacctcactgtcatgccacaatatggctttggtgtgaaaggtagacaggcatctggagaagaagcttctgtgcctcctaacgcgacattgcacattgatcttcaagtggtgtcctggaggacagtcactgagttaggcagtgacaaaaagatccttaagaagatccttaaggagggcgaaggctatgattgtcccaatgattgtgcagttgtccgagtgaaacttattgggaagttggaggatggtaccttgtttgtcaagaaaggtcatgatggtgaggagccatttgagttcaagactgatgaggatcaagtgattgaagggcttgacaaagcagtactcagcatgaagaaaggagaagtatccttggtcactattcctccacatcatgcctttggaactaatgaaacaactaaagatctggctacagttccaccaaactcatatgtttactacgaaatggagcttgtctcatttgataaggagaaagattcatgggacttgaagaacgttgctgagaagattgaagcagctgctaagaagaaagaagaagggaatgtgtggtttaaaattggcaagtatgccagggcttctaagagatatgaaaaggctttgagctttgtcgagtacgatagctccttcactgaagaagagaagcagctatcgaaaccacttcagataagctgcaagctcaacaatgccgcatgtaaactaagacttaatgattacaaggaagcaaaggaactgtgtaccgaggtcctggaatctgacaacacaaacgtgaaggccttgtacagaagggcacaggcacacatgcatcttgttgatcttgatttggcagaggcagatatcaagaaagctctagaaatagatcctgacaacagggatgtgaagatggggtacaagaggctaaaggagaaggtcaaggagtacaaaagaagggatgccaaattatatggcaacatgatttccaagttgagcaagcttgaagacacggaagataattaaacaagaagcgtgagctcttatggccactggcggaaatgcttaggagattcttcactgccgatggtagcaagggttccacgctgtggcttgtgctgaggctattgatcccggtaatagtattggttgcagtttgtgtgggttacttcatgcacagcagtgttgaagagatagactgcatcaactgttagttgagcagggtatctgtgctcaccttctgtcctttttcaggtgagtgtttatcgttgtatagatctgatgagtactacacgtatttgttggttgtgtgggttgaggacttgagggcgaagtattcacgtgtactgtactgttaaacttgacttgtctaatagttgcttccactgtctcaaaaagaaagataatcttgttttttcagttgtc

SEQ ID NO: 54719 - DNA, 5710 bp, Zea Mays
gatatgacgtacctcatttggataacaatttgatcggcaccataagttacagaaatatgcaggaggagctagggcaaaggatgcatgtacctcatggtatcaatctgtgtttctcaacttcttccgagctctttcaggtggaatcttccattgagctgggtactgcagaagtgaaccctgtaccatctgaaaagttatctgctaactcacaagctgttagagatgatgctggagcagttgaaggtattgacatgaatggaaaacctgtccaaaaacctaagaggaaaaaacataggccaaaggtcattaaagaaggacaatcagcaaagttgcagaagcctaaaactccaaagcctcccaaagaaaatgggaatcagcctactggaaagagaaagtatgtcaggaagaagggactaagcacaccagccaaacaaattccatcagaaggtgctgatacacacactagagctaaaccaggaatagcccaaagatgtttggactttgatgtggaggaccaacatggacatttggatctggtatcacaaacccaggaaacggagatacagactggtcctggggacacacagccatcaatatctggagttgaaagaagtaatgcccaggtatcatgccattggggttggggtggtacaagcagttctattatttcagctgacccaatagttgatatacaaggattacaggcagactgcatacctaaaagagtcaattttgatttgaacaattctatggcaagtcagatgccaaccaattattctagtcgaatggacagctctggacaatttttccagtttggtttaggagaaaaagttcaaacaaatcagttactggattataattgtaatctgccagctagacgtgtctctcatctcagcagctcggtcgatcatatgcgacaccccttagccaattttgaccaatacataagcacatctcaagtttgtacagaaaattcacgcagacattatcagatgcctagtagttctagaatttcagaaaataggacagcagcttctcagtatactgaaagggtgtcaatggggggcaatttcaatcccggagcttgtataggagaaggcacggtaatcaaacaaatggcccaatgttatagacttccagaaagtccacttgtacctcccaaacataatgaaagggatgtgatgaatggaaatctaaacgagttttctgtgtataatgattacttgaatttttctagcaatagtaactaccaaactggagcagcttttggttttcatgattctccagtctattcagatgttcttgcaatgggtaaaaaaagagaacacaatgctatcagtggtcaccagatttcttttgacatcgactttgttaactcaaatagtacaaggaagttctgtattgatgaccttctttccactagctctcaaacatcttattatcctgaagcatgcaaaaggatgagaccagagaatcatagcaatcagctcaatgtaactacgggaaagctttcttcttcatcagcattttctggtagtttgaatacaaataacgtttcaactataaaccctggaattggtaccttggctgatatacaaaggttgatggcccttgagaaatcacaagcttcacaacaaatgattgactttattacgtcgcaaaacaacatggccggtgaaagtactgaacttgctcagcaaaataattctgacaaaggatttgttgctttacataataaaaagttccaaagcctcactgcgcagaacataccattgcctgacagtactgtgaaccaatcgggagaaagtaatatcttgaggaatggaatacatcaaacacaaccttgggaaattacatctaggtcgcatcactctagcgacaattttgctttgccaaataaatggtctggttacttgacagcagggaacacacagttatcaagcatcacagtaaacccatccacagaaaactatattcaaagtaatgctatttatcaatatcaatgtttagaaaacgttgtggctaaggtgccagtattgtctggaacacacaatacttccagtcaggagggccataaccacagcactgctgctactaatgagcatatcagaactacaagtgaggaagttgttagatcctttacccaacgagcaagtgaaccaaccacacatgggaactacaatctcaactcttctagagtaactgcagaagcaaactccactgagaagccaagaaaaaggggccgtccaagaaaagtagtaaaacccaatggggagccaaaagaaagaggtactaaagggaaacaaaatgttagtcatgaaaaacctacatcgcaaaaaggttcacatactgacattttgaaaactaatggtatttcttatgcttctgaaccttccactggaattactcctaggatggctattgtggagtcgaaaagctctgatcaagataaggaaattcatggaggtgtcattcctcaagctacagcaatatcagttgatcttttagatggcataattcaaaagattaagctcttaagcataagcagaccagacaatgttgtggcagagataccaaaagatgctcttgttccttatgaaggtgaatttggtgcactggttgcatttgaggggaagacaaagaaaaaccgttctcgggccaaagtgaacatcgatccagtcaccactatgatgtggaacttattaatgggaccagatatgggtgatggtgctgaagggttagacaaggataaagagaagtggcttgatgaagaaagaaaagtgttcagaggacgtgttgattcattcattgctcgtatgcatctagttcagggggacagacgtttctctcgatggaaaggatcagtcgtggactcagtcgtgggtgtatttcttacccagaatgtttcggatcatctttctagttctgctttcatggcggttgctgccaaatttcctgctaagccagaggtccctgaaaaacctgtggctgagatgtctcatactcctgaacagaaggatagttgctcttgctctggactgtttggtgattctatcaaattgcagggcaagatgttcattgaagagataagtgatgttagatcattaattactacagaagataatgaagaaagtaatagtaatgaattgattggaagctctgccgggtatggagtaaaccatgcaactggaggctgccatgtttcttataggaagtcactaactgaatcccatgaaaatgggctttcaggatctgtttttccaactaccggcttttcaagtgtagtagaaactgaagatggctcattagaggatgttatttcttctcaaaattctgctgtttcttcccagaattccccagattacctttttcacagaacggatccaataggttctagttcgttgcaaaatttcaccgaagagggctatatcatgagaaatatatccaacgggactggcagctcaactgactgctcagggtttctgccaattcaagatccaaaaggcacgcttggattgtcagaatattatggacataatcctcttctagtttcaggtgtgaacaagggtgtgttgcttgatctaaacagatcatatcagccattacatacttctatgccctatgttcagaatagcgagtctgatttcacaggtgtgtcatgtttcagccatatggataaatcattccacacaggccctaatagagtgaatctttctagtgttacacaatctgaggccagtctttaccctactgatcctttgcaacaagacgagttttcaccagtaattaaacaaaacttccaaccattatatagttcagacaaagtgtcattattcaaggagcactgttcctatggaaatgatttttcgaggaacaaaactgaagctgctattatggaaccacttgtctactcaaatcctcaagagctgtacactacctcaacagagcaaatgggtgttgaacaatttcaatcaggatgtggccaacaggacaatgatgtgagagttcagacaacatcatatgaaaggcatcagtcttcaaccttgtgtggaaaccagaactctcagttagagatcttgcaaggagttgcttcaggctcaacacagaagttcattgatactcaaaagagtccgtcagaagttcaacaaaacggatcaaaagctaagaaggtacggggtcgacctaaaacgaaaacttatgactgggacagtttacgaaaagaagtgttttctaatggtggggataaacaaagaaataatgatgcaagggatactgttgattgggaggcagttaggcaagcagaagtccgagaaatatctgaaactatcagagagagaggaatgaataacatgctagcagaacgaataaaggaattcctgaaccgattggtgacagaccatggaggtattgatcttgaatggctaagagatgttccaccggacaaagcaaaggacttccttctaagcattagagggcttggactcaaaagtgttgagtgcgttcgtctcttgacgctacatcatatggcttttccagtggacacaaatgttggtcggatatgtgtgaggcttggatgggtgccgcttcaaccattgccagagtctcttcagttgcacctattggaaatgtatgagcttcactaccaaatgattacttttggaaaggttttctgcacaaaaagtaagcctaattgcaattcatgtccattgagagctgaatgtaagcactttgctagtgcatttgcaagtgctaggcttgctcttcccgcacctgaagaaaaacgtttggctacatcggaggatccaaatgttgtagagttttgtcaccaaacatacataaattcaggggctgttggcgaacttgagtggagtgcgaactatcctaagcatgctgtttgtggtaacctgcagccgttcattgaggaaccactgagcccagaacctgaacctgaaaatgtagaggcgaaggacggtgcaatagaggatttctttaatgaagaccctgatgaaattcctactattaatcttaatattgaggagtttacacagaacttgaagaactatatgcaagcaaaccatgttgagattgagtatgctgacatgtcaaaggcattggttgccatcacccctgaagctgcttccattccaactccaaagctcaagaatgtcagtcgtcttaggacagaacaccaagtttatgaactgccagattcacaccctcttctggaaggatttgaacagagagaaccagatgatccctgtccatatcttctttccatatggaccccaggtgaaactgcacaatcaaccaatgcgcccaagacattctgtgattcaggggagactggtcaactatgtggaagtttaacatgctttagttgcaacagtttacgagaaatgcaggctcagaaagtcagaggaacactcttgataccatgccggacagcaatgagaggaagcttcccacttaatgggacatattttcaagttaatgaggtatttgctgaccattgttcaagccaaaatccaattgatgtcccacgaagttggatatgggacctcccaagacgaactgtttactttggaacctcagttcctacaatatttagaggtttaacgactgaagagatacaacaatgcttttggagagcagagagagacaaaaaaaagtgtggatagcggatgtacaaggatcctccacatttgccggc

SEQ ID NO: 54720 - DNA, 1832 bp, Zea Mays
aaaaaattgacccctgcttgcttatctcctgtacgcgggacttccttctaagcattagagggcttggactcaaaagtgttgagtgcgttcgtctcttgacgctacatcatatggcttttccagtggacacaaatgttggtcggatatgtgtgaggcttggatgggtgccgcttcaaccattgccagagtctcttcagttgcacctattggaaatgtatgagcttcactaccaaatgattacttttggaaaggttttctgcacaaaaagtaagcctaattgcaattcatgtccattgagagctgaatgtaagcactttgctagtgcatttgcaagtgctaggcttgctcttcccgcacctgaagaaaaacgtttggctacatcggaggatccaaatgttgtagagttttgtcaccaaacatacataaattcaggggctgttggcgaacttgagtggagtgcgaactatcctaagcatgctgtttgtggtaacctgcagccgttcattgaggaaccactgagcccagaacctgaacctgaaaatgtagaggcgaaggacggtgcaatagaggatttctttaatgaagaccctgatgaaattcctactattaatcttaatattgaggagtttacacagaacttgaagaactatatgcaagcaaaccatgttgagattgagtatgctgacatgtcaaaggcattggttgccatcacccctgaagctgcttccattccaactccaaagctcaagaatgtcagtcgtcttaggacagaacaccaagtttatgaactgccagattcacaccctcttctggaaggatttgaacagagagaaccagatgatccctgtccatatcttctttccatatggaccccaggtgaaactgcacaatcaaccaatgcgcccaagacattctgtgattcaggggagactggtcaactatgtggaagtttaacatgctttagttgcaacagtttacgagaaatgcaggctcagaaagtcagaggaacactcttgataccatgccggacagcaatgagaggaagcttcccacttaatgggacatattttcaagttaatgaggtatttgctgaccattgttcaagccaaaatccaattgatgtcccacgaagttggatatgggacctcccaagacgaactgtttactttggaacctcagttcctacaatatttagaggtttaacgactgaagagatacaacaatgcttttggagaggattcgtttgtgtgaggggctttgataggacagtaagggcaccaaggcccctttatgcaaggttgcattttcctgccagcaaggttgttagaggcaaaaagcctggagcggcaagcgtcgaagaataataggtacatcgaagaaatatagaggagctaacaaaacggatggatagccctaaatgagatgctgacccaataagtcgccgaatcacctccaagttctaacccaatttttgaggcgacatgacctgttaaattatgttccatctatggtaacagcttagatgttcttgtgagtcgcatattctttactctgaaattcaatatagcaaatgaaaaaaaacacagtgcatagtctagttctaattgtacctgtgagtggaatcagttgttgtacaacatgaagatgggcctatttgtacaatggtcatacatgttctttgatcatatactataaacaatgtaacctcatcggccgttatttgattgtttcaaaacaaaggaaaagccttttcaattcatgttgttctctatagttaggaatttatattactttttattttttttataaattctacaagaagcatgaacaag

SEQ ID NO: 54721 - DNA, 1822 bp, Zea Mays
gtcaaacaaactgagacagacttagggggacttccttctaagcattagagggcttggactcaaaagtgttgagtgcgttcgtctcttgacgctacatcatatggcttttccagtggacacaaatgttggtcggatatgtgtgaggcttggatgggtgccgcttcaaccattgccagagtctcttcagttgcacctattggaaatgtatgagcttcactaccaaatgattacttttggaaaggttttctgcacaaaaagtaagcctaattgcaattcatgtccattgagagctgaatgtaagcactttgctagtgcatttgcaagtgctaggcttgctcttcccgcacctgaagaaaaacgtttggctacatcggaggatccaaatgttgtagagttttgtcaccaaacatacataaattcaggggctgttggcgaacttgagtggagtgcgaactatcctaagcatgctgtttgtggtaacctgcagccgttcattgaggaaccactgagcccagaacctgaacctgaaaatgtagaggcgaaggacggtgcaatagaggatttctttaatgaagaccctgatgaaattcctactattaatcttaatattgaggagtttacacagaacttgaagaactatatgcaagcaaaccatgttgagattgagtatgctgacatgtcaaaggcattggttgccatcacccctgaagctgcttccattccaactccaaagctcaagaatgtcagtcgtcttaggacagaacaccaagtttatgaactgccagattcacaccctcttctggaaggatttgaacagagagaaccagatgatccctgtccatatcttctttccatatggaccccaggtgaaactgcacaatcaaccaatgcgcccaagacattctgtgattcaggggagactggtcaactatgtggaagtttaacatgctttagttgcaacagtttacgagaaatgcaggctcagaaagtcagaggaacactcttgataccatgccggacagcaatgagaggaagcttcccacttaatgggacatattttcaagttaatgaggtatttgctgaccattgttcaagccaaaatccaattgatgtcccacgaagttggatatgggacctcccaagacgaactgtttactttggaacctcagttcctacaatatttagaggtttaacgactgaagagatacaacaatgcttttggagaggattcgtttgtgtgaggggctttgataggacagtaagggcaccaaggcccctttatgcaaggttgcattttcctgccagcaaggttgttagaggcaaaaagcctggagcggcaagcgtcgaagaataataggtacatcgaagaaatatagaggagctaacaaaacggatggatagccctaaatgagatgctgacccaataagtcgccgaatcacctccaagttctaacccaatttttgaggcgacatgacctgttaaattatgttccatctatggtaacagcttagatgttcttgtgagtcgcatattctttactctgaaattcaatatagcaaatgaaaaaaaacacagtgcatagtctagttctaattgtacctgtgagtggaatcagttgttgtacaacatgaagatgggcctatttgtacaatggtcatacatgttctttgatcatatactataaacaatgtaacctcatcggccgttatttgattgtttcaaaacaaaggaaaagccttttcaattcatgttgttctctatagttaggaatttatattactttttattttttttataaattctacaagaagcatgaacaag

SEQ ID NO: 54722 - DNA, 1881 bp, Zea Mays
ctgaagaacaacttgcggacattctgacgatgtcactgggacattgcatggttcgctgaattcgtgacaagattggcattgtcaagggacttccttctaagcattagagggcttggactcaaaagtgttgagtgcgttcgtctcttgacgctacatcatatggcttttccagtggacacaaatgttggtcggatatgtgtgaggcttggatgggtgccgcttcaaccattgccagagtctcttcagttgcacctattggaaatgtatgagcttcactaccaaatgattacttttggaaaggttttctgcacaaaaagtaagcctaattgcaattcatgtccattgagagctgaatgtaagcactttgctagtgcatttgcaagtgctaggcttgctcttcccgcacctgaagaaaaacgtttggctacatcggaggatccaaatgttgtagagttttgtcaccaaacatacataaattcaggggctgttggcgaacttgagtggagtgcgaactatcctaagcatgctgtttgtggtaacctgcagccgttcattgaggaaccactgagcccagaacctgaacctgaaaatgtagaggcgaaggacggtgcaatagaggatttctttaatgaagaccctgatgaaattcctactattaatcttaatattgaggagtttacacagaacttgaagaactatatgcaagcaaaccatgttgagattgagtatgctgacatgtcaaaggcattggttgccatcacccctgaagctgcttccattccaactccaaagctcaagaatgtcagtcgtcttaggacagaacaccaagtttatgaactgccagattcacaccctcttctggaaggatttgaacagagagaaccagatgatccctgtccatatcttctttccatatggaccccaggtgaaactgcacaatcaaccaatgcgcccaagacattctgtgattcaggggagactggtcaactatgtggaagtttaacatgctttagttgcaacagtttacgagaaatgcaggctcagaaagtcagaggaacactcttgataccatgccggacagcaatgagaggaagcttcccacttaatgggacatattttcaagttaatgaggtatttgctgaccattgttcaagccaaaatccaattgatgtcccacgaagttggatatgggacctcccaagacgaactgtttactttggaacctcagttcctacaatatttagaggtttaacgactgaagagatacaacaatgcttttggagaggattcgtttgtgtgaggggctttgataggacagtaagggcaccaaggcccctttatgcaaggttgcattttcctgccagcaaggttgttagaggcaaaaagcctggagcggcaagcgtcgaagaataataggtacatcgaagaaatatagaggagctaacaaaacggatggatagccctaaatgagatgctgacccaataagtcgccgaatcacctccaagttctaacccaatttttgaggcgacatgacctgttaaattatgttccatctatggtaacagcttagatgttcttgtgagtcgcatattctttactctgaaattcaatatagcaaatgaaaaaaaacacagtgcatagtctagttctaattgtacctgtgagtggaatcagttgttgtacaacatgaagatgggcctatttgtacaatggtcatacatgttctttgatcatatactataaacaatgtaacctcatcggccgttatttgattgtttcaaaacaaaggaaaagccttttcaattcatgttgttctctatagttaggaatttatattactttttattttttttataaattctacaagaagcatgaacaag

SEQ ID NO: 54723 - DNA, 1842 bp, Zea Mays
cagaagctagagatcgtgcgcaaattcctacaagctactccaccaagggacttccttctaagcattagagggcttggactcaaaagtgttgagtgcgttcgtctcttgacgctacatcatatggcttttccagtggacacaaatgttggtcggatatgtgtgaggcttggatgggtgccgcttcaaccattgccagagtctcttcagttgcacctattggaaatgtatgagcttcactaccaaatgattacttttggaaaggttttctgcacaaaaagtaagcctaattgcaattcatgtccattgagagctgaatgtaagcactttgctagtgcatttgcaagtgctaggcttgctcttcccgcacctgaagaaaaacgtttggctacatcggaggatccaaatgttgtagagttttgtcaccaaacatacataaattcaggggctgttggcgaacttgagtggagtgcgaactatcctaagcatgctgtttgtggtaacctgcagccgttcattgaggaaccactgagcccagaacctgaacctgaaaatgtagaggcgaaggacggtgcaatagaggatttctttaatgaagaccctgatgaaattcctactattaatcttaatattgaggagtttacacagaacttgaagaactatatgcaagcaaaccatgttgagattgagtatgctgacatgtcaaaggcattggttgccatcacccctgaagctgcttccattccaactccaaagctcaagaatgtcagtcgtcttaggacagaacaccaagtttatgaactgccagattcacaccctcttctggaaggatttgaacagagagaaccagatgatccctgtccatatcttctttccatatggaccccaggtgaaactgcacaatcaaccaatgcgcccaagacattctgtgattcaggggagactggtcaactatgtggaagtttaacatgctttagttgcaacagtttacgagaaatgcaggctcagaaagtcagaggaacactcttgataccatgccggacagcaatgagaggaagcttcccacttaatgggacatattttcaagttaatgaggtatttgctgaccattgttcaagccaaaatccaattgatgtcccacgaagttggatatgggacctcccaagacgaactgtttactttggaacctcagttcctacaatatttagaggtttaacgactgaagagatacaacaatgcttttggagaggattcgtttgtgtgaggggctttgataggacagtaagggcaccaaggcccctttatgcaaggttgcattttcctgccagcaaggttgttagaggcaaaaagcctggagcggcaagcgtcgaagaataataggtacatcgaagaaatatagaggagctaacaaaacggatggatagccctaaatgagatgctgacccaataagtcgccgaatcacctccaagttctaacccaatttttgaggcgacatgacctgttaaattatgttccatctatggtaacagcttagatgttcttgtgagtcgcatattctttactctgaaattcaatatagcaaatgaaaaaaaacacagtgcatagtctagttctaattgtacctgtgagtggaatcagttgttgtacaacatgaagatgggcctatttgtacaatggtcatacatgttctttgatcatatactataaacaatgtaacctcatcggccgttatttgattgtttcaaaacaaaggaaaagccttttcaattcatgttgttctctatagttaggaatttatattactttttattttttttataaattctacaagaagcatgaacaag

SEQ ID NO: 54724 - DNA, 3257 bp, Zea Mays
gaaatatacacttctagcctaattgaaaaggatagttgctcttgctctggactgtttggtgattctatcaaattgcagggcaagatgttcattgaagagataagtgatgttagatcattaattactacagaagataatgaagaaagtaatagtaatgaattgattggaagctctgccgggtatggagtaaaccatgcaactggaggctgccatgtttcttataggaagtcactaactgaatcccatgaaaatgggctttcaggatctgtttttccaactaccggcttttcaagtgtagtagaaactgaagatggctcattagaggatgttatttcttctcaaaattctgctgtttcttcccagaattccccagattacctttttcacagaacggatccaataggttctagttcgttgcaaaatttcaccgaagagggctatatcatgagaaatatatccaacgggactggcagctcaactgactgctcagggtttctgccaattcaagatccaaaaggcacgcttggattgtcagaatattatggacataatcctcttctagtttcaggtgtgaacaagggtgtgttgcttgatctaaacagatcatatcagccattacatacttctatgccctatgttcagaatagcgagtctgatttcacaggtgtgtcatgtttcagccatatggataaatcattccacacaggccctaatagagtgaatctttctagtgttacacaatctgaggccagtctttaccctactgatcctttgcaacaagacgagttttcaccagtaattaaacaaaacttccaaccattatatagttcagacaaagtgtcattattcaaggagcactgttcctatggaaatgatttttcgaggaacaaaactgaagctgctattatggaaccacttgtctactcaaatcctcaagagctgtacactacctcaacagagcaaatgggtgttgaacaatttcaatcaggatgtggccaacaggacaatgatgtgagagttcagacaacatcatatgaaaggcatcagtcttcaaccttgtgtggaaaccagaactctcagttagagatcttgcaaggagttgcttcaggctcaacacagaagttcattgatactcaaaagagtccgtcagaagttcaacaaaacggatcaaaagctaagaaggtacggggtcgacctaaaacgaaaacttatgactgggacagtttacgaaaagaagtgttttctaatggtggggataaacaaagaaataatgatgcaagggatactgttgattgggaggcagttaggcaagcagaagtccgagaaatatctgaaactatcagagagagaggaatgaataacatgctagcagaacgaataaaggaattcctgaaccgattggtgacagaccatggaggtattgatcttgaatggctaagagatgttccaccggacaaagcaaaggacttccttctaagcattagagggcttggactcaaaagtgttgagtgcgttcgtctcttgacgctacatcatatggcttttccagtggacacaaatgttggtcggatatgtgtgaggcttggatgggtgccgcttcaaccattgccagagtctcttcagttgcacctattggaaatgtatgagcttcactaccaaatgattacttttggaaaggttttctgcacaaaaagtaagcctaattgcaattcatgtccattgagagctgaatgtaagcactttgctagtgcatttgcaagtgctaggcttgctcttcccgcacctgaagaaaaacgtttggctacatcggaggatccaaatgttgtagagttttgtcaccaaacatacataaattcaggggctgttggcgaacttgagtggagtgcgaactatcctaagcatgctgtttgtggtaacctgcagccgttcattgaggaaccactgagcccagaacctgaacctgaaaatgtagaggcgaaggacggtgcaatagaggatttctttaatgaagaccctgatgaaattcctactattaatcttaatattgaggagtttacacagaacttgaagaactatatgcaagcaaaccatgttgagattgagtatgctgacatgtcaaaggcattggttgccatcacccctgaagctgcttccattccaactccaaagctcaagaatgtcagtcgtcttaggacagaacaccaagtttatgaactgccagattcacaccctcttctggaaggatttgaacagagagaaccagatgatccctgtccatatcttctttccatatggaccccaggtgaaactgcacaatcaaccaatgcgcccaagacattctgtgattcaggggagactggtcaactatgtggaagtttaacatgctttagttgcaacagtttacgagaaatgcaggctcagaaagtcagaggaacactcttgataccatgccggacagcaatgagaggaagcttcccacttaatgggacatattttcaagttaatgaggtatttgctgaccattgttcaagccaaaatccaattgatgtcccacgaagttggatatgggacctcccaagacgaactgtttactttggaacctcagttcctacaatatttagaggtttaacgactgaagagatacaacaatgcttttggagagattcgtttgtgtgaggggctttgataggacagtaagggcaccaaggcccctttatgcaaggttgcattttcctgccagcaaggttgttagaggcaaaaagcctggagcggcaagcgtcgaagaataataggtacatcgaagaaatatagaggagctaacaaaacggatggatagccctaaatgagatgctgacccaataagtcgccgaatcacctccaagttctaacccaatttttgaggcgacatgacctgttaaattatgttccatctatggtaacagcttagatgttcttgtgagtcgcatattctttactctgaaattcaatatagcaaatgaaaaaaaacacagtgcatagtctagttctaattgtacctgtgagtggaatcagttgttgtacaacatgaagatgggcctatttgtacaatggtcatacatgttctttgatcatatactataaacaatgtaacctcatcggccgttatttgattgtttcaaaacaaaggaaaagccttttcaattcatgttgttctctatagttaggaatttatattactttttattttttttataaattctacaagaagcatgaacaag

SEQ ID NO: 54725 - DNA, 6125 bp, Zea Mays
gacgtacctcatttggataacaatttgatcggcaccataagttacagaaatatgcaggaggagctagggcaaaggatgcatgtacctcatggtatcaatctgtgtttctcaacttcttccgagctctttcaggtggaatcttccattgagctgggtactgcagaagtgaaccctgtaccatctgaaaagttatctgctaactcacaagctgttagagatgatgctggagcagttgaaggtattgacatgaatggaaaacctgtccaaaaacctaagaggaaaaaacataggccaaaggtcattaaagaaggacaatcagcaaagttgcagaagcctaaaactccaaagcctcccaaagaaaatgggaatcagcctactggaaagagaaagtatgtcaggaagaagggactaagcacaccagccaaacaaattccatcagaaggtgctgatacacacactagagctaaaccaggaatagcccaaagatgtttggactttgatgtggaggaccaacatggacatttggatctggtatcacaaacccaggaaacggagatacagactggtcctggggacacacagccatcaatatctggagttgaaagaagtaatgcccaggtatcatgccattggggttggggtggtacaagcagttctattatttcagctgacccaatagttgatatacaaggattacaggcagactgcatacctaaaagagtcaattttgatttgaacaattctatggcaagtcagatgccaaccaattattctagtcgaatggacagctctggacaatttttccagtttggtttaggagaaaaagttcaaacaaatcagttactggattataattgtaatctgccagctagacgtgtctctcatctcagcagctcggtcgatcatatgcgacaccccttagccaattttgaccaatacataagcacatctcaagtttgtacagaaaattcacgcagacattatcagatgcctagtagttctagaatttcagaaaataggacagcagcttctcagtatactgaaagggtgtcaatggggggcaatttcaatcccggagcttgtataggagaaggcacggtaatcaaacaaatggcccaatgttatagacttccagaaagtccacttgtacctcccaaacataatgaaagggatgtgatgaatggaaatctaaacgagttttctgtgtataatgattacttgaatttttctagcaatagtaactaccaaactggagcagcttttggttttcatgattctccagtctattcagatgttcttgcaatgggtaaaaaaagagaacacaatgctatcagtggtcaccagatttcttttgacatcgactttgttaactcaaatagtacaaggaagttctgtattgatgaccttctttccactagctctcaaacatcttattatcctgaagcatgcaaaaggatgagaccagagaatcatagcaatcagctcaatgtaactacgggaaagctttcttcttcatcagcattttctggtagtttgaatacaaataacgtttcaactataaaccctggaattggtaccttggctgatatacaaaggttgatggcccttgagaaatcacaagcttcacaacaaatgattgactttattacgtcgcaaaacaacatggccggtgaaagtactgaacttgctcagcaaaataattctgacaaaggatttgttgctttacataataaaaagttccaaagcctcactgcgcagaacataccattgcctgacagtactgtgaaccaatcgggagaaagtaatatcttgaggaatggaatacatcaaacacaaccttgggaaattacatctaggtcgcatcactctagcgacaattttgctttgccaaataaatggtctggttacttgacagcagggaacacacagttatcaagcatcacagtaaacccatccacagaaaactatattcaaagtaatgctatttatcaatatcaatgtttagaaaacgttgtggctaaggtgccagtattgtctggaacacacaatacttccagtcaggagggccataaccacagcactgctgctactaatgagcatatcagaactacaagtgaggaagttgttagatcctttacccaacgagcaagtgaaccaaccacacatgggaactacaatctcaactcttctagagtaactgcagaagcaaactccactgagaagccaagaaaaaggggccgtccaagaaaagtagtaaaacccaatggggagccaaaagaaagaggtactaaagggaaacaaaatgttagtcatgaaaaacctacatcgcaaaaaggttcacatactgacattttgaaaactaatggtatttcttatgcttctgaaccttccactggaattactcctaggatggctattgtggagtcgaaaagctctgatcaagataaggaaattcatggaggtgtcattcctcaagctacagcaatatcagttgatcttttagatggcataattcaaaagattaagctcttaagcataagcagaccagacaatgttgtggcagagataccaaaagatgctcttgttccttatgaaggtgaatttggtgcactggttgcatttgaggggaagacaaagaaaaaccgttctcgggccaaagtgaacatcgatccagtcaccactatgatgtggaacttattaatgggaccagatatgggtgatggtgctgaagggttagacaaggataaagagaagtggcttgatgaagaaagaaaagtgttcagaggacgtgttgattcattcattgctcgtatgcatctagttcagggggacagacgtttctctcgatggaaaggatcagtcgtggactcagtcgtgggtgtatttcttacccagaatgtttcggatcatctttctagttctgctttcatggcggttgctgccaaatttcctgctaagccagaggtccctgaaaaacctgtggctgagatgtctcatactcctgaacagaaggatagttgctcttgctctggactgtttggtgattctatcaaattgcagggcaagatgttcattgaagagataagtgatgttagatcattaattactacagaagataatgaagaaagtaatagtaatgaattgattggaagctctgccgggtatggagtaaaccatgcaactggaggctgccatgtttcttataggaagtcactaactgaatcccatgaaaatgggctttcaggatctgtttttccaactaccggcttttcaagtgtagtagaaactgaagatggctcattagaggatgttatttcttctcaaaattctgctgtttcttcccagaattccccagattacctttttcacagaacggatccaataggttctagttcgttgcaaaatttcaccgaagagggctatatcatgagaaatatatccaacgggactggcagctcaactgactgctcagggtttctgccaattcaagatccaaaaggcacgcttggattgtcagaatattatggacataatcctcttctagtttcaggtgtgaacaagggtgtgttgcttgatctaaacagatcatatcagccattacatacttctatgccctatgttcagaatagcgagtctgatttcacaggtgtgtcatgtttcagccatatggataaatcattccacacaggccctaatagagtgaatctttctagtgttacacaatctgaggccagtctttaccctactgatcctttgcaacaagacgagttttcaccagtaattaaacaaaacttccaaccattatatagttcagacaaagtgtcattattcaaggagcactgttcctatggaaatgatttttcgaggaacaaaactgaagctgctattatggaaccacttgtctactcaaatcctcaagagctgtacactacctcaacagagcaaatgggtgttgaacaatttcaatcaggatgtggccaacaggacaatgatgtgagagttcagacaacatcatatgaaaggcatcagtcttcaaccttgtgtggaaaccagaactctcagttagagatcttgcaaggagttgcttcaggctcaacacagaagttcattgatactcaaaagagtccgtcagaagttcaacaaaacggatcaaaagctaagaaggtacggggtcgacctaaaacgaaaacttatgactgggacagtttacgaaaagaagtgttttctaatggtggggataaacaaagaaataatgatgcaagggatactgttgattgggaggcagttaggcaagcagaagtccgagaaatatctgaaactatcagagagagaggaatgaataacatgctagcagaacgaataaaggaattcctgaaccgattggtgacagaccatggaggtattgatcttgaatggctaagagatgttccaccggacaaagcaaaggacttccttctaagcattagagggcttggactcaaaagtgttgagtgcgttcgtctcttgacgctacatcatatggcttttccagtggacacaaatgttggtcggatatgtgtgaggcttggatgggtgccgcttcaaccattgccagagtctcttcagttgcacctattggaaatgtatgagcttcactaccaaatgattacttttggaaaggttttctgcacaaaaagtaagcctaattgcaattcatgtccattgagagctgaatgtaagcactttgctagtgcatttgcaagtgctaggcttgctcttcccgcacctgaagaaaaacgtttggctacatcggaggatccaaatgttgtagagttttgtcaccaaacatacataaattcaggggctgttggcgaacttgagtggagtgcgaactatcctaagcatgctgtttgtggtaacctgcagccgttcattgaggaaccactgagcccagaacctgaacctgaaaatgtagaggcgaaggacggtgcaatagaggatttctttaatgaagaccctgatgaaattcctactattaatcttaatattgaggagtttacacagaacttgaagaactatatgcaagcaaaccatgttgagattgagtatgctgacatgtcaaaggcattggttgccatcacccctgaagctgcttccattccaactccaaagctcaagaatgtcagtcgtcttaggacagaacaccaagtttatgaactgccagattcacaccctcttctggaaggatttgaacagagagaaccagatgatccctgtccatatcttctttccatatggaccccaggtgaaactgcacaatcaaccaatgcgcccaagacattctgtgattcaggggagactggtcaactatgtggaagtttaacatgctttagttgcaacagtttacgagaaatgcaggctcagaaagtcagaggaacactcttgataccatgccggacagcaatgagaggaagcttcccacttaatgggacatattttcaagttaatgaggtttaacgactgaagagatacaacaatgcttttggagaggattcgtttgtgtgaggggctttgataggacagtaagggcaccaaggcccctttatgcaaggttgcattttcctgccagcaaggttgttagaggcaaaaagcctggagcggcaagcgtcgaagaataataggtacatcgaagaaatatagaggagctaacaaaacggatggatagccctaaatgagatgctgacccaataagtcgccgaatcacctccaagttctaacccaatttttgaggcgacatgacctgttaaattatgttccatctatggtaacagcttagatgttcttgtgagtcgcatattctttactctgaaattcaatatagcaaatgaaaaaaaacacagtgcatagtctagttctaattgtacctgtgagtggaatcagttgttgtacaacatgaagatgggcctatttgtacaatggtcatacatgttctttgatcatatactataaacaatgtaacctcatcggccgttatttgattgtttcaaaacaaaggaaaagccttttcaattcatgttgttctctatagttaggaatttatattactttttattttttttataaattctacaagaagcatgaacaag

SEQ ID NO: 54726 - DNA, 4716 bp, Zea Mays
tatgacgtacctcatttggataacaatttgatcggcaccataagttacagaaatatgcaggaggagctagggcaaaggatgcatgtacctcatggtatcaatctgtgtttctcaacttcttccgagctctttcaggtggaatcttccattgagctgggtactgcagaagtgaaccctgtaccatctgaaaagttatctgctaactcacaagctgttagagatgatgctggagcagttgaaggtattgacatgaatggaaaacctgtccaaaaacctaagaggaaaaaacataggccaaaggtcattaaagaaggacaatcagcaaagttgcagaagcctaaaactccaaagcctcccaaagaaaatgggaatcagcctactggaaagagaaagtatgtcaggaagaagggactaagcacaccagccaaacaaattccatcagaaggtgctgatacacacactagagctaaaccaggaatagcccaaagatgtttggactttgatgtggaggaccaacatggacatttggatctggtatcacaaacccaggaaacggagatacagactggtcctggggacacacagccatcaatatctggagttgaaagaagtaatgcccaggtatcatgccattggggttggggtggtacaagcagttctattatttcagctgacccaatagttgatatacaaggattacaggcagactgcatacctaaaagagtcaattttgatttgaacaattctatggcaagtcagatgccaaccaattattctagtcgaatggacagctctggacaatttttccagtttggtttaggagaaaaagttcaaacaaatcagttactggattataattgtaatctgccagctagacgtgtctctcatctcagcagctcggtcgatcatatgcgacaccccttagccaattttgaccaatacataagcacatctcaagtttgtacagaaaattcacgcagacattatcagatgcctagtagttctagaatttcagaaaataggacagcagcttctcagtatactgaaagggtgtcaatggggggcaatttcaatcccggagcttgtataggagaaggcacggtaatcaaacaaatggcccaatgttatagacttccagaaagtccacttgtacctcccaaacataatgaaagggatgtgatgaatggaaatctaaacgagttttctgtgtataatgattacttgaatttttctagcaatagtaactaccaaactggagcagcttttggttttcatgattctccagtctattcagatgttcttgcaatgggtaaaaaaagagaacacaatgctatcagtggtcaccagatttcttttgacatcgactttgttaactcaaatagtacaaggaagttctgtattgatgaccttctttccactagctctcaaacatcttattatcctgaagcatgcaaaaggatgagaccagagaatcatagcaatcagctcaatgtaactacgggaaagctttcttcttcatcagcattttctggtagtttgaatacaaataacgtttcaactataaaccctggaattggtaccttggctgatatacaaaggttgatggcccttgagaaatcacaagcttcacaacaaatgattgactttattacgtcgcaaaacaacatggccggtgaaagtactgaacttgctcagcaaaataattctgacaaaggatttgttgctttacataataaaaagttccaaagcctcactgcgcagaacataccattgcctgacagtactgtgaaccaatcgggagaaagtaatatcttgaggaatggaatacatcaaacacaaccttgggaaattacatctaggtcgcatcactctagcgacaattttgctttgccaaataaatggtctggttacttgacagcagggaacacacagttatcaagcatcacagtaaacccatccacagaaaactatattcaaagtaatgctatttatcaatatcaatgtttagaaaacgttgtggctaaggtgccagtattgtctggaacacacaatacttccagtcaggagggccataaccacagcactgctgctactaatgagcatatcagaactacaagtgaggaagttgttagatcctttacccaacgagcaagtgaaccaaccacacatgggaactacaatctcaactcttctagagtaactgcagaagcaaactccactgagaagccaagaaaaaggggccgtccaagaaaagtagtaaaacccaatggggagccaaaagaaagaggtactaaagggaaacaaaatgttagtcatgaaaaacctacatcgcaaaaaggttcacatactgacattttgaaaactaatggtatttcttatgcttctgaaccttccactggaattactcctaggatggctattgtggagtcgaaaagctctgatcaagataaggaaattcatggaggtgtcattcctcaagctacagcaatatcagttgatcttttagatggcataattcaaaagattaagctcttaagcataagcagaccagacaatgttgtggcagagataccaaaagatgctcttgttccttatgaaggtgaatttggtgcactggttgcatttgaggggaagacaaagaaaaaccgttctcgggccaaagtgaacatcgatccagtcaccactatgatgtggaacttattaatgggaccagatatgggtgatggtgctgaagggttagacaaggataaagagaagtggcttgatgaagaaagaaaagtgttcagaggacgtgttgattcattcattgctcgtatgcatctagttcagggggacagacgtttctctcgatggaaaggatcagtcgtggactcagtcgtgggtgtatttcttacccagaatgtttcggatcatctttctagggacttccttctaagcattagagggcttggactcaaaagtgttgagtgcgttcgtctcttgacgctacatcatatggcttttccagtggacacaaatgttggtcggatatgtgtgaggcttggatgggtgccgcttcaaccattgccagagtctcttcagttgcacctattggaaatgtatgagcttcactaccaaatgattacttttggaaaggttttctgcacaaaaagtaagcctaattgcaattcatgtccattgagagctgaatgtaagcactttgctagtgcatttgcaagtgctaggcttgctcttcccgcacctgaagaaaaacgtttggctacatcggaggatccaaatgttgtagagttttgtcaccaaacatacataaattcaggggctgttggcgaacttgagtggagtgcgaactatcctaagcatgctgtttgtggtaacctgcagccgttcattgaggaaccactgagcccagaacctgaacctgaaaatgtagaggcgaaggacggtgcaatagaggatttctttaatgaagaccctgatgaaattcctactattaatcttaatattgaggagtttacacagaacttgaagaactatatgcaagcaaaccatgttgagattgagtatgctgacatgtcaaaggcattggttgccatcacccctgaagctgcttccattccaactccaaagctcaagaatgtcagtcgtcttaggacagaacaccaagtttatgaactgccagattcacaccctcttctggaaggatttgaacagagagaaccagatgatccctgtccatatcttctttccatatggaccccaggtgaaactgcacaatcaaccaatgcgcccaagacattctgtgattcaggggagactggtcaactatgtggaagtttaacatgctttagttgcaacagtttacgagaaatgcaggctcagaaagtcagaggaacactcttgataccatgccggacagcaatgagaggaagcttcccacttaatgggacatattttcaagttaatgaggtatttgctgaccattgttcaagccaaaatccaattgatgtcccacgaagttggatatgggacctcccaagacgaactgtttactttggaacctcagttcctacaatatttagaggtttaacgactgaagagatacaacaatgcttttggagaggattcgtttgtgtgaggggctttgataggacagtaagggcaccaaggcccctttatgcaaggttgcattttcctgccagcaaggttgttagaggcaaaaagcctggagcggcaagcgtcgaagaataataggtacatcgaagaaatatagaggagctaacaaaacggatggatagccctaaatgagatgctgacccaataagtcgccgaatcacctccaagttctaacccaatttttgaggcgacatgacctgttaaattatgttccatctatggtaacagcttagatgttcttgtgagtcgcatattctttactctgaaattcaatatagcaaatgaaaaaaaacacagtgcatagtctagttctaattgtacctgtgagtggaatcagttgttgtacaacatgaagatgggcctatttgtacaatggtcatacatgttctttgatcatatactataaacaatgtaacctcatcggccgttatttgattgtttcaaaacaaaggaaaagccttttcaattcatgttgttctctatagttaggaatttatattactttttattttttttataaattctacaagaagcatgaacaag

SEQ ID NO: 54727 - DNA, 6578 bp, Zea Mays
cgcagcgacccaaccacctcccccccccgtccctctctctctcccttctgctggtctagttttggtttccctctcgctttccttcgctcctaggcgcggctccggcgggcggaagaggagggagaggcaggcggcggcccccggcagttcctccgtccgcggagcccagagggaggagggggaggcctggtctggggctgtccgctgaatctgcttctccgaagatcgggtggaccacgggactcggcgggcgcgcccgatctgctccgccgtcgaggtgaagtcggctgatatgacgtacctcatttggataacaatttgatcggcaccataagttacagaaatatgcaggaggagctagggcaaaggatgcatgtacctcatggtatcaatctgtgtttctcaacttcttccgagctctttcaggtggaatcttccattgagctgggtactgcagaagtgaaccctgtaccatctgaaaagttatctgctaactcacaagctgttagagatgatgctggagcagttgaaggtattgacatgaatggaaaacctgtccaaaaacctaagaggaaaaaacataggccaaaggtcattaaagaaggacaatcagcaaagttgcagaagcctaaaactccaaagcctcccaaagaaaatgggaatcagcctactggaaagagaaagtatgtcaggaagaagggactaagcacaccagccaaacaaattccatcagaaggtgctgatacacacactagagctaaaccaggaatagcccaaagatgtttggactttgatgtggaggaccaacatggacatttggatctggtatcacaaacccaggaaacggagatacagactggtcctggggacacacagccatcaatatctggagttgaaagaagtaatgcccaggtatcatgccattggggttggggtggtacaagcagttctattatttcagctgacccaatagttgatatacaaggattacaggcagactgcatacctaaaagagtcaattttgatttgaacaattctatggcaagtcagatgccaaccaattattctagtcgaatggacagctctggacaatttttccagtttggtttaggagaaaaagttcaaacaaatcagttactggattataattgtaatctgccagctagacgtgtctctcatctcagcagctcggtcgatcatatgcgacaccccttagccaattttgaccaatacataagcacatctcaagtttgtacagaaaattcacgcagacattatcagatgcctagtagttctagaatttcagaaaataggacagcagcttctcagtatactgaaagggtgtcaatggggggcaatttcaatcccggagcttgtataggagaaggcacggtaatcaaacaaatggcccaatgttatagacttccagaaagtccacttgtacctcccaaacataatgaaagggatgtgatgaatggaaatctaaacgagttttctgtgtataatgattacttgaatttttctagcaatagtaactaccaaactggagcagcttttggttttcatgattctccagtctattcagatgttcttgcaatgggtaaaaaaagagaacacaatgctatcagtggtcaccagatttcttttgacatcgactttgttaactcaaatagtacaaggaagttctgtattgatgaccttctttccactagctctcaaacatcttattatcctgaagcatgcaaaaggatgagaccagagaatcatagcaatcagctcaatgtaactacgggaaagctttcttcttcatcagcattttctggtagtttgaatacaaataacgtttcaactataaaccctggaattggtaccttggctgatatacaaaggttgatggcccttgagaaatcacaagcttcacaacaaatgattgactttattacgtcgcaaaacaacatggccggtgaaagtactgaacttgctcagcaaaataattctgacaaaggatttgttgctttacataataaaaagttccaaagcctcactgcgcagaacataccattgcctgacagtactgtgaaccaatcgggagaaagtaatatcttgaggaatggaatacatcaaacacaaccttgggaaattacatctaggtcgcatcactctagcgacaattttgctttgccaaataaatggtctggttacttgacagcagggaacacacagttatcaagcatcacagtaaacccatccacagaaaactatattcaaagtaatgctatttatcaatatcaatgtttagaaaacgttgtggctaaggtgccagtattgtctggaacacacaatacttccagtcaggagggccataaccacagcactgctgctactaatgagcatatcagaactacaagtgaggaagttgttagatcctttacccaacgagcaagtgaaccaaccacacatgggaactacaatctcaactcttctagagtaactgcagaagcaaactccactgagaagccaagaaaaaggggccgtccaagaaaagtagtaaaacccaatggggagccaaaagaaagaggtactaaagggaaacaaaatgttagtcatgaaaaacctacatcgcaaaaaggttcacatactgacattttgaaaactaatggtatttcttatgcttctgaaccttccactggaattactcctaggatggctattgtggagtcgaaaagctctgatcaagataaggaaattcatggaggtgtcattcctcaagctacagcaatatcagttgatcttttagatggcataattcaaaagattaagctcttaagcataagcagaccagacaatgttgtggcagagataccaaaagatgctcttgttccttatgaaggtgaatttggtgcactggttgcatttgaggggaagacaaagaaaaaccgttctcgggccaaagtgaacatcgatccagtcaccactatgatgtggaacttattaatgggaccagatatgggtgatggtgctgaagggttagacaaggataaagagaagtggcttgatgaagaaagaaaagtgttcagaggacgtgttgattcattcattgctcgtatgcatctagttcagggggacagacgtttctctcgatggaaaggatcagtcgtggactcagtcgtgggtgtatttcttacccagaatgtttcggatcatctttctagttctgctttcatggcggttgctgccaaatttcctgctaagccagaggtccctgaaaaacctgtggctgagatgtctcatactcctgaacagaaggatagttgctcttgctctggactgtttggtgattctatcaaattgcagggcaagatgttcattgaagagataagtgatgttagatcattaattactacagaagataatgaagaaagtaatagtaatgaattgattggaagctctgccgggtatggagtaaaccatgcaactggaggctgccatgtttcttataggaagtcactaactgaatcccatgaaaatgggctttcaggatctgtttttccaactaccggcttttcaagtgtagtagaaactgaagatggctcattagaggatgttatttcttctcaaaattctgctgtttcttcccagaattccccagattacctttttcacagaacggatccaataggttctagttcgttgcaaaatttcaccgaagagggctatatcatgagaaatatatccaacgggactggcagctcaactgactgctcagggtttctgccaattcaagatccaaaaggcacgcttggattgtcagaatattatggacataatcctcttctagtttcaggtgtgaacaagggtgtgttgcttgatctaaacagatcatatcagccattacatacttctatgccctatgttcagaatagcgagtctgatttcacaggtgtgtcatgtttcagccatatggataaatcattccacacaggccctaatagagtgaatctttctagtgttacacaatctgaggccagtctttaccctactgatcctttgcaacaagacgagttttcaccagtaattaaacaaaacttccaaccattatatagttcagacaaagtgtcattattcaaggagcactgttcctatggaaatgatttttcgaggaacaaaactgaagctgctattatggaaccacttgtctactcaaatcctcaagagctgtacactacctcaacagagcaaatgggtgttgaacaatttcaatcaggatgtggccaacaggacaatgatgtgagagttcagacaacatcatatgaaaggcatcagtcttcaaccttgtgtggaaaccagaactctcagttagagatcttgcaaggagttgcttcaggctcaacacagaagttcattgatactcaaaagagtccgtcagaagttcaacaaaacggatcaaaagctaagaaggtacggggtcgacctaaaacgaaaacttatgactgggacagtttacgaaaagaagtgttttctaatggtggggataaacaaagaaataatgatgcaagggatactgttgattgggaggcagttaggcaagcagaagtccgagaaatatctgaaactatcagagagagaggaatgaataacatgctagcagaacgaataaaggaattcctgaaccgattggtgacagaccatggaggtattgatcttgaatggctaagagatgttccaccggacaaagcaaaggacttccttctaagcattagagggcttggactcaaaagtgttgagtgcgttcgtctcttgacgctacatcatatggcttttccagtggacacaaatgttggtcggatatgtgtgaggcttggatgggtgccgcttcaaccattgccagagtctcttcagttgcacctattggaaataagtacctttggcctcgactatgcaagctagatcaacgtacattgtatgagcttcactaccaaatgattacttttggaaaggttttctgcacaaaaagtaagcctaattgcaattcatgtccattgagagctgaatgtaagcactttgctagtgcatttgcaagtgctaggcttgctcttcccgcacctgaagaaaaacgtttggctacatcggaggatccaaatgttgtagagttttgtcaccaaacatacataaattcaggggctgttggcgaacttgagtggagtgcgaactatcctaagcatgctgtttgtggtaacctgcagccgttcattgaggaaccactgagcccagaacctgaacctgaaaatgtagaggcgaaggacggtgcaatagaggatttctttaatgaagaccctgatgaaattcctactattaatcttaatattgaggagtttacacagaacttgaagaactatatgcaagcaaaccatgttgagattgagtatgctgacatgtcaaaggcattggttgccatcacccctgaagctgcttccattccaactccaaagctcaagaatgtcagtcgtcttaggacagaacaccaagtttatgaactgccagattcacaccctcttctggaaggatttgaacagagagaaccagatgatccctgtccatatcttctttccatatggaccccaggtgaaactgcacaatcaaccaatgcgcccaagacattctgtgattcaggggagactggtcaactatgtggaagtttaacatgctttagttgcaacagtttacgagaaatgcaggctcagaaagtcagaggaacactcttgataccatgccggacagcaatgagaggaagcttcccacttaatgggacatattttcaagttaatgaggtatttgctgaccattgttcaagccaaaatccaattgatgtcccacgaagttggatatgggacctcccaagacgaactgtttactttggaacctcagttcctacaatatttagaggtttaacgactgaagagatacaacaatgcttttggagaggattcgtttgtgtgaggggctttgataggacagtaagggcaccaaggcccctttatgcaaggttgcattttcctgccagcaaggttgttagaggcaaaaagcctggagcggcaagcgtcgaagaataataggtacatcgaagaaatatagaggagctaacaaaacggatggatagccctaaatgagatgctgacccaataagtcgccgaatcacctccaagttctaacccaatttttgaggcgacatgacctgttaaattatgttccatctatggtaacagcttagatgttcttgtgagtcgcatattctttactctgaaattcaatatagcaaatgaaaaaaaacacagtgcatagtctagttctaattgtacctgtgagtggaatcagttgttgtacaacatgaagatgggcctatttgtacaatggtcatacatgttctttgatcatatactataaacaatgtaacctcatcggccgttatttgattgtttcaaaacaaaggaaaagccttttcaattcatgttgttctctatagttaggaatttatattactttttattttttttataaattctacaagaagcatgaacaag

SEQ ID NO: 54728 - DNA, 6508 bp, Zea Mays
cccagagtcgcagcgacccaaccacctcccccccccgtccctctctctctcccttctgctggtctagttttggtttccctctcgctttccttcgctcctaggcgcggctccggcgggcggaagaggagggagaggcaggcggcggcccccggcagttcctccgtccgcggagcccagagggaggagggggaggcctggtctggggctgtccgctgaatctgcttctccgaagatcgggtggaccacgggactcggcgggcgcgcccgatctgctccgccgtcgaggtgaagtcggctgatatgacgtacctcatttggataacaatttgatcggcaccataagttacagaaatatgcaggaggagctagggcaaaggatgcatgtacctcatggtatcaatctgtgtttctcaacttcttccgagctctttcaggtggaatcttccattgagctgggtactgcagaagtgaaccctgtaccatctgaaaagttatctgctaactcacaagctgttagagatgatgctggagcagttgaaggtattgacatgaatggaaaacctgtccaaaaacctaagaggaaaaaacataggccaaaggtcattaaagaaggacaatcagcaaagttgcagaagcctaaaactccaaagcctcccaaagaaaatgggaatcagcctactggaaagagaaagtatgtcaggaagaagggactaagcacaccagccaaacaaattccatcagaaggtgctgatacacacactagagctaaaccaggaatagcccaaagatgtttggactttgatgtggaggaccaacatggacatttggatctggtatcacaaacccaggaaacggagatacagactggtcctggggacacacagccatcaatatctggagttgaaagaagtaatgcccaggtatcatgccattggggttggggtggtacaagcagttctattatttcagctgacccaatagttgatatacaaggattacaggcagactgcatacctaaaagagtcaattttgatttgaacaattctatggcaagtcagatgccaaccaattattctagtcgaatggacagctctggacaatttttccagtttggtttaggagaaaaagttcaaacaaatcagttactggattataattgtaatctgccagctagacgtgtctctcatctcagcagctcggtcgatcatatgcgacaccccttagccaattttgaccaatacataagcacatctcaagtttgtacagaaaattcacgcagacattatcagatgcctagtagttctagaatttcagaaaataggacagcagcttctcagtatactgaaagggtgtcaatggggggcaatttcaatcccggagcttgtataggagaaggcacggtaatcaaacaaatggcccaatgttatagacttccagaaagtccacttgtacctcccaaacataatgaaagggatgtgatgaatggaaatctaaacgagttttctgtgtataatgattacttgaatttttctagcaatagtaactaccaaactggagcagcttttggttttcatgattctccagtctattcagatgttcttgcaatgggtaaaaaaagagaacacaatgctatcagtggtcaccagatttcttttgacatcgactttgttaactcaaatagtacaaggaagttctgtattgatgaccttctttccactagctctcaaacatcttattatcctgaagcatgcaaaaggatgagaccagagaatcatagcaatcagctcaatgtaactacgggaaagctttcttcttcatcagcattttctggtagtttgaatacaaataacgtttcaactataaaccctggaattggtaccttggctgatatacaaaggttgatggcccttgagaaatcacaagcttcacaacaaatgattgactttattacgtcgcaaaacaacatggccggtgaaagtactgaacttgctcagcaaaataattctgacaaaggatttgttgctttacataataaaaagttccaaagcctcactgcgcagaacataccattgcctgacagtactgtgaaccaatcgggagaaagtaatatcttgaggaatggaatacatcaaacacaaccttgggaaattacatctaggtcgcatcactctagcgacaattttgctttgccaaataaatggtctggttacttgacagcagggaacacacagttatcaagcatcacagtaaacccatccacagaaaactatattcaaagtaatgctatttatcaatatcaatgtttagaaaacgttgtggctaaggtgccagtattgtctggaacacacaatacttccagtcaggagggccataaccacagcactgctgctactaatgagcatatcagaactacaagtgaggaagttgttagatcctttacccaacgagcaagtgaaccaaccacacatgggaactacaatctcaactcttctagagtaactgcagaagcaaactccactgagaagccaagaaaaaggggccgtccaagaaaagtagtaaaacccaatggggagccaaaagaaagaggatggctattgtggagtcgaaaagctctgatcaagataaggaaattcatggaggtgtcattcctcaagctacagcaatatcagttgatcttttagatggcataattcaaaagattaagctcttaagcataagcagaccagacaatgttgtggcagagataccaaaagatgctcttgttccttatgaaggtgaatttggtgcactggttgcatttgaggggaagacaaagaaaaaccgttctcgggccaaagtgaacatcgatccagtcaccactatgatgtggaacttattaatgggaccagatatgggtgatggtgctgaagggttagacaaggataaagagaagtggcttgatgaagaaagaaaagtgttcagaggacgtgttgattcattcattgctcgtatgcatctagttcagggggacagacgtttctctcgatggaaaggatcagtcgtggactcagtcgtgggtgtatttcttacccagaatgtttcggatcatctttctagttctgctttcatggcggttgctgccaaatttcctgctaagccagaggtccctgaaaaacctgtggctgagatgtctcatactcctgaacagaaggatagttgctcttgctctggactgtttggtgattctatcaaattgcagggcaagatgttcattgaagagataagtgatgttagatcattaattactacagaagataatgaagaaagtaatagtaatgaattgattggaagctctgccgggtatggagtaaaccatgcaactggaggctgccatgtttcttataggaagtcactaactgaatcccatgaaaatgggctttcaggatctgtttttccaactaccggcttttcaagtgtagtagaaactgaagatggctcattagaggatgttatttcttctcaaaattctgctgtttcttcccagaattccccagattacctttttcacagaacggatccaataggttctagttcgttgcaaaatttcaccgaagagggctatatcatgagaaatatatccaacgggactggcagctcaactgactgctcagggtttctgccaattcaagatccaaaaggcacgcttggattgtcagaatattatggacataatcctcttctagtttcaggtgtgaacaagggtgtgttgcttgatctaaacagatcatatcagccattacatacttctatgccctatgttcagaatagcgagtctgatttcacaggtgtgtcatgtttcagccatatggataaatcattccacacaggccctaatagagtgaatctttctagtgttacacaatctgaggccagtctttaccctactgatcctttgcaacaagacgagttttcaccagtaattaaacaaaacttccaaccattatatagttcagacaaagtgtcattattcaaggagcactgttcctatggaaatgatttttcgaggaacaaaactgaagctgctattatggaaccacttgtctactcaaatcctcaagagctgtacactacctcaacagagcaaatgggtgttgaacaatttcaatcaggatgtggccaacaggacaatgatgtgagagttcagacaacatcatatgaaaggcatcagtcttcaaccttgtgtggaaaccagaactctcagttagagatcttgcaaggagttgcttcaggctcaacacagaagttcattgatactcaaaagagtccgtcagaagttcaacaaaacggatcaaaagctaagaaggtacggggtcgacctaaaacgaaaacttatgactgggacagtttacgaaaagaagtgttttctaatggtggggataaacaaagaaataatgatgcaagggatactgttgattgggaggcagttaggcaagcagaagtccgagaaatatctgaaactatcagagagagaggaatgaataacatgctagcagaacgaataaaggaattcctgaaccgattggtgacagaccatggaggtattgatcttgaatggctaagagatgttccaccggacaaagcaaaggacttccttctaagcattagagggcttggactcaaaagtgttgagtgcgttcgtctcttgacgctacatcatatggcttttccagtggacacaaatgttggtcggatatgtgtgaggcttggatgggtgccgcttcaaccattgccagagtctcttcagttgcacctattggaaattctgatgttctgctgctgaaggtatcccatgctggagcacatacagaagtacctttggcctcgactatgcaagctagatcaacgtacattgtatgagcttcactaccaaatgattacttttggaaaggttttctgcacaaaaagtaagcctaattgcaattcatgtccattgagagctgaatgtaagcactttgctagtgcatttgcaagtgctaggcttgctcttcccgcacctgaagaaaaacgtttggctacatcggaggatccaaatgttgtagagttttgtcaccaaacatacataaattcaggggctgttggcgaacttgagtggagtgcgaactatcctaagcatgctgtttgtggtaacctgcagccgttcattgaggaaccactgagcccagaacctgaacctgaaaatgtagaggcgaaggacggtgcaatagaggatttctttaatgaagaccctgatgaaattcctactattaatcttaatattgaggagtttacacagaacttgaagaactatatgcaagcaaaccatgttgagattgagtatgctgacatgtcaaaggcattggttgccatcacccctgaagctgcttccattccaactccaaagctcaagaatgtcagtcgtcttaggacagaacaccaagtttatgaactgccagattcacaccctcttctggaaggatttgaacagagagaaccagatgatccctgtccatatcttctttccatatggaccccaggtgaaactgcacaatcaaccaatgcgcccaagacattctgtgattcaggggagactggtcaactatgtggaagtttaacatgctttagttgcaacagtttacgagaaatgcaggctcagaaagtcagaggaacactcttgataccatgccggacagcaatgagaggaagcttcccacttaatgggacatattttcaagttaatgaggtatttgctgaccattgttcaagccaaaatccaattgatgtcccacgaagttggatatgggacctcccaagacgaactgtttactttggaacctcagttcctacaatatttagaggtttaacgactgaagagatacaacaatgcttttggagaggattcgtttgtgtgaggggctttgataggacagtaagggcaccaaggcccctttatgcaaggttgcattttcctgccagcaaggttgttagaggcaaaaagcctggagcggcaagcgtcgaagaataataggtacatcgaagaaatatagaggagctaacaaaacggatggatagccctaaatgagatgctgacccaataagtcgccgaatcacctccaagttctaacccaatttttgaggcgacatgacctgttaaattatgttccatctatggtaacagcttagatgttcttgtgagtcgcatattctttactctgaaattcaatatagcaaatgaaaaaaaacacagtgcatagtctagttctaattgtacctgtgagtggaatcagttgttgtacaacatgaagatgggcctatttgtacaatggtcatacatgttctttgatcatatactataaacaatgtaacctcatcggccgttatttgattgtttcaaaacaaaggaaaagccttttcaattcatgttgttctctatagttaggaatttatattactttttattttttttataaattctacaagaagcatgaacaag

SEQ ID NO: 54729 - DNA, 6595 bp, Zea Mays
ctcacccagagtcgcagcgacccaaccacctcccccccccgtccctctctctctcccttctgctggtctagttttggtttccctctcgctttccttcgctcctaggcgcggctccggcgggcggaagaggagggagaggcaggcggcggcccccggcagttcctccgtccgcggagcccagagggaggagggggaggcctggtctggggctgtccgctgaatctgcttctccgaagatcgggtggaccacgggactcggcgggcgcgcccgatctgctccgccgtcgaggtgaagtcggctgatatgacgtacctcatttggataacaatttgatcggcaccataagttacagaaatatgcaggaggagctagggcaaaggatgcatgtacctcatggtatcaatctgtgtttctcaacttcttccgagctctttcaggtggaatcttccattgagctgggtactgcagaagtgaaccctgtaccatctgaaaagttatctgctaactcacaagctgttagagatgatgctggagcagttgaaggtattgacatgaatggaaaacctgtccaaaaacctaagaggaaaaaacataggccaaaggtcattaaagaaggacaatcagcaaagttgcagaagcctaaaactccaaagcctcccaaagaaaatgggaatcagcctactggaaagagaaagtatgtcaggaagaagggactaagcacaccagccaaacaaattccatcagaaggtgctgatacacacactagagctaaaccaggaatagcccaaagatgtttggactttgatgtggaggaccaacatggacatttggatctggtatcacaaacccaggaaacggagatacagactggtcctggggacacacagccatcaatatctggagttgaaagaagtaatgcccaggtatcatgccattggggttggggtggtacaagcagttctattatttcagctgacccaatagttgatatacaaggattacaggcagactgcatacctaaaagagtcaattttgatttgaacaattctatggcaagtcagatgccaaccaattattctagtcgaatggacagctctggacaatttttccagtttggtttaggagaaaaagttcaaacaaatcagttactggattataattgtaatctgccagctagacgtgtctctcatctcagcagctcggtcgatcatatgcgacaccccttagccaattttgaccaatacataagcacatctcaagtttgtacagaaaattcacgcagacattatcagatgcctagtagttctagaatttcagaaaataggacagcagcttctcagtatactgaaagggtgtcaatggggggcaatttcaatcccggagcttgtataggagaaggcacggtaatcaaacaaatggcccaatgttatagacttccagaaagtccacttgtacctcccaaacataatgaaagggatgtgatgaatggaaatctaaacgagttttctgtgtataatgattacttgaatttttctagcaatagtaactaccaaactggagcagcttttggttttcatgattctccagtctattcagatgttcttgcaatgggtaaaaaaagagaacacaatgctatcagtggtcaccagatttcttttgacatcgactttgttaactcaaatagtacaaggaagttctgtattgatgaccttctttccactagctctcaaacatcttattatcctgaagcatgcaaaaggatgagaccagagaatcatagcaatcagctcaatgtaactacgggaaagctttcttcttcatcagcattttctggtagtttgaatacaaataacgtttcaactataaaccctggaattggtaccttggctgatatacaaaggttgatggcccttgagaaatcacaagcttcacaacaaatgattgactttattacgtcgcaaaacaacatggccggtgaaagtactgaacttgctcagcaaaataattctgacaaaggatttgttgctttacataataaaaagttccaaagcctcactgcgcagaacataccattgcctgacagtactgtgaaccaatcgggagaaagtaatatcttgaggaatggaatacatcaaacacaaccttgggaaattacatctaggtcgcatcactctagcgacaattttgctttgccaaataaatggtctggttacttgacagcagggaacacacagttatcaagcatcacagtaaacccatccacagaaaactatattcaaagtaatgctatttatcaatatcaatgtttagaaaacgttgtggctaaggtgccagtattgtctggaacacacaatacttccagtcaggagggccataaccacagcactgctgctactaatgagcatatcagaactacaagtgaggaagttgttagatcctttacccaacgagcaagtgaaccaaccacacatgggaactacaatctcaactcttctagagtaactgcagaagcaaactccactgagaagccaagaaaaaggggccgtccaagaaaagtagtaaaacccaatggggagccaaaagaaagaggtactaaagggaaacaaaatgttagtcatgaaaaacctacatcgcaaaaaggttcacatactgacattttgaaaactaatggtatttcttatgcttctgaaccttccactggaattactcctaggatggctattgtggagtcgaaaagctctgatcaagataaggaaattcatggaggtgtcattcctcaagctacagcaatatcagttgatcttttagatggcataattcaaaagattaagctcttaagcataagcagaccagacaatgttgtggcagagataccaaaagatgctcttgttccttatgaaggtgaatttggtgcactggttgcatttgaggggaagacaaagaaaaaccgttctcgggccaaagtgaacatcgatccagtcaccactatgatgtggaacttattaatgggaccagatatgggtgatggtgctgaagggttagacaaggataaagagaagtggcttgatgaagaaagaaaagtgttcagaggacgtgttgattcattcattgctcgtatgcatctagttcagggggacagacgtttctctcgatggaaaggatcagtcgtggactcagtcgtgggtgtatttcttacccagaatgtttcggatcatctttctagaaggatagttgctcttgctctggactgtttggtgattctatcaaattgcagggcaagatgttcattgaagagataagtgatgttagatcattaattactacagaagataatgaagaaagtaatagtaatgaattgattggaagctctgccgggtatggagtaaaccatgcaactggaggctgccatgtttcttataggaagtcactaactgaatcccatgaaaatgggctttcaggatctgtttttccaactaccggcttttcaagtgtagtagaaactgaagatggctcattagaggatgttatttcttctcaaaattctgctgtttcttcccagaattccccagattacctttttcacagaacggatccaataggttctagttcgttgcaaaatttcaccgaagagggctatatcatgagaaatatatccaacgggactggcagctcaactgactgctcagggtttctgccaattcaagatccaaaaggcacgcttggattgtcagaatattatggacataatcctcttctagtttcaggtgtgaacaagggtgtgttgcttgatctaaacagatcatatcagccattacatacttctatgccctatgttcagaatagcgagtctgatttcacaggtgtgtcatgtttcagccatatggataaatcattccacacaggccctaatagagtgaatctttctagtgttacacaatctgaggccagtctttaccctactgatcctttgcaacaagacgagttttcaccagtaattaaacaaaacttccaaccattatatagttcagacaaagtgtcattattcaaggagcactgttcctatggaaatgatttttcgaggaacaaaactgaagctgctattatggaaccacttgtctactcaaatcctcaagagctgtacactacctcaacagagcaaatgggtgttgaacaatttcaatcaggatgtggccaacaggacaatgatgtgagagttcagacaacatcatatgaaaggcatcagtcttcaaccttgtgtggaaaccagaactctcagttagagatcttgcaaggagttgcttcaggctcaacacagaagttcattgatactcaaaagagtccgtcagaagttcaacaaaacggatcaaaagctaagaaggtacggggtcgacctaaaacgaaaacttatgactgggacagtttacgaaaagaagtgttttctaatggtggggataaacaaagaaataatgatgcaagggatactgttgattgggaggcagttaggcaagcagaagtccgagaaatatctgaaactatcagagagagaggaatgaataacatgctagcagaacgaataaaggaattcctgaaccgattggtgacagaccatggaggtattgatcttgaatggctaagagatgttccaccggacaaagcaaacctgaggagcagaattttgatgattggtggaggaacagcaacctcaaagtgcaggatgaggtttcggtatggtcttcagccggggctaaggacatatccttcctccaaatctctggcctccccggctaactggtgtatagggacttccttctaagcattagagggcttggactcaaaagtgttgagtgcgttcgtctcttgacgctacatcatatggcttttccagtggacacaaatgttggtcggatatgtgtgaggcttggatgggtgccgcttcaaccattgccagagtctcttcagttgcacctattggaaatgtatgagcttcactaccaaatgattacttttggaaaggttttctgcacaaaaagtaagcctaattgcaattcatgtccattgagagctgaatgtaagcactttgctagtgcatttgcaagtgctaggcttgctcttcccgcacctgaagaaaaacgtttggctacatcggaggatccaaatgttgtagagttttgtcaccaaacatacataaattcaggggctgttggcgaacttgagtggagtgcgaactatcctaagcatgctgtttgtggtaacctgcagccgttcattgaggaaccactgagcccagaacctgaacctgaaaatgtagaggcgaaggacggtgcaatagaggatttctttaatgaagaccctgatgaaattcctactattaatcttaatattgaggagtttacacagaacttgaagaactatatgcaagcaaaccatgttgagattgagtatgctgacatgtcaaaggcattggttgccatcacccctgaagctgcttccattccaactccaaagctcaagaatgtcagtcgtcttaggacagaacaccaagtttatgaactgccagattcacaccctcttctggaaggatttgaacagagagaaccagatgatccctgtccatatcttctttccatatggaccccaggtgaaactgcacaatcaaccaatgcgcccaagacattctgtgattcaggggagactggtcaactatgtggaagtttaacatgctttagttgcaacagtttacgagaaatgcaggctcagaaagtcagaggaacactcttgataccatgccggacagcaatgagaggaagcttcccacttaatgggacatattttcaagttaatgaggtatttgctgaccattgttcaagccaaaatccaattgatgtcccacgaagttggatatgggacctcccaagacgaactgtttactttggaacctcagttcctacaatatttagaggtttaacgactgaagagatacaacaatgcttttggagaggattcgtttgtgtgaggggctttgataggacagtaagggcaccaaggcccctttatgcaaggttgcattttcctgccagcaaggttgttagaggcaaaaagcctggagcggcaagcgtcgaagaataataggtacatcgaagaaatatagaggagctaacaaaacggatggatagccctaaatgagatgctgacccaataagtcgccgaatcacctccaagttctaacccaatttttgaggcgacatgacctgttaaattatgttccatctatggtaacagcttagatgttcttgtgagtcgcatattctttactctgaaattcaatatagcaaatgaaaaaaaacacagtgcatagtctagttctaattgtacctgtgagtggaatcagttgttgtacaacatgaagatgggcctatttgtacaatggtcatacatgttctttgatcatatactataaacaatgtaacctcatcggccgttatttgattgtttcaaaacaaaggaaaagccttttcaattcatgttgttctctatagttaggaatttatattactttttattttttttataaattctacaagaagcatgaacaag

SEQ ID NO: 54730 - DNA, 6663 bp, Zea Mays
ctctctgtgccccctctcctttctctctctagatagactgtggttcctctcacccagagtcgcagcgacccaaccacctcccccccccgtccctctctctctcccttctgctggtctagttttggtttccctctcgctttccttcgctcctaggcgcggctccggcgggcggaagaggagggagaggcaggcggcggcccccggcagttcctccgtccgcggagcccagagggaggagggggaggcctggtctggggctgtccgctgaatctgcttctccgaagatcgggtggaccacgggactcggcgggcgcgcccgatctgctccgccgtcgaggtgaagtcggctgatatgacgtacctcatttggataacaatttgatcggcaccataagttacagaaatatgcaggaggagctagggcaaaggatgcatgtacctcatggtatcaatctgtgtttctcaacttcttccgagctctttcaggtggaatcttccattgagctgggtactgcagaagtgaaccctgtaccatctgaaaagttatctgctaactcacaagctgttagagatgatgctggagcagttgaaggtattgacatgaatggaaaacctgtccaaaaacctaagaggaaaaaacataggccaaaggtcattaaagaaggacaatcagcaaagttgcagaagcctaaaactccaaagcctcccaaagaaaatgggaatcagcctactggaaagagaaagtatgtcaggaagaagggactaagcacaccagccaaacaaattccatcagaaggtgctgatacacacactagagctaaaccaggaatagcccaaagatgtttggactttgatgtggaggaccaacatggacatttggatctggtatcacaaacccaggaaacggagatacagactggtcctggggacacacagccatcaatatctggagttgaaagaagtaatgcccaggtatcatgccattggggttggggtggtacaagcagttctattatttcagctgacccaatagttgatatacaaggattacaggcagactgcatacctaaaagagtcaattttgatttgaacaattctatggcaagtcagatgccaaccaattattctagtcgaatggacagctctggacaatttttccagtttggtttaggagaaaaagttcaaacaaatcagttactggattataattgtaatctgccagctagacgtgtctctcatctcagcagctcggtcgatcatatgcgacaccccttagccaattttgaccaatacataagcacatctcaagtttgtacagaaaattcacgcagacattatcagatgcctagtagttctagaatttcagaaaataggacagcagcttctcagtatactgaaagggtgtcaatggggggcaatttcaatcccggagcttgtataggagaaggcacggtaatcaaacaaatggcccaatgttatagacttccagaaagtccacttgtacctcccaaacataatgaaagggatgtgatgaatggaaatctaaacgagttttctgtgtataatgattacttgaatttttctagcaatagtaactaccaaactggagcagcttttggttttcatgattctccagtctattcagatgttcttgcaatgggtaaaaaaagagaacacaatgctatcagtggtcaccagatttcttttgacatcgactttgttaactcaaatagtacaaggaagttctgtattgatgaccttctttccactagctctcaaacatcttattatcctgaagcatgcaaaaggatgagaccagagaatcatagcaatcagctcaatgtaactacgggaaagctttcttcttcatcagcattttctggtagtttgaatacaaataacgtttcaactataaaccctggaattggtaccttggctgatatacaaaggttgatggcccttgagaaatcacaagcttcacaacaaatgattgactttattacgtcgcaaaacaacatggccggtgaaagtactgaacttgctcagcaaaataattctgacaaaggatttgttgctttacataataaaaagttccaaagcctcactgcgcagaacataccattgcctgacagtactgtgaaccaatcgggagaaagtaatatcttgaggaatggaatacatcaaacacaaccttgggaaattacatctaggtcgcatcactctagcgacaattttgctttgccaaataaatggtctggttacttgacagcagggaacacacagttatcaagcatcacagtaaacccatccacagaaaactatattcaaagtaatgctatttatcaatatcaatgtttagaaaacgttgtggctaaggtgccagtattgtctggaacacacaatacttccagtcaggagggccataaccacagcactgctgctactaatgagcatatcagaactacaagtgaggaagttgttagatcctttacccaacgagcaagtgaaccaaccacacatgggaactacaatctcaactcttctagagtaactgcagaagcaaactccactgagaagccaagaaaaaggggccgtccaagaaaagtagtaaaacccaatggggagccaaaagaaagaggtactaaagggaaacaaaatgttagtcatgaaaaacctacatcgcaaaaaggttcacatactgacattttgaaaactaatggtatttcttatgcttctgaaccttccactggaattactcctaggatggctattgtggagtcgaaaagctctgatcaagataaggaaattcatggaggtgtcattcctcaagctacagcaatatcagttgatcttttagatggcataattcaaaagattaagctcttaagcataagcagaccagacaatgttgtggcagagataccaaaagatgctcttgttccttatgaaggtgaatttggtgcactggttgcatttgaggggaagacaaagaaaaaccgttctcgggccaaagtgaacatcgatccagtcaccactatgatgtggaacttattaatgggaccagatatgggtgatggtgctgaagggttagacaaggataaagagaagtggcttgatgaagaaagaaaagtgttcagaggacgtgttgattcattcattgctcgtatgcatctagttcagggggacagacgtttctctcgatggaaaggatcagtcgtggactcagtcgtgggtgtatttcttacccagaatgtttcggatcatctttctagttctgctttcatggcggttgctgccaaatttcctgctaagccagaggtccctgaaaaacctgtggctgagatgtctcatactcctgaacagaaggatagttgctcttgctctggactgtttggtgattctatcaaattgcagggcaagatgttcattgaagagataagtgatgttagatcattaattactacagaagataatgaagaaagtaatagtaatgaattgattggaagctctgccgggtatggagtaaaccatgcaactggaggctgccatgtttcttataggaagtcactaactgaatcccatgaaaatgggctttcaggatctgtttttccaactaccggcttttcaagtgtagtagaaactgaagatggctcattagaggatgttatttcttctcaaaattctgctgtttcttcccagaattccccagattacctttttcacagaacggatccaataggttctagttcgttgcaaaatttcaccgaagagggctatatcatgagaaatatatccaacgggactggcagctcaactgactgctcagggtttctgccaattcaagatccaaaaggcacgcttggattgtcagaatattatggacataatcctcttctagtttcaggtgtgaacaagggtgtgttgcttgatctaaacagatcatatcagccattacatacttctatgccctatgttcagaatagcgagtctgatttcacaggtgtgtcatgtttcagccatatggataaatcattccacacaggccctaatagagtgaatctttctagtgttacacaatctgaggccagtctttaccctactgatcctttgcaacaagacgagttttcaccagtaattaaacaaaacttccaaccattatatagttcagacaaagtgtcattattcaaggagcactgttcctatggaaatgatttttcgaggaacaaaactgaagctgctattatggaaccacttgtctactcaaatcctcaagagctgtacactacctcaacagagcaaatgggtgttgaacaatttcaatcaggatgtggccaacaggacaatgatgtgagagttcagacaacatcatatgaaaggcatcagtcttcaaccttgtgtggaaaccagaactctcagttagagatcttgcaaggagttgcttcaggctcaacacagaagttcattgatactcaaaagagtccgtcagaagttcaacaaaacggatcaaaagctaagaaggtacggggtcgacctaaaacgaaaacttatgactgggacagtttacgaaaagaagtgttttctaatggtggggataaacaaagaaataatgatgcaagggatactgttgattgggaggcagttaggcaagcagaagtccgagaaatatctgaaactatcagagagagaggaatgaataacatgctagcagaacgaataaaggaattcctgaaccgattggtgacagaccatggaggtattgatcttgaatggctaagagatgttccaccggacaaagcaaaggacttccttctaagcattagagggcttggactcaaaagtgttgagtgcgttcgtctcttgacgctacatcatatggcttttccagtggacacaaatgttggtcggatatgtgtgaggcttggatgggtgccgcttcaaccattgccagagtctcttcagttgcacctattggaaatgtatcccatgctggagcacatacagaagtacctttggcctcgactatgcaagctagatcaacgtacattgtatgagcttcactaccaaatgattacttttggaaaggttttctgcacaaaaagtaagcctaattgcaattcatgtccattgagagctgaatgtaagcactttgctagtgcatttgcaagtgctaggcttgctcttcccgcacctgaagaaaaacgtttggctacatcggaggatccaaatgttgtagagttttgtcaccaaacatacataaattcaggggctgttggcgaacttgagtggagtgcgaactatcctaagcatgctgtttgtggtaacctgcagccgttcattgaggaaccactgagcccagaacctgaacctgaaaatgtagaggcgaaggacggtgcaatagaggatttctttaatgaagaccctgatgaaattcctactattaatcttaatattgaggagtttacacagaacttgaagaactatatgcaagcaaaccatgttgagattgagtatgctgacatgtcaaaggcattggttgccatcacccctgaagctgcttccattccaactccaaagctcaagaatgtcagtcgtcttaggacagaacaccaagtttatgaactgccagattcacaccctcttctggaaggatttgaacagagagaaccagatgatccctgtccatatcttctttccatatggaccccaggtgaaactgcacaatcaaccaatgcgcccaagacattctgtgattcaggggagactggtcaactatgtggaagtttaacatgctttagttgcaacagtttacgagaaatgcaggctcagaaagtcagaggaacactcttgataccatgccggacagcaatgagaggaagcttcccacttaatgggacatattttcaagttaatgaggtatttgctgaccattgttcaagccaaaatccaattgatgtcccacgaagttggatatgggacctcccaagacgaactgtttactttggaacctcagttcctacaatatttagaggtttaacgactgaagagatacaacaatgcttttggagaggattcgtttgtgtgaggggctttgataggacagtaagggcaccaaggcccctttatgcaaggttgcattttcctgccagcaaggttgttagaggcaaaaagcctggagcggcaagcgtcgaagaataataggtacatcgaagaaatatagaggagctaacaaaacggatggatagccctaaatgagatgctgacccaataagtcgccgaatcacctccaagttctaacccaatttttgaggcgacatgacctgttaaattatgttccatctatggtaacagcttagatgttcttgtgagtcgcatattctttactctgaaattcaatatagcaaatgaaaaaaaacacagtgcatagtctagttctaattgtacctgtgagtggaatcagttgttgtacaacatgaagatgggcctatttgtacaatggtcatacatgttctttgatcatatactataaacaatgtaacctcatcggccgttatttgattgtttcaaaacaaaggaaaagccttttcaattcatgttgttctctatagttaggaatttatattactttttattttttttataaattctacaagaagcatgaacaag

SEQ ID NO: 54731 - DNA, 4973 bp, Zea Mays
tctctctgtgccccctctcctttctctctctagatagactgtggttcctctcacccagagtcgcagcgacccaaccacctcccccccccgtccctctctctctcccttctgctggtctagttttggtttccctctcgctttccttcgctcctaggcgcggctccggcgggcggaagaggagggagaggcaggcggcggcccccggcagttcctccgtccgcggagcccagagggaggagggggaggcctggtctggggctgtccgctgaatctgcttctccgaagatcgggtggaccacgggactcggcgggcgcgcccgatctgctccgccgtcgaggtgaagtcggctgatatgacgtacctcatttggataacaatttgatcggcaccataagttacagaaatatgcaggaggagctagggcaaaggatgcatgtacctcatggtatcaatctgtgtttctcaacttcttccgagctctttcaggtggaatcttccattgagctgggtactgcagaagtgaaccctgtaccatctgaaaagttatctgctaactcacaagctgttagagatgatgctggagcagttgaaggtattgacatgaatggaaaacctgtccaaaaacctaagaggaaaaaacataggccaaaggtcattaaagaaggacaatcagcaaagttgcagaagcctaaaactccaaagcctcccaaagaaaatgggaatcagcctactggaaagagaaagtatgtcaggaagaagggactaagcacaccagccaaacaaattccatcagaaggtgctgatacacacactagagctaaaccaggaatagcccaaagatgtttggactttgatgtggaggaccaacatggacatttggatctggtatcacaaacccaggaaacggagatacagactggtcctggggacacacagccatcaatatctggagttgaaagaagtaatgcccaggtatcatgccattggggttggggtggtacaagcagttctattatttcagctgacccaatagttgatatacaaggattacaggcagactgcatacctaaaagagtcaattttgatttgaacaattctatggcaagtcagatgccaaccaattattctagtcgaatggacagctctggacaatttttccagtttggtttaggagaaaaagttcaaacaaatcagttactggattataattgtaatctgccagctagacgtgtctctcatctcagcagctcggtcgatcatatgcgacaccccttagccaattttgaccaatacataagcacatctcaagtttgtacagaaaattcacgcagacattatcagatgcctagtagttctagaatttcagaaaataggacagcagcttctcagtatactgaaagggtgtcaatggggggcaatttcaatcccggagcttgtataggagaaggcacggtaatcaaacaaatggcccaatgttatagacttccagaaagtccacttgtacctcccaaacataatgaaagggatgtgatgaatggaaatctaaacgagttttctgtgtataatgattacttgaatttttctagcaatagtaactaccaaactggagcagcttttggttttcatgattctccagtctattcagatgttcttgcaatgggtaaaaaaagagaacacaatgctatcagtggtcaccagatttcttttgacatcgactttgttaactcaaatagtacaaggaagttctgtattgatgaccttctttccactagctctcaaacatcttattatcctgaagcatgcaaaaggatgagaccagagaatcatagcaatcagctcaatgtaactacgggaaagctttcttcttcatcagcattttctggtagtttgaatacaaataacgtttcaactataaaccctggaattggtaccttggctgatatacaaaggttgatggcccttgagaaatcacaagcttcacaacaaatgattgactttattacgtcgcaaaacaacatggccggtgaaagtactgaacttgctcagcaaaataattctgacaaaggatttgttgctttacataataaaaagttccaaagcctcactgcgcagaacataccattgcctgacagtactgtgaaccaatcgggagaaagtaatatcttgaggaatggaatacatcaaacacaaccttgggaaattacatctaggtcgcatcactctagcgacaattttgctttgccaaataaatggtctggttacttgacagcagggaacacacagttatcaagcatcacagtaaacccatccacagaaaactatattcaaagtaatgctatttatcaatatcaatgtttagaaaacgttgtggctaaggtgccagtattgtctggaacacacaatacttccagtcaggagggccataaccacagcactgctgctactaatgagcatatcagaactacaagtgaggaagttgttagatcctttacccaacgagcaagtgaaccaaccacacatgggaactacaatctcaactcttctagagtaactgcagaagcaaactccactgagaagccaagaaaaaggggccgtccaagaaaagtagtaaaacccaatggggagccaaaagaaagaggatggctattgtggagtcgaaaagctctgatcaagataaggaaattcatggaggtgtcattcctcaagctacagcaatatcagttgatcttttagatggcataattcaaaagattaagctcttaagcataagcagaccagacaatgttgtggcagagataccaaaagatgctcttgttccttatgaaggtgaatttggtgcactggttgcatttgaggggaagacaaagaaaaaccgttctcgggccaaagtgaacatcgatccagtcaccactatgatgtggaacttattaatgggaccagatatgggtgatggtgctgaagggttagacaaggataaagagaagtggcttgatgaagaaagaaaagtgttcagaggacgtgttgattcattcattgctcgtatgcatctagttcagggggacagacgtttctctcgatggaaaggatcagtcgtggactcagtcgtgggtgtatttcttacccagaatgtttcggatcatctttctaggtgaaatatacacttctagcctaattgaaggacttccttctaagcattagagggcttggactcaaaagtgttgagtgcgttcgtctcttgacgctacatcatatggcttttccagtggacacaaatgttggtcggatatgtgtgaggcttggatgggtgccgcttcaaccattgccagagtctcttcagttgcacctattggaaatgtatgagcttcactaccaaatgattacttttggaaaggttttctgcacaaaaagtaagcctaattgcaattcatgtccattgagagctgaatgtaagcactttgctagtgcatttgcaagtgctaggcttgctcttcccgcacctgaagaaaaacgtttggctacatcggaggatccaaatgttgtagagttttgtcaccaaacatacataaattcaggggctgttggcgaacttgagtggagtgcgaactatcctaagcatgctgtttgtggtaacctgcagccgttcattgaggaaccactgagcccagaacctgaacctgaaaatgtagaggcgaaggacggtgcaatagaggatttctttaatgaagaccctgatgaaattcctactattaatcttaatattgaggagtttacacagaacttgaagaactatatgcaagcaaaccatgttgagattgagtatgctgacatgtcaaaggcattggttgccatcacccctgaagctgcttccattccaactccaaagctcaagaatgtcagtcgtcttaggacagaacaccaagtttatgaactgccagattcacaccctcttctggaaggatttgaacagagagaaccagatgatccctgtccatatcttctttccatatggaccccaggtgaaactgcacaatcaaccaatgcgcccaagacattctgtgattcaggggagactggtcaactatgtggaagtttaacatgctttagttgcaacagtttacgagaaatgcaggctcagaaagtcagaggaacactcttgataccatgccggacagcaatgagaggaagcttcccacttaatgggacatattttcaagttaatgaggtatttgctgaccattgttcaagccaaaatccaattgatgtcccacgaagttggatatgggacctcccaagacgaactgtttactttggaacctcagttcctacaatatttagaggtttaacgactgaagagatacaacaatgcttttggagaggattcgtttgtgtgaggggctttgataggacagtaagggcaccaaggcccctttatgcaaggttgcattttcctgccagcaaggttgttagaggcaaaaagcctggagcggcaagcgtcgaagaataataggtacatcgaagaaatatagaggagctaacaaaacggatggatagccctaaatgagatgctgacccaataagtcgccgaatcacctccaagttctaacccaatttttgaggcgacatgacctgttaaattatgttccatctatggtaacagcttagatgttcttgtgagtcgcatattctttactctgaaattcaatatagcaaatgaaaaaaaacacagtgcatagtctagttctaattgtacctgtgagtggaatcagttgttgtacaacatgaagatgggcctatttgtacaatggtcatacatgttctttgatcatatactataaacaatgtaacctcatcggccgttatttgattgtttcaaaacaaaggaaaagccttttcaattcatgttgttctctatagttaggaatttatattactttttattttttttataaattctacaagaagcatgaacaag

SEQ ID NO: 54732 - DNA, 6633 bp, Zea Mays
tactagtacccactctctctgtgccccctctcctttctctctctagatagactgtggttcctctcacccagagtcgcagcgacccaaccacctcccccccccgtccctctctctctcccttctgctggtctagttttggtttccctctcgctttccttcgctcctaggcgcggctccggcgggcggaagaggagggagaggcaggcggcggcccccggcagttcctccgtccgcggagcccagagggaggagggggaggcctggtctggggctgtccgctgaatctgcttctccgaagatcgggtggaccacgggactcggcgggcgcgcccgatctgctccgccgtcgaggtgaagtcggctgatatgacgtacctcatttggataacaatttgatcggcaccataagttacagaaatatgcaggaggagctagggcaaaggatgcatgtacctcatggtatcaatctgtgtttctcaacttcttccgagctctttcaggtggaatcttccattgagctgggtactgcagaagtgaaccctgtaccatctgaaaagttatctgctaactcacaagctgttagagatgatgctggagcagttgaaggtattgacatgaatggaaaacctgtccaaaaacctaagaggaaaaaacataggccaaaggtcattaaagaaggacaatcagcaaagttgcagaagcctaaaactccaaagcctcccaaagaaaatgggaatcagcctactggaaagagaaagtatgtcaggaagaagggactaagcacaccagccaaacaaattccatcagaaggtgctgatacacacactagagctaaaccaggaatagcccaaagatgtttggactttgatgtggaggaccaacatggacatttggatctggtatcacaaacccaggaaacggagatacagactggtcctggggacacacagccatcaatatctggagttgaaagaagtaatgcccaggtatcatgccattggggttggggtggtacaagcagttctattatttcagctgacccaatagttgatatacaaggattacaggcagactgcatacctaaaagagtcaattttgatttgaacaattctatggcaagtcagatgccaaccaattattctagtcgaatggacagctctggacaatttttccagtttggtttaggagaaaaagttcaaacaaatcagttactggattataattgtaatctgccagctagacgtgtctctcatctcagcagctcggtcgatcatatgcgacaccccttagccaattttgaccaatacataagcacatctcaagtttgtacagaaaattcacgcagacattatcagatgcctagtagttctagaatttcagaaaataggacagcagcttctcagtatactgaaagggtgtcaatggggggcaatttcaatcccggagcttgtataggagaaggcacggtaatcaaacaaatggcccaatgttatagacttccagaaagtccacttgtacctcccaaacataatgaaagggatgtgatgaatggaaatctaaacgagttttctgtgtataatgattacttgaatttttctagcaatagtaactaccaaactggagcagcttttggttttcatgattctccagtctattcagatgttcttgcaatgggtaaaaaaagagaacacaatgctatcagtggtcaccagatttcttttgacatcgactttgttaactcaaatagtacaaggaagttctgtattgatgaccttctttccactagctctcaaacatcttattatcctgaagcatgcaaaaggatgagaccagagaatcatagcaatcagctcaatgtaactacgggaaagctttcttcttcatcagcattttctggtagtttgaatacaaataacgtttcaactataaaccctggaattggtaccttggctgatatacaaaggttgatggcccttgagaaatcacaagcttcacaacaaatgattgactttattacgtcgcaaaacaacatggccggtgaaagtactgaacttgctcagcaaaataattctgacaaaggatttgttgctttacataataaaaagttccaaagcctcactgcgcagaacataccattgcctgacagtactgtgaaccaatcgggagaaagtaatatcttgaggaatggaatacatcaaacacaaccttgggaaattacatctaggtcgcatcactctagcgacaattttgctttgccaaataaatggtctggttacttgacagcagggaacacacagttatcaagcatcacagtaaacccatccacagaaaactatattcaaagtaatgctatttatcaatatcaatgtttagaaaacgttgtggctaaggtgccagtattgtctggaacacacaatacttccagtcaggagggccataaccacagcactgctgctactaatgagcatatcagaactacaagtgaggaagttgttagatcctttacccaacgagcaagtgaaccaaccacacatgggaactacaatctcaactcttctagagtaactgcagaagcaaactccactgagaagccaagaaaaaggggccgtccaagaaaagtagtaaaacccaatggggagccaaaagaaagaggatggctattgtggagtcgaaaagctctgatcaagataaggaaattcatggaggtgtcattcctcaagctacagcaatatcagttgatcttttagatggcataattcaaaagattaagctcttaagcataagcagaccagacaatgttgtggcagagataccaaaagatgctcttgttccttatgaaggtgaatttggtgcactggttgcatttgaggggaagacaaagaaaaaccgttctcgggccaaagtgaacatcgatccagtcaccactatgatgtggaacttattaatgggaccagatatgggtgatggtgctgaagggttagacaaggataaagagaagtggcttgatgaagaaagaaaagtgttcagaggacgtgttgattcattcattgctcgtatgcatctagttcagggggacagacgtttctctcgatggaaaggatcagtcgtggactcagtcgtgggtgtatttcttacccagaatgtttcggatcatctttctagttctgctttcatggcggttgctgccaaatttcctgctaagccagaggtccctgaaaaacctgtggctgagatgtctcatactcctgaacagaaggatagttgctcttgctctggactgtttggtgattctatcaaattgcagggcaagatgttcattgaagagataagtgatgttagatcattaattactacagaagataatgaagaaagtaatagtaatgaattgattggaagctctgccgggtatggagtaaaccatgcaactggaggctgccatgtttcttataggaagtcactaactgaatcccatgaaaatgggctttcaggatctgtttttccaactaccggcttttcaagtgtagtagaaactgaagatggctcattagaggatgttatttcttctcaaaattctgctgtttcttcccagaattccccagattacctttttcacagaacggatccaataggttctagttcgttgcaaaatttcaccgaagagggctatatcatgagaaatatatccaacgggactggcagctcaactgactgctcagggtttctgccaattcaagatccaaaaggcacgcttggattgtcagaatattatggacataatcctcttctagtttcaggtgtgaacaagggtgtgttgcttgatctaaacagatcatatcagccattacatacttctatgccctatgttcagaatagcgagtctgatttcacaggtgtgtcatgtttcagccatatggataaatcattccacacaggccctaatagagtgaatctttctagtgttacacaatctgaggccagtctttaccctactgatcctttgcaacaagacgagttttcaccagtaattaaacaaaacttccaaccattatatagttcagacaaagtgtcattattcaaggagcactgttcctatggaaatgatttttcgaggaacaaaactgaagctgctattatggaaccacttgtctactcaaatcctcaagagctgtacactacctcaacagagcaaatgggtgttgaacaatttcaatcaggatgtggccaacaggacaatgatgtgagagttcagacaacatcatatgaaaggcatcagtcttcaaccttgtgtggaaaccagaactctcagttagagatcttgcaaggagttgcttcaggctcaacacagaagttcattgatactcaaaagagtccgtcagaagttcaacaaaacggatcaaaagctaagaaggtacggggtcgacctaaaacgaaaacttatgactgggacagtttacgaaaagaagtgttttctaatggtggggataaacaaagaaataatgatgcaagggatactgttgattgggaggcagttaggcaagcagaagtccgagaaatatctgaaactatcagagagagaggaatgaataacatgctagcagaacgaataaaggaattcctgaaccgattggtgacagaccatggaggtattgatcttgaatggctaagagatgttccaccggacaaagcaaacctgaggagcagaattttgatgattggtggaggaacagcaacctcaaagtgcaggctattttagatgaggtttcggtatggtcttcagccggggctaaggacatatccttcctccaaatctctggcctccccggctaactggtgtatagggacttccttctaagcattagagggcttggactcaaaagtgttgagtgcgttcgtctcttgacgctacatcatatggcttttccagtggacacaaatgttggtcggatatgtgtgaggcttggatgggtgccgcttcaaccattgccagagtctcttcagttgcacctattggaaatgtatgagcttcactaccaaatgattacttttggaaaggttttctgcacaaaaagtaagcctaattgcaattcatgtccattgagagctgaatgtaagcactttgctagtgcatttgcaagtgctaggcttgctcttcccgcacctgaagaaaaacgtttggctacatcggaggatccaaatgttgtagagttttgtcaccaaacatacataaattcaggggctgttggcgaacttgagtggagtgcgaactatcctaagcatgctgtttgtggtaacctgcagccgttcattgaggaaccactgagcccagaacctgaacctgaaaatgtagaggcgaaggacggtgcaatagaggatttctttaatgaagaccctgatgaaattcctactattaatcttaatattgaggagtttacacagaacttgaagaactatatgcaagcaaaccatgttgagattgagtatgctgacatgtcaaaggcattggttgccatcacccctgaagctgcttccattccaactccaaagctcaagaatgtcagtcgtcttaggacagaacaccaagtttatgaactgccagattcacaccctcttctggaaggatttgaacagagagaaccagatgatccctgtccatatcttctttccatatggaccccaggtgaaactgcacaatcaaccaatgcgcccaagacattctgtgattcaggggagactggtcaactatgtggaagtttaacatgctttagttgcaacagtttacgagaaatgcaggctcagaaagtcagaggaacactcttgataccatgccggacagcaatgagaggaagcttcccacttaatgggacatattttcaagttaatgaggtatttgctgaccattgttcaagccaaaatccaattgatgtcccacgaagttggatatgggacctcccaagacgaactgtttactttggaacctcagttcctacaatatttagaggtttaacgactgaagagatacaacaatgcttttggagaggattcgtttgtgtgaggggctttgataggacagtaagggcaccaaggcccctttatgcaaggttgcattttcctgccagcaaggttgttagaggcaaaaagcctggagcggcaagcgtcgaagaataataggtacatcgaagaaatatagaggagctaacaaaacggatggatagccctaaatgagatgctgacccaataagtcgccgaatcacctccaagttctaacccaatttttgaggcgacatgacctgttaaattatgttccatctatggtaacagcttagatgttcttgtgagtcgcatattctttactctgaaattcaatatagcaaatgaaaaaaaacacagtgcatagtctagttctaattgtacctgtgagtggaatcagttgttgtacaacatgaagatgggcctatttgtacaatggtcatacatgttctttgatcatatactataaacaatgtaacctcatcggccgttatttgattgtttcaaaacaaaggaaaagccttttcaattcatgttgttctctatagttaggaatttatattactttttattttttttataaattctacaagaagcatgaacaag

SEQ ID NO: 54733 - DNA, 6621 bp, Zea Mays
cagctcgtaccgctactagtacccactctctctgtgccccctctcctttctctctctagatagactgtggttcctctcacccagagtcgcagcgacccaaccacctcccccccccgtccctctctctctcccttctgctggtctagttttggtttccctctcgctttccttcgctcctaggcgcggctccggcgggcggaagaggagggagaggcaggcggcggcccccggcagttcctccgtccgcggagcccagagggaggagggggaggcctggtctggggctgtccgctgaatctgcttctccgaagatcgggtggaccacgggactcggcgggcgcgcccgatctgctccgccgtcgaggtgaagtcggctgatatgacgtacctcatttggataacaatttgatcggcaccataagttacagaaatatgcaggaggagctagggcaaaggatgcatgtacctcatggtatcaatctgtgtttctcaacttcttccgagctctttcaggtggaatcttccattgagctgggtactgcagaagtgaaccctgtaccatctgaaaagttatctgctaactcacaagctgttagagatgatgctggagcagttgaaggtattgacatgaatggaaaacctgtccaaaaacctaagaggaaaaaacataggccaaaggtcattaaagaaggacaatcagcaaagttgcagaagcctaaaactccaaagcctcccaaagaaaatgggaatcagcctactggaaagagaaagtatgtcaggaagaagggactaagcacaccagccaaacaaattccatcagaaggtgctgatacacacactagagctaaaccaggaatagcccaaagatgtttggactttgatgtggaggaccaacatggacatttggatctggtatcacaaacccaggaaacggagatacagactggtcctggggacacacagccatcaatatctggagttgaaagaagtaatgcccaggtatcatgccattggggttggggtggtacaagcagttctattatttcagctgacccaatagttgatatacaaggattacaggcagactgcatacctaaaagagtcaattttgatttgaacaattctatggcaagtcagatgccaaccaattattctagtcgaatggacagctctggacaatttttccagtttggtttaggagaaaaagttcaaacaaatcagttactggattataattgtaatctgccagctagacgtgtctctcatctcagcagctcggtcgatcatatgcgacaccccttagccaattttgaccaatacataagcacatctcaagtttgtacagaaaattcacgcagacattatcagatgcctagtagttctagaatttcagaaaataggacagcagcttctcagtatactgaaagggtgtcaatggggggcaatttcaatcccggagcttgtataggagaaggcacggtaatcaaacaaatggcccaatgttatagacttccagaaagtccacttgtacctcccaaacataatgaaagggatgtgatgaatggaaatctaaacgagttttctgtgtataatgattacttgaatttttctagcaatagtaactaccaaactggagcagcttttggttttcatgattctccagtctattcagatgttcttgcaatgggtaaaaaaagagaacacaatgctatcagtggtcaccagatttcttttgacatcgactttgttaactcaaatagtacaaggaagttctgtattgatgaccttctttccactagctctcaaacatcttattatcctgaagcatgcaaaaggatgagaccagagaatcatagcaatcagctcaatgtaactacgggaaagctttcttcttcatcagcattttctggtagtttgaatacaaataacgtttcaactataaaccctggaattggtaccttggctgatatacaaaggttgatggcccttgagaaatcacaagcttcacaacaaatgattgactttattacgtcgcaaaacaacatggccggtgaaagtactgaacttgctcagcaaaataattctgacaaaggatttgttgctttacataataaaaagttccaaagcctcactgcgcagaacataccattgcctgacagtactgtgaaccaatcgggagaaagtaatatcttgaggaatggaatacatcaaacacaaccttgggaaattacatctaggtcgcatcactctagcgacaattttgctttgccaaataaatggtctggttacttgacagcagggaacacacagttatcaagcatcacagtaaacccatccacagaaaactatattcaaagtaatgctatttatcaatatcaatgtttagaaaacgttgtggctaaggtgccagtattgtctggaacacacaatacttccagtcaggagggccataaccacagcactgctgctactaatgagcatatcagaactacaagtgaggaagttgttagatcctttacccaacgagcaagtgaaccaaccacacatgggaactacaatctcaactcttctagagtaactgcagaagcaaactccactgagaagccaagaaaaaggggccgtccaagaaaagtagtaaaacccaatggggagccaaaagaaagaggtactaaagggaaacaaaatgttagtcatgaaaaacctacatcgcaaaaaggttcacatactgacattttgaaaactaatggtatttcttatgcttctgaaccttccactggaattactcctaggatggctattgtggagtcgaaaagctctgatcaagataaggaaattcatggaggtgtcattcctcaagctacagcaatatcagttgatcttttagatggcataattcaaaagattaagctcttaagcataagcagaccagacaatgttgtggcagagataccaaaagatgctcttgttccttatgaaggtgaatttggtgcactggttgcatttgaggggaagacaaagaaaaaccgttctcgggccaaagtgaacatcgatccagtcaccactatgatgtggaacttattaatgggaccagatatgggtgatggtgctgaagggttagacaaggataaagagaagtggcttgatgaagaaagaaaagtgttcagaggacgtgttgattcattcattgctcgtatgcatctagttcagggggacagacgtttctctcgatggaaaggatcagtcgtggactcagtcgtgggtgtatttcttacccagaatgtttcggatcatctttctagttctgctttcatggcggttgctgccaaatttcctgctaagccagaggtccctgaaaaacctgtggctgagatgtctcatactcctgaacagaaggatagttgctcttgctctggactgtttggtgattctatcaaattgcagggcaagatgttcattgaagagataagtgatgttagatcattaattactacagaagataatgaagaaagtaatagtaatgaattgattggaagctctgccgggtatggagtaaaccatgcaactggaggctgccatgtttcttataggaagtcactaactgaatcccatgaaaatgggctttcaggatctgtttttccaactaccggcttttcaagtgtagtagaaactgaagatggctcattagaggatgttatttcttctcaaaattctgctgtttcttcccagaattccccagattacctttttcacagaacggatccaataggttctagttcgttgcaaaatttcaccgaagagggctatatcatgagaaatatatccaacgggactggcagctcaactgactgctcagggtttctgccaattcaagatccaaaaggcacgcttggattgtcagaatattatggacataatcctcttctagtttcaggtgtgaacaagggtgtgttgcttgatctaaacagatcatatcagccattacatacttctatgccctatgttcagaatagcgagtctgatttcacaggtgtgtcatgtttcagccatatggataaatcattccacacaggccctaatagagtgaatctttctagtgttacacaatctgaggccagtctttaccctactgatcctttgcaacaagacgagttttcaccagtaattaaacaaaacttccaaccattatatagttcagacaaagtgtcattattcaaggagcactgttcctatggaaatgatttttcgaggaacaaaactgaagctgctattatggaaccacttgtctactcaaatcctcaagagctgtacactacctcaacagagcaaatgggtgttgaacaatttcaatcaggatgtggccaacaggacaatgatgtgagagttcagacaacatcatatgaaaggcatcagtcttcaaccttgtgtggaaaccagaactctcagttagagatcttgcaaggagttgcttcaggctcaacacagaagttcattgatactcaaaagagtccgtcagaagttcaacaaaacggatcaaaagctaagaaggtacggggtcgacctaaaacgaaaacttatgactgggacagtttacgaaaagaagtgttttctaatggtggggataaacaaagaaataatgatgcaagggatactgttgattgggaggcagttaggcaagcagaagtccgagaaatatctgaaactatcagagagagaggaatgaataacatgctagcagaacgaataaaggaattcctgaaccgattggtgacagaccatggaggtattgatcttgaatggctaagagatgttccaccggacaaagcaaaggacttccttctaagcattagagggcttggactcaaaagtgttgagtgcgttcgtctcttgacgctacatcatatggcttttccagtggacacaaatgttggtcggatatgtgtgaggcttggatgggtgccgcttcaaccattgccagagtctcttcagttgcacctattggaaatgtatgagcttcactaccaaatgattacttttggaaaggttttctgcacaaaaagtaagcctaattgcaattcatgtccattgagagctgaatgtaagcactttgctagtgcatttgcaagtgctaggcttgctcttcccgcacctgaagaaaaacgtttggctacatcggaggatccaaatgttgtagagttttgtcaccaaacatacataaattcaggggctgttggcgaacttgagtggagtgcgaactatcctaagcatgctgtttgtggtaacctgcagccgttcattgaggaaccactgagcccagaacctgaacctgaaaatgtagaggcgaaggacggtgcaatagaggatttctttaatgaagaccctgatgaaattcctactattaatcttaatattgaggagtttacacagaacttgaagaactatatgcaagcaaaccatgttgagattgagtatgctgacatgtcaaaggcattggttgccatcacccctgaagctgcttccattccaactccaaagctcaagaatgtcagtcgtcttaggacagaacaccaagtttatgaactgccagattcacaccctcttctggaaggatttgaacagagagaaccagatgatccctgtccatatcttctttccatatggaccccaggtgaaactgcacaatcaaccaatgcgcccaagacattctgtgattcaggggagactggtcaactatgtggaagtttaacatgctttagttgcaacagtttacgagaaatgcaggctcagaaagtcagaggaacactcttgataccatgccggacagcaatgagaggaagcttcccacttaatgggacatattttcaagttaatgaggtatttgctgaccattgttcaagccaaaatccaattgatgtcccacgaagttggatatgggacctcccaagacgaactgtttactttggaacctcagttcctacaatatttagaggtttaacgactgaagagatacaacaatgcttttggagaggattcgtttgtgtgaggggctttgataggacagtaagggcaccaaggcccctttatgcaaggttgcattttcctgccagcaaggttgttagaggcaaaaagcctggagcggcaagcgtcgaagaataataggtacatcgaagaaatatagaggagctaacaaaacggatggatagccctaaatgagatgctgacccaataagtcgccgaatcacctccaagttctaacccaatttttgaggcgacatgacctgttaaattatgttccatctatggtaacagcttagatgttcttgtgagtcgcatattctttactctgaaattcaatatagcaaatgaaaaaaaacacagtgcatagtctagttctaattgtacctgtgagtggaatcagttgttgtacaacatgaagatgggcctatttgtacaatggtcatacatgttctttgatcatatactataaacaatgtaacctcatcggccgttatttgattgtttcaaaacaaaggaaaagccttttcaattcatgttgttctctatagttaggaatttatattactttttattttttttataaattctacaagaagcatgaacaag

SEQ ID NO: 54734 - DNA, 6337 bp, Zea Mays
gtgaaatgcatcgaacgcgcaacgcgcgccagggagatccctacgactgcacgagtggagggtccaccaggcagtgagaggtgaagtcggctgatatgacgtacctcatttggataacaatttgatcggcaccataagttacagaaatatgcaggaggagctagggcaaaggatgcatgtacctcatggtatcaatctgtgtttctcaacttcttccgagctctttcaggtggaatcttccattgagctgggtactgcagaagtgaaccctgtaccatctgaaaagttatctgctaactcacaagctgttagagatgatgctggagcagttgaaggtattgacatgaatggaaaacctgtccaaaaacctaagaggaaaaaacataggccaaaggtcattaaagaaggacaatcagcaaagttgcagaagcctaaaactccaaagcctcccaaagaaaatgggaatcagcctactggaaagagaaagtatgtcaggaagaagggactaagcacaccagccaaacaaattccatcagaaggtgctgatacacacactagagctaaaccaggaatagcccaaagatgtttggactttgatgtggaggaccaacatggacatttggatctggtatcacaaacccaggaaacggagatacagactggtcctggggacacacagccatcaatatctggagttgaaagaagtaatgcccaggtatcatgccattggggttggggtggtacaagcagttctattatttcagctgacccaatagttgatatacaaggattacaggcagactgcatacctaaaagagtcaattttgatttgaacaattctatggcaagtcagatgccaaccaattattctagtcgaatggacagctctggacaatttttccagtttggtttaggagaaaaagttcaaacaaatcagttactggattataattgtaatctgccagctagacgtgtctctcatctcagcagctcggtcgatcatatgcgacaccccttagccaattttgaccaatacataagcacatctcaagtttgtacagaaaattcacgcagacattatcagatgcctagtagttctagaatttcagaaaataggacagcagcttctcagtatactgaaagggtgtcaatggggggcaatttcaatcccggagcttgtataggagaaggcacggtaatcaaacaaatggcccaatgttatagacttccagaaagtccacttgtacctcccaaacataatgaaagggatgtgatgaatggaaatctaaacgagttttctgtgtataatgattacttgaatttttctagcaatagtaactaccaaactggagcagcttttggttttcatgattctccagtctattcagatgttcttgcaatgggtaaaaaaagagaacacaatgctatcagtggtcaccagatttcttttgacatcgactttgttaactcaaatagtacaaggaagttctgtattgatgaccttctttccactagctctcaaacatcttattatcctgaagcatgcaaaaggatgagaccagagaatcatagcaatcagctcaatgtaactacgggaaagctttcttcttcatcagcattttctggtagtttgaatacaaataacgtttcaactataaaccctggaattggtaccttggctgatatacaaaggttgatggcccttgagaaatcacaagcttcacaacaaatgattgactttattacgtcgcaaaacaacatggccggtgaaagtactgaacttgctcagcaaaataattctgacaaaggatttgttgctttacataataaaaagttccaaagcctcactgcgcagaacataccattgcctgacagtactgtgaaccaatcgggagaaagtaatatcttgaggaatggaatacatcaaacacaaccttgggaaattacatctaggtcgcatcactctagcgacaattttgctttgccaaataaatggtctggttacttgacagcagggaacacacagttatcaagcatcacagtaaacccatccacagaaaactatattcaaagtaatgctatttatcaatatcaatgtttagaaaacgttgtggctaaggtgccagtattgtctggaacacacaatacttccagtcaggagggccataaccacagcactgctgctactaatgagcatatcagaactacaagtgaggaagttgttagatcctttacccaacgagcaagtgaaccaaccacacatgggaactacaatctcaactcttctagagtaactgcagaagcaaactccactgagaagccaagaaaaaggggccgtccaagaaaagtagtaaaacccaatggggagccaaaagaaagaggtactaaagggaaacaaaatgttagtcatgaaaaacctacatcgcaaaaaggttcacatactgacattttgaaaactaatggtatttcttatgcttctgaaccttccactggaattactcctaggatggctattgtggagtcgaaaagctctgatcaagataaggaaattcatggaggtgtcattcctcaagctacagcaatatcagttgatcttttagatggcataattcaaaagattaagctcttaagcataagcagaccagacaatgttgtggcagagataccaaaagatgctcttgttccttatgaaggtgaatttggtgcactggttgcatttgaggggaagacaaagaaaaaccgttctcgggccaaagtgaacatcgatccagtcaccactatgatgtggaacttattaatgggaccagatatgggtgatggtgctgaagggttagacaaggataaagagaagtggcttgatgaagaaagaaaagtgttcagaggacgtgttgattcattcattgctcgtatgcatctagttcagggggacagacgtttctctcgatggaaaggatcagtcgtggactcagtcgtgggtgtatttcttacccagaatgtttcggatcatctttctagttctgctttcatggcggttgctgccaaatttcctgctaagccagaggtccctgaaaaacctgtggctgagatgtctcatactcctgaacagaaggatagttgctcttgctctggactgtttggtgattctatcaaattgcagggcaagatgttcattgaagagataagtgatgttagatcattaattactacagaagataatgaagaaagtaatagtaatgaattgattggaagctctgccgggtatggagtaaaccatgcaactggaggctgccatgtttcttataggaagtcactaactgaatcccatgaaaatgggctttcaggatctgtttttccaactaccggcttttcaagtgtagtagaaactgaagatggctcattagaggatgttatttcttctcaaaattctgctgtttcttcccagaattccccagattacctttttcacagaacggatccaataggttctagttcgttgcaaaatttcaccgaagagggctatatcatgagaaatatatccaacgggactggcagctcaactgactgctcagggtttctgccaattcaagatccaaaaggcacgcttggattgtcagaatattatggacataatcctcttctagtttcaggtgtgaacaagggtgtgttgcttgatctaaacagatcatatcagccattacatacttctatgccctatgttcagaatagcgagtctgatttcacaggtgtgtcatgtttcagccatatggataaatcattccacacaggccctaatagagtgaatctttctagtgttacacaatctgaggccagtctttaccctactgatcctttgcaacaagacgagttttcaccagtaattaaacaaaacttccaaccattatatagttcagacaaagtgtcattattcaaggagcactgttcctatggaaatgatttttcgaggaacaaaactgaagctgctattatggaaccacttgtctactcaaatcctcaagagctgtacactacctcaacagagcaaatgggtgttgaacaatttcaatcaggatgtggccaacaggacaatgatgtgagagttcagacaacatcatatgaaaggcatcagtcttcaaccttgtgtggaaaccagaactctcagttagagatcttgcaaggagttgcttcaggctcaacacagaagttcattgatactcaaaagagtccgtcagaagttcaacaaaacggatcaaaagctaagaaggtacggggtcgacctaaaacgaaaacttatgactgggacagtttacgaaaagaagtgttttctaatggtggggataaacaaagaaataatgatgcaagggatactgttgattgggaggcagttaggcaagcagaagtccgagaaatatctgaaactatcagagagagaggaatgaataacatgctagcagaacgaataaaggaattcctgaaccgattggtgacagaccatggaggtattgatcttgaatggctaagagatgttccaccggacaaagcaaaggacttccttctaagcattagagggcttggactcaaaagtgttgagtgcgttcgtctcttgacgctacatcatatggcttttccagtggacacaaatgttggtcggatatgtgtgaggcttggatgggtgccgcttcaaccattgccagagtctcttcagttgcacctattggaaatgtatgagcttcactaccaaatgattacttttggaaaggttttctgcacaaaaagtaagcctaattgcaattcatgtccattgagagctgaatgtaagcactttgctagtgcatttgcaagtgctaggcttgctcttcccgcacctgaagaaaaacgtttggctacatcggaggatccaaatgttgtagagttttgtcaccaaacatacataaattcaggggctgttggcgaacttgagtggagtgcgaactatcctaagcatgctgtttgtggtaacctgcagccgttcattgaggaaccactgagcccagaacctgaacctgaaaatgtagaggcgaaggacggtgcaatagaggatttctttaatgaagaccctgatgaaattcctactattaatcttaatattgaggagtttacacagaacttgaagaactatatgcaagcaaaccatgttgagattgagtatgctgacatgtcaaaggcattggttgccatcacccctgaagctgcttccattccaactccaaagctcaagaatgtcagtcgtcttaggacagaacaccaagtttatgaactgccagattcacaccctcttctggaaggatttgaacagagagaaccagatgatccctgtccatatcttctttccatatggaccccaggtgaaactgcacaatcaaccaatgcgcccaagacattctgtgattcaggggagactggtcaactatgtggaagtttaacatgctttagttgcaacagtttacgagaaatgcaggctcagaaagtcagaggaacactcttgataccatgccggacagcaatgagaggaagcttcccacttaatgggacatattttcaagttaatgaggtatttgctgaccattgttcaagccaaaatccaattgatgtcccacgaagttggatatgggacctcccaagacgaactgtttactttggaacctcagttcctacaatatttagaggtttaacgactgaagagatacaacaatgcttttggagaggattcgtttgtgtgaggggctttgataggacagtaagggcaccaaggcccctttatgcaaggttgcattttcctgccagcaaggttgttagaggcaaaaagcctggagcggcaagcgtcgaagaataataggtacatcgaagaaatatagaggagctaacaaaacggatggatagccctaaatgagatgctgacccaataagtcgccgaatcacctccaagttctaacccaatttttgaggcgacatgacctgttaaattatgttccatctatggtaacagcttagatgttcttgtgagtcgcatattctttactctgaaattcaatatagcaaatgaaaaaaaacacagtgcatagtctagttctaattgtacctgtgagtggaatcagttgttgtacaacatgaagatgggcctatttgtacaatggtcatacatgttctttgatcatatactataaacaatgtaacctcatcggccgttatttgattgtttcaaaacaaaggaaaagccttttcaattcatgttgttctctatagttaggaatttatattactttttattttttttataaattctacaagaagcatgaacaag

SEQ ID NO: 54735 - DNA, 4491 bp, Zea Mays
tgaagtcggctgatatgacgtacctcatttggataacaatttgatcggcaccataagttacagaaatatgcaggaggagctagggcaaaggatgcatgtacctcatggtatcaatctgtgtttctcaacttcttccgagctctttcaggtggaatcttccattgagctgggtactgcagaagtgaaccctgtaccatctgaaaagttatctgctaactcacaagctgttagagatgatgctggagcagttgaaggtattgacatgaatggaaaacctgtccaaaaacctaagaggaaaaaacataggccaaaggtcattaaagaaggacaatcagcaaagttgcagaagcctaaaactccaaagcctcccaaagaaaatgggaatcagcctactggaaagagaaagtatgtcaggaagaagggactaagcacaccagccaaacaaattccatcagaaggtgctgatacacacactagagctaaaccaggaatagcccaaagatgtttggactttgatgtggaggaccaacatggacatttggatctggtatcacaaacccaggaaacggagatacagactggtcctggggacacacagccatcaatatctggagttgaaagaagtaatgcccaggtatcatgccattggggttggggtggtacaagcagttctattatttcagctgacccaatagttgatatacaaggattacaggcagactgcatacctaaaagagtcaattttgatttgaacaattctatggcaagtcagatgccaaccaattattctagtcgaatggacagctctggacaatttttccagtttggtttaggagaaaaagttcaaacaaatcagttactggattataattgtaatctgccagctagacgtgtctctcatctcagcagctcggtcgatcatatgcgacaccccttagccaattttgaccaatacataagcacatctcaagtttgtacagaaaattcacgcagacattatcagatgcctagtagttctagaatttcagaaaataggacagcagcttctcagtatactgaaagggtgtcaatggggggcaatttcaatcccggagcttgtataggagaaggcacggtaatcaaacaaatggcccaatgttatagacttccagaaagtccacttgtacctcccaaacataatgaaagggatgtgatgaatggaaatctaaacgagttttctgtgtataatgattacttgaatttttctagcaatagtaactaccaaactggagcagcttttggttttcatgattctccagtctattcagatgttcttgcaatgggtaaaaaaagagaacacaatgctatcagtggtcaccagatttcttttgacatcgactttgttaactcaaatagtacaaggaagttctgtattgatgaccttctttccactagctctcaaacatcttattatcctgaagcatgcaaaaggatgagaccagagaatcatagcaatcagctcaatgtaactacgggaaagctttcttcttcatcagcattttctggtagtttgaatacaaataacgtttcaactataaaccctggaattggtaccttggctgatatacaaaggttgatggcccttgagaaatcacaagcttcacaacaaatgattgactttattacgtcgcaaaacaacatggccggtgaaagtactgaacttgctcagcaaaataattctgacaaaggatttgttgctttacataataaaaagttccaaagcctcactgcgcagaacataccattgcctgacagtactgtgaaccaatcgggagaaagtaatatcttgaggaatggaatacatcaaacacaaccttgggaaattacatctaggtcgcatcactctagcgacaattttgctttgccaaataaatggtctggttacttgacagcagggaacacacagttatcaagcatcacagtaaacccatccacagaaaactatattcaaagtaatgctatttatcaatatcaatgtttagaaaacgttgtggctaaggtgccagtattgtctggaacacacaatacttccagtcaggagggccataaccacagcactgctgctactaatgagcatatcagaactacaagtgaggaagttgttagatcctttacccaacgagcaagtgaaccaaccacacatgggaactacaatctcaactcttctagagtaactgcagaagcaaactccactgagaagccaagaaaaaggggccgtccaagaaaagtagtaaaacccaatggggagccaaaagaaagaggtactaaagggaaacaaaatgttagtcatgaaaaacctacatcgcaaaaaggttcacatactgacattttgaaaactaatggtatttcttatgcttctgaaccttccactggaattactcctaggatggctattgtggagtcgaaaagctctgatcaagataaggaaattcatggaggtgtcattcctcaagctacagcaatatcagttgatcttttagatggcataattcaaaagattaagctcttaagcataagcagaccagacaatgttgtggcagagataccaaaagatgctcttgttccttatgaaggtgaatttggtgcactggttgcatttgaggggaagacaaagaaaaaccgttctcgggccaaagtgaacatcgatccagtcaccactatgatgtggaacttattaatgggaccagatatgggtgatggtgctgaagggttagacaaggataaagagaagtggcttgatgaagaaagaaaagtgttcagaggacgtgttgattcattcattgctcgtatgcatctagttcagggggacagacgtttctctcgatggaaaggatcagtcgtggactcagtcgtgggtgtatttcttacccagaatgtttcggatcatctttctagttctgctttcatggcggttgctgccaaatttcctgctaagccagaggtccctgaaaaacctgtggctgagatgtctcatactcctgaacagaaggatagttgctcttgctctggactgtttggtgattctatcaaattgcagggcaagatgttcattgaagagataagtgatgttagatcattaattactacagaagataatgaagaaagtaatagtaatgaattgattggaagctctgccgggtatggagtaaaccatgcaactggaggctgccatgtttcttataggaagtcactaactgaatcccatgaaaatgggctttcaggatctgtttttccaactaccggcttttcaagtgtagtagaaactgaagatggctcattagaggatgttatttcttctcaaaattctgctgtttcttcccagaattccccagattacctttttcacagaacggatccaataggttctagttcgttgcaaaatttcaccgaagagggctatatcatgagaaatatatccaacgggactggcagctcaactgactgctcagggtttctgccaattcaagatccaaaaggcacgcttggattgtcagaatattatggacataatcctcttctagtttcaggtgtgaacaagggtgtgttgcttgatctaaacagatcatatcagccattacatacttctatgccctatgttcagaatagcgagtctgatttcacaggtgtgtcatgtttcagccatatggataaatcattccacacaggccctaatagagtgaatctttctagtgttacacaatctgaggccagtctttaccctactgatcctttgcaacaagacgagttttcaccagtaattaaacaaaacttccaaccattatatagttcagacaaagtgtcattattcaaggagcactgttcctatggaaatgatttttcgaggaacaaaactgaagctgctattatggaaccacttgtctactcaaatcctcaagagctgtacactacctcaacagagcaaatgggtgttgaacaatttcaatcaggatgtggccaacaggacaatgatgtgagagttcagacaacatcatatgaaaggcatcagtcttcaaccttgtgtggaaaccagaactctcagttagagatcttgcaaggagttgcttcaggctcaacacagaagttcattgatactcaaaagagtccgtcagaagttcaacaaaacggatcaaaagctaagaaggtacggggtcgacctaaaacgaaaacttatgactgggacagtttacgaaaagaagtgttttctaatggtggggataaacaaagaaataatgatgcaagggatactgttgattgggaggcagttaggcaagcagaagtccgagaaatatctgaaactatcagagagagaggaatgaataacatgctagcagaacgaataaaggaattcctgaaccgattggtgacagaccatggaggtattgatcttgaatggctaagagatgttccaccggacaaagcaaagcaaaatgcgtcagcaccggtctagggcta

SEQ ID NO: 54736 - DNA, 4775 bp, Zea Mays
cacccagagtcgcagcgacccaaccacctcccccccccgtccctctctctctcccttctgctggtctagttttggtttccctctcgctttccttcgctcctaggcgcggctccggcgggcggaagaggagggagaggcaggcggcggcccccggcagttcctccgtccgcggagcccagagggaggagggggaggcctggtctggggctgtccgctgaatctgcttctccgaagatcgggtggaccacgggactcggcgggcgcgcccgatctgctccgccgtcgaggtgaagtcggctgatatgacgtacctcatttggataacaatttgatcggcaccataagttacagaaatatgcaggaggagctagggcaaaggatgcatgtacctcatggtatcaatctgtgtttctcaacttcttccgagctctttcaggtggaatcttccattgagctgggtactgcagaagtgaaccctgtaccatctgaaaagttatctgctaactcacaagctgttagagatgatgctggagcagttgaaggtattgacatgaatggaaaacctgtccaaaaacctaagaggaaaaaacataggccaaaggtcattaaagaaggacaatcagcaaagttgcagaagcctaaaactccaaagcctcccaaagaaaatgggaatcagcctactggaaagagaaagtatgtcaggaagaagggactaagcacaccagccaaacaaattccatcagaaggtgctgatacacacactagagctaaaccaggaatagcccaaagatgtttggactttgatgtggaggaccaacatggacatttggatctggtatcacaaacccaggaaacggagatacagactggtcctggggacacacagccatcaatatctggagttgaaagaagtaatgcccaggtatcatgccattggggttggggtggtacaagcagttctattatttcagctgacccaatagttgatatacaaggattacaggcagactgcatacctaaaagagtcaattttgatttgaacaattctatggcaagtcagatgccaaccaattattctagtcgaatggacagctctggacaatttttccagtttggtttaggagaaaaagttcaaacaaatcagttactggattataattgtaatctgccagctagacgtgtctctcatctcagcagctcggtcgatcatatgcgacaccccttagccaattttgaccaatacataagcacatctcaagtttgtacagaaaattcacgcagacattatcagatgcctagtagttctagaatttcagaaaataggacagcagcttctcagtatactgaaagggtgtcaatggggggcaatttcaatcccggagcttgtataggagaaggcacggtaatcaaacaaatggcccaatgttatagacttccagaaagtccacttgtacctcccaaacataatgaaagggatgtgatgaatggaaatctaaacgagttttctgtgtataatgattacttgaatttttctagcaatagtaactaccaaactggagcagcttttggttttcatgattctccagtctattcagatgttcttgcaatgggtaaaaaaagagaacacaatgctatcagtggtcaccagatttcttttgacatcgactttgttaactcaaatagtacaaggaagttctgtattgatgaccttctttccactagctctcaaacatcttattatcctgaagcatgcaaaaggatgagaccagagaatcatagcaatcagctcaatgtaactacgggaaagctttcttcttcatcagcattttctggtagtttgaatacaaataacgtttcaactataaaccctggaattggtaccttggctgatatacaaaggttgatggcccttgagaaatcacaagcttcacaacaaatgattgactttattacgtcgcaaaacaacatggccggtgaaagtactgaacttgctcagcaaaataattctgacaaaggatttgttgctttacataataaaaagttccaaagcctcactgcgcagaacataccattgcctgacagtactgtgaaccaatcgggagaaagtaatatcttgaggaatggaatacatcaaacacaaccttgggaaattacatctaggtcgcatcactctagcgacaattttgctttgccaaataaatggtctggttacttgacagcagggaacacacagttatcaagcatcacagtaaacccatccacagaaaactatattcaaagtaatgctatttatcaatatcaatgtttagaaaacgttgtggctaaggtgccagtattgtctggaacacacaatacttccagtcaggagggccataaccacagcactgctgctactaatgagcatatcagaactacaagtgaggaagttgttagatcctttacccaacgagcaagtgaaccaaccacacatgggaactacaatctcaactcttctagagtaactgcagaagcaaactccactgagaagccaagaaaaaggggccgtccaagaaaagtagtaaaacccaatggggagccaaaagaaagaggtactaaagggaaacaaaatgttagtcatgaaaaacctacatcgcaaaaaggttcacatactgacattttgaaaactaatggtatttcttatgcttctgaaccttccactggaattactcctaggatggctattgtggagtcgaaaagctctgatcaagataaggaaattcatggaggtgtcattcctcaagctacagcaatatcagttgatcttttagatggcataattcaaaagattaagctcttaagcataagcagaccagacaatgttgtggcagagataccaaaagatgctcttgttccttatgaaggtgaatttggtgcactggttgcatttgaggggaagacaaagaaaaaccgttctcgggccaaagtgaacatcgatccagtcaccactatgatgtggaacttattaatgggaccagatatgggtgatggtgctgaagggttagacaaggataaagagaagtggcttgatgaagaaagaaaagtgttcagaggacgtgttgattcattcattgctcgtatgcatctagttcagggggacagacgtttctctcgatggaaaggatcagtcgtggactcagtcgtgggtgtatttcttacccagaatgtttcggatcatctttctagttctgctttcatggcggttgctgccaaatttcctgctaagccagaggtccctgaaaaacctgtggctgagatgtctcatactcctgaacagaaggatagttgctcttgctctggactgtttggtgattctatcaaattgcagggcaagatgttcattgaagagataagtgatgttagatcattaattactacagaagataatgaagaaagtaatagtaatgaattgattggaagctctgccgggtatggagtaaaccatgcaactggaggctgccatgtttcttataggaagtcactaactgaatcccatgaaaatgggctttcaggatctgtttttccaactaccggcttttcaagtgtagtagaaactgaagatggctcattagaggatgttatttcttctcaaaattctgctgtttcttcccagaattccccagattacctttttcacagaacggatccaataggttctagttcgttgcaaaatttcaccgaagagggctatatcatgagaaatatatccaacgggactggcagctcaactgactgctcagggtttctgccaattcaagatccaaaaggcacgcttggattgtcagaatattatggacataatcctcttctagtttcaggtgtgaacaagggtgtgttgcttgatctaaacagatcatatcagccattacatacttctatgccctatgttcagaatagcgagtctgatttcacaggtgtgtcatgtttcagccatatggataaatcattccacacaggccctaatagagtgaatctttctagtgttacacaatctgaggccagtctttaccctactgatcctttgcaacaagacgagttttcaccagtaattaaacaaaacttccaaccattatatagttcagacaaagtgtcattattcaaggagcactgttcctatggaaatgatttttcgaggaacaaaactgaagctgctattatggaaccacttgtctactcaaatcctcaagagctgtacactacctcaacagagcaaatgggtgttgaacaatttcaatcaggatgtggccaacaggacaatgatgtgagagttcagacaacatcatatgaaaggcatcagtcttcaaccttgtgtggaaaccagaactctcagttagagatcttgcaaggagttgcttcaggctcaacacagaagttcattgatactcaaaagagtccgtcagaagttcaacaaaacggatcaaaagctaagaaggtacggggtcgacctaaaacgaaaacttatgactgggacagtttacgaaaagaagtgttttctaatggtggggataaacaaagaaataatgatgcaagggatactgttgattgggaggcagttaggcaagcagaagtccgagaaatatctgaaactatcagagagagaggaatgaataacatgctagcagaacgaataaaggaattcctgaaccgattggtgacagaccatggaggtattgatcttgaatggctaagagatgttccaccggacaaagcaaaaaagatctacgcggatcatgtgagta

SEQ ID NO: 54737 - DNA, 4983 bp, Zea Mays
agtacccactctctctgtgccccctctcctttctctctctagatagactgtggttcctctcacccagagtcgcagcgacccaaccacctcccccccccgtccctctctctctcccttctgctggtctagttttggtttccctctcgctttccttcgctcctaggcgcggctccggcgggcggaagaggagggagaggcaggcggcggcccccggcagttcctccgtccgcggagcccagagggaggagggggaggcctggtctggggctgtccgctgaatctgcttctccgaagatcgggtggaccacgggactcggcgggcgcgcccgatctgctccgccgtcgaggtgaagtcggctgatatgacgtacctcatttggataacaatttgatcggcaccataagttacagaaatatgcaggaggagctagggcaaaggatgcatgtacctcatggtatcaatctgtgtttctcaacttcttccgagctctttcaggtggaatcttccattgagctgggtactgcagaagtgaaccctgtaccatctgaaaagttatctgctaactcacaagctgttagagatgatgctggagcagttgaaggtattgacatgaatggaaaacctgtccaaaaacctaagaggaaaaaacataggccaaaggtcattaaagaaggacaatcagcaaagttgcagaagcctaaaactccaaagcctcccaaagaaaatgggaatcagcctactggaaagagaaagtatgtcaggaagaagggactaagcacaccagccaaacaaattccatcagaaggtgctgatacacacactagagctaaaccaggaatagcccaaagatgtttggactttgatgtggaggaccaacatggacatttggatctggtatcacaaacccaggaaacggagatacagactggtcctggggacacacagccatcaatatctggagttgaaagaagtaatgcccaggtatcatgccattggggttggggtggtacaagcagttctattatttcagctgacccaatagttgatatacaaggattacaggcagactgcatacctaaaagagtcaattttgatttgaacaattctatggcaagtcagatgccaaccaattattctagtcgaatggacagctctggacaatttttccagtttggtttaggagaaaaagttcaaacaaatcagttactggattataattgtaatctgccagctagacgtgtctctcatctcagcagctcggtcgatcatatgcgacaccccttagccaattttgaccaatacataagcacatctcaagtttgtacagaaaattcacgcagacattatcagatgcctagtagttctagaatttcagaaaataggacagcagcttctcagtatactgaaagggtgtcaatggggggcaatttcaatcccggagcttgtataggagaaggcacggtaatcaaacaaatggcccaatgttatagacttccagaaagtccacttgtacctcccaaacataatgaaagggatgtgatgaatggaaatctaaacgagttttctgtgtataatgattacttgaatttttctagcaatagtaactaccaaactggagcagcttttggttttcatgattctccagtctattcagatgttcttgcaatgggtaaaaaaagagaacacaatgctatcagtggtcaccagatttcttttgacatcgactttgttaactcaaatagtacaaggaagttctgtattgatgaccttctttccactagctctcaaacatcttattatcctgaagcatgcaaaaggatgagaccagagaatcatagcaatcagctcaatgtaactacgggaaagctttcttcttcatcagcattttctggtagtttgaatacaaataacgtttcaactataaaccctggaattggtaccttggctgatatacaaaggttgatggcccttgagaaatcacaagcttcacaacaaatgattgactttattacgtcgcaaaacaacatggccggtgaaagtactgaacttgctcagcaaaataattctgacaaaggatttgttgctttacataataaaaagttccaaagcctcactgcgcagaacataccattgcctgacagtactgtgaaccaatcgggagaaagtaatatcttgaggaatggaatacatcaaacacaaccttgggaaattacatctaggtcgcatcactctagcgacaattttgctttgccaaataaatggtctggttacttgacagcagggaacacacagttatcaagcatcacagtaaacccatccacagaaaactatattcaaagtaatgctatttatcaatatcaatgtttagaaaacgttgtggctaaggtgccagtattgtctggaacacacaatacttccagtcaggagggccataaccacagcactgctgctactaatgagcatatcagaactacaagtgaggaagttgttagatcctttacccaacgagcaagtgaaccaaccacacatgggaactacaatctcaactcttctagagtaactgcagaagcaaactccactgagaagccaagaaaaaggggccgtccaagaaaagtagtaaaacccaatggggagccaaaagaaagaggtactaaagggaaacaaaatgttagtcatgaaaaacctacatcgcaaaaaggttcacatactgacattttgaaaactaatggtatttcttatgcttctgaaccttccactggaattactcctaggatggctattgtggagtcgaaaagctctgatcaagataaggaaattcatggaggtgtcattcctcaagctacagcaatatcagttgatcttttagatggcataattcaaaagattaagctcttaagcataagcagaccagacaatgttgtggcagagataccaaaagatgctcttgttccttatgaaggtgaatttggtgcactggttgcatttgaggggaagacaaagaaaaaccgttctcgggccaaagtgaacatcgatccagtcaccactatgatgtggaacttattaatgggaccagatatgggtgatggtgctgaagggttagacaaggataaagagaagtggcttgatgaagaaagaaaagtgttcagaggacgtgttgattcattcattgctcgtatgcatctagttcagggggacagacgtttctctcgatggaaaggatcagtcgtggactcagtcgtgggtgtatttcttacccagaatgtttcggatcatctttctagttctgctttcatggcggttgctgccaaatttcctgctaagccagaggtccctgaaaaacctgtggctgagatgtctcatactcctgaacagaaggatagttgctcttgctctggactgtttggtgattctatcaaattgcagggcaagatgttcattgaagagataagtgatgttagatcattaattactacagaagataatgaagaaagtaatagtaatgaattgattggaagctctgccgggtatggagtaaaccatgcaactggaggctgccatgtttcttataggaagtcactaactgaatcccatgaaaatgggctttcaggatctgtttttccaactaccggcttttcaagtgtagtagaaactgaagatggctcattagaggatgttatttcttctcaaaattctgctgtttcttcccagaattccccagattacctttttcacagaacggatccaataggttctagttcgttgcaaaatttcaccgaagagggctatatcatgagaaatatatccaacgggactggcagctcaactgactgctcagggtttctgccaattcaagatccaaaaggcacgcttggattgtcagaatattatggacataatcctcttctagtttcaggtgtgaacaagggtgtgttgcttgatctaaacagatcatatcagccattacatacttctatgccctatgttcagaatagcgagtctgatttcacaggtgtgtcatgtttcagccatatggataaatcattccacacaggccctaatagagtgaatctttctagtgttacacaatctgaggccagtctttaccctactgatcctttgcaacaagacgagttttcaccagtaattaaacaaaacttccaaccattatatagttcagacaaagtgtcattattcaaggagcactgttcctatggaaatgatttttcgaggaacaaaactgaagctgctattatggaaccacttgtctactcaaatcctcaagagctgtacactacctcaacagagcaaatgggtgttgaacaatttcaatcaggatgtggccaacaggacaatgatgtgagagttcagacaacatcatatgaaaggcatcagtcttcaaccttgtgtggaaaccagaactctcagttagagatcttgcaaggagttgcttcaggctcaacacagaagttcattgatactcaaaagagtccgtcagaagttcaacaaaacggatcaaaagctaagaaggtacggggtcgacctaaaacgaaaacttatgactgggacagtttacgaaaagaagtgttttctaatggtggggataaacaaagaaataatgatgcaagggatactgttgattgggaggcagttaggcaagcagaagtccgagaaatatctgaaactatcagagagagaggaatgaataacatgctagcagaacgaataaaggaattcctgaaccgattggtgacagaccatggaggtattgatcttgaatggctaagagatgttccaccggacaaagcaaacaaggcacgccagcgagtagaaggctacaaacagtatcagagccgctatcgttgttgggtcgtgcttgcaaccatgcagcacagacgaactgcctcactactatgtcgccgttaggagatgaggagcggctctagcaatggcgatcgcagcctagtgatccatcgggtcatgag

SEQ ID NO: 54738 - DNA, 1823 bp, Zea Mays
attccttgtgtgatacgagtagcaacttacgcatagagtcccaattacgccttatcttttttctttgcaggaagtggattatttgcatgctcaatctatgttcattgctgaagttacctttcaaattcaaattctcgggtagagccacctttaattgtgatgtacagagatatcagtatcattatctaaaatattatcacagaactgaggaaggagaaaaaagaggtcccgccggtcccactcgcaccacgacggctccgacggacgctgatgggaggctctcatccatcacctacctttcctcgacatggatccacaggtctagactgtaaaagagtaaactggactggaattttacattctaggtgatacaatttacttttattggatctactaggagaatttcatataggacttgtaaaatgtttggttgtttgtgtctttgtttccctcattatgatctgctaaaacaatgagatattctgttcttgtagacacttatgctaaaatgcctctatgtttctgactctgaacatgtccagagtgcatcaccttgtctattcagtataaagggacaatgcagttcttaccctttcgttgtgttactcaggtggagcatcttcaaacaagaacaaccgggtacggttcctcaaatcctctgtttggtggagcatcttcaaacaagaacaaccggggatgcttctagctctggtactcttttttgataacaggaagttcaaggatgtgaattttccaccagctatgtctcccccaaaacggtgggatcatgtgtggtatgctctaacagggtatggtattggcttggtagctgcactagatgctgggatcttgtcttagtctcctcaacagccttactgtacctggtgatgtccatgtcaactgggctagccaacatgagtttgaaacataacagtttgatgaggaagtactactactattacaattgatgcttcagttctacgacttctttcaaaccaagcgtccacacatatcttgagcattctcactgggcttctgtccttcatgatggacgatgcactgacaactggaagcatcaagacatcagatgcagaaaagaggcgtttagcaaaagcttcccttgcctacaattgtgagagcaaaaactgtccgcacttcaggaaacttttcccagagtatgttgagaagtacaatcaacagctacaattggagaacactgctgcagagccggtgcctcaggagaatcctgcacctgctccatcccctgctgcccagcaagccccgaccgtggccaatagggcacaaccactggcggaggcgcgccgtgacaagaaccagaagaaggcggtgcccttctggatggtgctgagtgcaaagacaaacctgaacgtcgagcaggttttcttttctatagcaagggatatcaaacagagactttcagagactgattccaagcctgaggatcgaactatcaagatcaaggctgaaggggaagctgatgcagcagaggcgcagaaatcagcttgctgcgactcttgaacggttgtggccgcaggatagtttcataattttttttctttgccagcaagtctctccttgtgcttgagctatcacaattgctgtggtttggacaagtgggtgttacgtcagaactaattacttgctatattgcggaaaccctgctcttgataacgacgatcgcatatgcaactgggcgggtgggtggtttgatctcgtgatggctactgctatggctgtagagtcatagagatggcattggagttgtatggtgcatgttatttaaaaaacatgaggaagtacta

SEQ ID NO: 54739 - DNA, 1450 bp, Zea Mays
ggtgatacaatttacttttattggatctactaggagaatttcatataggacttgtaaaatgtttggttgtttgtgtctttgtttccctcattatgatctgctaaaacaatgagatattctgttcttgtagacacttatgctaaaatgcctctatgtttctgactctgaacatgtccagagtgcatcaccttgtctattcagtataaagggacaatgcagttcttaccctttcgttgtgttactcaggtggagcatcttcaaacaagaacaaccgggtacggttcctcaaatcctctgtttggtggagcatcttcaaacaagaacaaccggggatgcttctagctctggtactcttttttgataacaggaagttcaaggatgtgaattttccaccagctatgtctcccccaaaacggtgggatcatgtgtggtatgctctaacagggtatggtattggcttggtagctgcactagatgctgggatcttgtcttagtctcctcaacagccttactgtacctgcatggagccatggtatagtgatagtgtgaccagttgccccccctcgaaatccactcctttctcatctatatttgcttcaggtgatgtccatgtcaactgggctagccaacatgagtttgaaacataacagtttgatgaggaagtactactactattacaattgatgcttcagttctacgacttctttcaaaccaagcgtccacacatatcttgagcattctcactgggcttctgtccttcatgatggacgatgcactgacaactggaagcatcaagacatcagatgcagaaaagaggcgtttagcaaaagcttcccttgcctacaattgtgagagcaaaaactgtccgcacttcaggaaacttttcccagagtatgttgagaagtacaatcaacagctacaattggagaacactgctgcagagccggtgcctcaggagaatcctgcacctgctccatcccctgctgcccagcaagccccgaccgtggccaatagggcacaaccactggcggaggcgcgccgtgacaagaaccagaagaaggcggtgcccttctggatggtgctggtcatgttttcagttttcggggctgtgatggcgttgcccctaatgcaactttgacaataataaagacaataagaacgtgtgatgctagggccgtaattttgtatagttttctattggtttgtctgagtgactcagttggtcccctagactacctaccacctcggagtcgtattgatgaacctgtgatggtatatctgaagaacttttgttctcagttctcactcttgagttgcagcgccagaaggtcgttcatttttgctttctgtttccgaaatcgtatacttaattttttttgttgcctcccagttcgtctttgtgatgtgtgctgacttcaaggttgagttcgcattttcacatcctctttcc

SEQ ID NO: 54740 - DNA, 704 bp, Zea Mays
gcaggaagtggattatttgcatgctcaatctatgttcattgctgaagttacctttcaaattcaaattctcgggtagagccacctttaattgtgatgtacagagatatcagtatcattatctaaaatattatcacagaactgaggaaggagaaaaaaggtggagcatcttcaaacaagaacaaccgggtacggttcctcaaatcctctgtttggtggagcatcttcaaacaagaacaaccggggatgcttctagctctggtactcttttttgataacaggaagttcaaggatgtgaattttccaccagctatgtctcccccaaaacggtgggatcatgtgtggtatgctctaacagggtatggtattggcttggtagctgcactagatgctgggatcttgtcttagtctcctcaacagccttactgtacctggtaagtgttatcagattatacggtcaggatttggacattattgccatttttatgttaaattatgcttctctgacttggtcatgtgtacgtcatagcatggagccatggtatagtgatagtgtgaccagttgccccccctcgaaatccactcctttctcatctatatttgcttcaggtgatgtccatgtcaactgggctagccaacatgagtttgaaacataacagatttgaagcaaacaaccatatctttcccttttctcatccccatatttg

SEQ ID NO: 54741 - DNA, 836 bp, Zea Mays
aaggaaactgacagacaaagggcgtgttcggctggctacaagccgacactgttgcagctgtttggactgctgcagctgcaatccatagagagaaaaatactgtagaagccgcagccgcagccggattgcagccgcagcaagccgcagcgacaagctgaaaataattatggtgacaaatccaagcccacgcggccgaggagactcccccctccacttgggagttgggatccaccaaccttcacccactcgcagcaccagtcatggaggtcgccggcgcccgcgagcccggtagcggaggaggaggaggtggcggcggtggcggaccagccccgttcctgctgaagacgtacgagatggtggacgacccgtcgagcgacgcggtggtgtcatggagcgacgcatccgacgggagcttcgtcgtctggaaccagcccgagttcgccgcgcggatgctgcctacctacttcaagcacaacaacttctccagcttcatccgccagctcaacacatacgtgcgtaacaacggctccacctccctgctctgcgctgtctggctcttgtatatggtgcgctgctcgtgttggtgatccggggcactcctttggttggagtggtgggggatttgggcgttaaggttgcgcgggtgagagggatcgtcctcctttggttggagtaaaggtgaattttgtgctgtttcgttttggggaattttgcgtcgtgatttgggctcagaggagccttcatttcagtagccttctgccgaattgttagtttatctgggtttctattttttggtagattgattggttggaaacatagaattgggccaaaataaa

SEQ ID NO: 54742 - DNA, 2160 bp, Zea Mays
gagagaccatcagatcacggctccagatccgccgtacgcataagccccagctgccctacctgcgcactcgcctccgcctccatctccttcgccaccagacctcaagcgcgccacacgccgccgcacgggagccgcgcgccgcacccgccgccgcttctcctcaaaaccagaggtctccccacgtcccccgatccagcgtctccatggccgcgccgcagcctgtcgcccccgcctccgaggcgccgccgtctgcgcaaatggtgggcaacgcgttcgtgcagcagtactacctcgtgctgcaccagtcgccggatctggtgtaccgcttctaccaggaggccagccgcctcgctcgccccgcatccgccgccggagccgccggcatggactcggtcaccaccatggaggcgatcagcgagaagataatggagatggacgtgtccaaagcggagatcaggacggtggactcgcaggagtctttaggcggcggcgtcgctgtgctcgtcacaggtcacctcaccggccgtgatggagtgcgccgcgagttctcgcaatccttcttcctcgcgccgcaggagatgggctacttcgtgctcaacgacatcttccgcttcgtcggggacatccctgcctctaccgccgttgaggcgcagccagaggcggttgctgtagtcccgcctgtggctgctccacttgccaacggcacagctactcctgctgtggagcctgccactcctgatgatcatggtgccgtgccacagcaggaacatcatgttgtggaccgatcactgcctcaacctgaagaggacgaggctgaggtttacaatccgccgcaagaggaagtagtggatgaggaacagcctgttgctgaagtgataaatgaagttccaaacaatgtggcacctgtggtggcaactacagttgcctcagtgttgcaggaggaggcaccaaagaagtcatacgcctcaattgtcaaaatcatgaaagaagttccattgcctgctcctgcgcctcctactaggccttcaccacccaaactagagaagcagtctcctcctcctgctactcctgtcacagatgtaccgcctttcagttctaaccccgagaacatcaatatccaagagcctgaaggaatttacctttaaatgccactgaaactcaactggaggatgagttcaagaagtttggtaccattaagcaaaatggcattcaagtcagaagcaataagattcaagggttctgttatggattcgttgaattcgaggattctacttctgtccagagtgctatagaggcttcccctgtagcaattggcggtcgtcaatgttacgttgaggaaaagagagcacctggttcacgaggctccagcagaggcggcaggttcgcaccaggcaggggcaacagtttcagaagtgaaggtaccagagggcgtggtaactacggtggaggaaggggctacgggaggggtgaatttagttacaggtctgattacggggtcagaagtggtggcagaggtggctcattacgtggagctgatgttggctaccagagggttgaccatgctggatatgctggtggtcgtggtagccgcacagcagctgctggcgcaccttcaaaatgaggggcaccatagctgttgcgcgtcttttgggagtgttgttcggtggctctaagattattttgaagttggcatagaggctcatcaattggttcagtgcgggattacaagagaagcctggatacaaattatgagggttcctgtccttgatcattatttttgcaggcagcaaaaatggttactaattgagtaattgtagattagacacctattcagatgtagttctagtttcggtcgtcgactgatgtgccttgttgtcttttttgcaacgcatcatctaggtttttgttactgctggtattcatttattctgttgaattgaggttaatagcttttttagacttggaataagtgacagtttagggaagttaatagtggctagggtaaggatttaaatgtttctttgcaatgtgtcgacgccaaaagattctcttagtatttattatactgacaatattggtctttttttgaattcagtatatagttacatatatttacaaagggaatacggcagaacaaaagttttttttcttaaaaaaaca

SEQ ID NO: 54743 - DNA, 2176 bp, Zea Mays
ctcaggttcccagacgagagaccatcagatcacggctccagatccgccgtacgcataagccccagctgccctacctgcgcactcgcctccgcctccatctccttcgccaccagacctcaagcgcgccacacgccgccgcacgggagccgcgcgccgcacccgccgccgcttctcctcaaaaccagaggtctccccacgtcccccgatccagcgtctccatggccgcgccgcagcctgtcgcccccgcctccgaggcgccgccgtctgcgcaaatggtgggcaacgcgttcgtgcagcagtactacctcgtgctgcaccagtcgccggatctggtgtaccgcttctaccaggaggccagccgcctcgctcgccccgcatccgccgccggagccgccggcatggactcggtcaccaccatggaggcgatcagcgagaagataatggagatggacgtgtccaaagcggagatcaggacggtggactcgcaggagtctttaggcggcggcgtcgctgtgctcgtcacaggtcacctcaccggccgtgatggagtgcgccgcgagttctcgcaatccttcttcctcgcgccgcaggagatgggctacttcgtgctcaacgacatcttccgcttcgtcggggacatccctgcctctaccgccgttgaggcgcagccagaggcggttgctgtagtcccgcctgtggctgctccacttgccaacggcacagctactcctgctgtggagcctgccactcctgatgatcatcatgttgtggaccgatcactgcctcaacctgaagaggacgaggctgaggtttacaatccgccgcaagaggaagtagtggatgaggaacagcctgttgctgaagtgataaatgaagttccaaacaatgtggcacctgtggtggcaactacagttgcctcagtgttgcaggaggaggcaccaaagaagtcatacgcctcaattgtcaaaatcatgaaagaagttccattgcctgctcctgcgcctcctactaggccttcaccacccaaactagagaagcagtctcctcctcctgctactcctgtcacagatgtaccgcctttcagttctaaccccgagaacatcaatatccaagagcctgaagttgatgcacatgcaatatatgtgaggaatttacctttaaatgccactgaaactcaactggaggatgagttcaagaagtttggtaccattaagcaaaatggcattcaagtcagaagcaataagattcaagggttctgttatggattcgttgaattcgaggattctacttctgtccagagtgctatagaggcttcccctgtagcaattggcggtcgtcaatgttacgttgaggaaaagagagcacctggttcacgaggctccagcagaggcggcaggttcgcaccaggcaggggcaacagtttcagaagtgaaggtaccagagggcgtggtaactacggtggaggaaggggctacgggaggggtgaatttagttacaggtctgattacggggtcagaagtggtggcagaggtggctcattacgtggagctgatgttggctaccagagggttgaccatgctggatatgctggtggtcgtggtagccgcacagcagctgctggcgcaccttcaaaatgaggggcaccatagctgttgcgcgtcttttgggagtgttgttcggtggctctaagattattttgaagttggcatagaggctcatcaattggttcagtgcgggattacaagagaagcctggatacaaattatgagggttcctgtccttgatcattatttttgcaggcagcaaaaatggttactaattgagtaattgtagattagacacctattcagatgtagttctagtttcggtcgtcgactgatgtgccttgttgtcttttttgcaacgcatcatctaggtttttgttactgctggtattcatttattctgttgaattgaggttaatagcttttttagacttggaataagtgacagtttagggaagttaatagtggctagggtaaggatttaaatgtttctttgcaatgtgtcgacgccaaaagattctcttagtatttattatactgacaatattggtctttttttgaattcagtatatagttacatatatttacaaagggaatacggcagaacaaaagttttttttcttaaaaaaaca

SEQ ID NO: 54744 - DNA, 2248 bp, Zea Mays
ctttttttgggtgaattaggcgtccagctactgctagcgtgaaaagacctcaggttcccagacgagagaccatcagatcacggctccagatccgccgtacgcataagccccagctgccctacctgcgcactcgcctccgcctccatctccttcgccaccagacctcaagcgcgccacacgccgccgcacgggagccgcgcgccgcacccgccgccgcttctcctcaaaaccagaggtctccccacgtcccccgatccagcgtctccatggccgcgccgcagcctgtcgcccccgcctccgaggcgccgccgtctgcgcaaatggtgggcaacgcgttcgtgcagcagtactacctcgtgctgcaccagtcgccggatctggtgtaccgcttctaccaggaggccagccgcctcgctcgccccgcatccgccgccggagccgccggcatggactcggtcaccaccatggaggcgatcagcgagaagataatggagatggacgtgtccaaagcggagatcaggacggtggactcgcaggagtctttaggcggcggcgtcgctgtgctcgtcacaggtcacctcaccggccgtgatggagtgcgccgcgagttctcgcaatccttcttcctcgcgccgcaggagatgggctacttcgtgctcaacgacatcttccgcttcgtcggggacatccctgcctctaccgccgttgaggcgcagccagaggcggttgctgtagtcccgcctgtggctgctccacttgccaacggcacagctactcctgctgtggagcctgccactcctgatgatcatggtgccgtgccacagcaggaacatcatgttgtggaccgatcactgcctcaacctgaagaggacgaggctgaggtttacaatccgccgcaagaggaagtagtggatgaggaacagcctgttgctgaagtgataaatgaagttccaaacaatgtggcacctgtggtggcaactacagttgcctcagtgttgcaggaggaggcaccaaagaagtcatacgcctcaattgtcaaaatcatgaaagaagttccattgcctgctcctgcgcctcctactaggccttcaccacccaaactagagaagcagtctcctcctcctgctactcctgtcacagatgtaccgcctttcagttctaaccccgagaacatcaatatccaagagcctgaagttgatgcacatgcaatatatgtgaggaatttacctttaaatgccactgaaactcaactggaggatgagttcaagaagtttggtaccattaagcaaaatggcattcaagtcagaagcaataagattcaagggttctgttatggattcgttgaattcgaggattctacttctgtccagagtgctatagaggcttcccctgtagcaattggcggtcgtcaatgttacgttgaggaaaagagagcacctggttcacgaggctccagcagaggcggcaggttcgcaccaggcaggggcaacagtttcagaagtgaaggtaccagagggcgtggtaactacggtggaggaaggggctacgggaggggtgaatttagttacaggtctgattacggggtcagaagtggtggcagaggtggctcattacgtggagctgatgttggctaccagagggttgaccatgctggatatgctggtggtcgtggtagccgcacagcagctgctggcgcaccttcaaaatgaggggcaccatagctgttgcgcgtcttttgggagtgttgttcggtggctctaagattattttgaagttggcatagaggctcatcaattggttcagtgcgggattacaagagaagcctggatacaaattatgagggttcctgtccttgatcattatttttgcaggcagcaaaaatggttactaattgagtaattgtagattagacacctattcagatgtagttctagtttcggtcgtcgactgatgtgccttgttgtcttttttgcaacgcatcatctaggtttttgttactgctggtattcatttattctgttgaattgaggttaatagcttttttagacttggaataagtgacagtttagggaagttaatagtggctagggtaaggatttaaatgtttctttgcaatgtgtcgacgccaaaagattctcttagtatttattatactgacaatattggtctttttttgaattcagtatatagttacatatatttacaaagggaatacggcagaacaaaagttttttttcttaaaaaaaca

SEQ ID NO: 54745 - DNA, 1464 bp, Zea Mays
aaagacctcaggttcccagacgagagaccatcagatcacggctccagatccgccgtacgcataagccccagctgccctacctgcgcactcgcctccgcctccatctccttcgccaccagacctcaagcgcgccacacgccgccgcacgggagccgcgcgccgcacccgccgccgcttctcctcaaaaccagaggtctccccacgtcccccgatccagcgtctccatggccgcgccgcagcctgtcgcccccgcctccgaggcgccgccgtctgcgcaaatggtgggcaacgcgttcgtgcagcagtactacctcgtgctgcaccagtcgccggatctggtgtaccgcttctaccaggaggccagccgcctcgctcgccccgcatccgccgccggagccgccggcatggactcggtcaccaccatggaggcgatcagcgagaagataatggagatggacgtgtccaaagcggagatcaggacggtggactcgcaggagtctttaggcggcggcgtcgctgtgctcgtcacaggtcacctcaccggccgtgatggagtgcgccgcgagttctcgcaatccttcttcctcgcgccgcaggagatgggctacttcgtgctcaacgacatcttccgcttcgtcggggacatccctgcctctaccgccgttgaggcgcagccagaggcggttgctgtagtcccgcctgtggctgctccacttgccaacggcacagctactcctgctgtggagcctgccactcctgatgatcatggtgccgtgccacagcaggaacatcatgttgtggaccgatcactgcctcaacctgaagaggacgaggctgaggtttacaatccgccgcaagaggaagtagtggatgaggaacagcctgttgctgaagtgataaatgaagttccaaacaatgtggcacctgtggtggcaactacagttgcctcagtgttgcaggaggaggcaccaaagaagtcatacgcctcaattgtcaaaatcatgaaagaagttccattgcctgctcctgcgcctcctactaggccttcaccacccaaactagagaagcagtctcctcctcctgctactcctgtcacagatgtaccgcctttcagttctaaccccgagaacatcaatatccaagagcctgaagttgatgcacatgcaatatatgtgaggaatttacctttaaatgccactgaaactcaactggaggatgagttcaagaagtttggtaccattaagcaaaatggcattcaagtcagaagcaataagattcaagggttctgttatggattcgttgaattcgaggattctacttctgtccagagtgctatagaggcttcccctgtagcaattggcggtcgtcaatgttacgttgaggaaaagagagcacctggttcacgagactaccccaacttgcttcgagactaaaaggctttgttgttgttgatgtatcctggta

SEQ ID NO: 54746 - DNA, 1401 bp, Zea Mays
aggtggattgaagggggttaaatcctttgctagtcaaaattgaatagaaagatatttaatctccctcaatcgtctctaatccccatgcagccgaaaaaggcctcaaggttttattttccttaagagatggcgagtgaagatcaaccccatttgagtactattgtgctaatcaccgaaatatactggctcctatttgcctaagtgataatacgccgaatggacttaaaaggtgcacactatgaggtcaaagcatttgaggattacaaatttctcaactcctcgtatgttcctgtgctccggcaactggagtcagcaaacctccagaaattctattttgagaacaagcttgagaatgccaccaaagatgccagcaatatgaagtttaggaatcccaaatatctgtctatgcttaatcacttgcgattctatttgccggagatgtacccaaagctacaccgcattcttttcctggatgatgatgttgtggtacagagggatcttacaggactctggaagattgacatggatgggaaggtgaatggggcagtagaaacatgctttggatcttttcaccgatatgcacagtatatgaacttctcacaccctcttatcaaagcaaagtttaatcctaatgcctgtggatgggcatacggaatgaatttcttcgatcttgattcttggaggagggagaaatgtactgagcagtaccattattggcagaatcagaatgagaacaggacattatggaagctaggaacgctgccccctggcttgatcactttctactcgaccacaaaacctctggagaaatcttggcatgttcttggacttggatacaatcctagcatcagcatggaggagattagaaatgctgctgttgtgcatttcaacggcaacatgaagccctggctggacatcggtatgaaccagttcaggcacctttggacaaagtatgtggactatgatgactcatatattcgtcaatgcaattttgcaccgccatagaaggctttaattatcgacaacgaagaagaatcggtaaacgtggcacatacatacgccgcaagcacgttttctgtagagataaggagtttctagagtacaactgaagggaccaccacaatcttttctagctcataatgtttgccattagttatgatcaaagtaatgtttgccacatgactgcatgagcattattgtcgttgtgtgtgttagttatgtcagcaatactctgtatatgccgaagtcagatatatttctgttcacgtggatccaagaagtaaagtgtctgatgtatttacaaaaggcaccaaatactaattgtagattgaaactctacaatgtcactgtatatttctcttgtcacattttctcaccgtgctggtatcaaattgtttgcta

SEQ ID NO: 54747 - DNA, 465 bp, Zea Mays
ctgagagcctagccttctgagttctgagatggggggcagtcaagagggatgggatataccccgagccccagccaaggaccataactttcttccctctccagcaatgggaaagactcattgccagttgatcttcctaagccgattgaaaatgaaaaaactgtggaagttgcacactccaatgtgaagccattcagtgtgcatccactacccttggcaaagacttctgatgtgctcataaaatcctcaaatggttctgatgattcaaaggaagagaaaacccagtactatccaggtctatacttcatccttattctgtattattggcatttcttcactttatgtccaggttacttgtggttatggtacttaaatagaagtttatattttagaattctgtattcgaaatctcagagaacttgtgctttcttcattgtcacaatctgaaatgtccttaaagatatacta

SEQ ID NO: 54748 - DNA, 569 bp, Zea Mays
cgagcgagcaggtgtgggcgtggcgtgggggaggcgccgaggcggtcgggcccgtagataagagtcgtctcacctcgtcgtcgcagcctcgcatcgcacgagaggagaaggagaggggaagggctagagagagaaacaaaggtggtagtagatgtggcatttgaagtatggttagcttgaggcgacgccgactattgggtctttgttctgggaaagactcattgccagttgatcttcctaagccgattgaaaatgaaaaaactgtggaagttgcacactccaatgtgaagccattcagtgtgcatccactacccttggcaaagacttctgatgtgctcataaaatcctcaaatggttctgatgattcaaaggaagagaaaacccagtactatccaggtctatacttcatccttattctgtattattggcatttcttcactttatgtccaggttacttgtggttatggtacttaaatagaagtttatattttagaattctgtattcgaaatctcagagaacttgtgctttcttcattgtcacaatctgaaatgtccttaaagatatacta

SEQ ID NO: 54749 - DNA, 583 bp, Zea Mays
tagggagagagagaaaccaccagaggcgagcgagcaggtgtgggcgtggcgtgggggaggcgccgaggcggtcgggcccgtagataagagtcgtctcacctcgtcgtcgcagcctcgcatcgcacgagaggagaaggagaggggaagggctagagagagaaacaaaggtggcatttgaagtatggttagcttgaggcgacgccgactattgggtctttgttctgggaaagactcattgccagttgatcttcctaagccgattgaaaatgaaaaaactgtggaagttgcacactccaatgtgaagccattcagtgtgcatccactacccttggcaaagacttctgatgtgctcataaaatcctcaaatggttctgatgattcaaaggaagagaaaacccagtactatccaggtctatacttcatccttattctgtattattggcatttcttcactttatgtccaggttacttgtggttatggtacttaaatagaagtttatattttagaattctgtattcgaaatctcagagaacttgtgctttcttcattgtcacaatctgaaatgtccttaaagatatacta

SEQ ID NO: 54750 - DNA, 763 bp, Zea Mays
acacaggcacggcactatagaagactagatcacgtgccagatgactattcaggaagggccatcattctttctttcggttgataaaaacatgacataaaaaaataatggaatatagcctcaggctgcaagatcatgtagcagtctttgaatctttgtgatctgcatatcttatctgaaagtttcctaaaatgtgcttgtgttactgaggtagaactagaacctgatgtttcggatgttcaaaggtggtgccgcttcactgaatcttaacagtactcatctaaatctgcgtataggtcacttttttggttcagtggcatttgaaccttgggaattagtttgaaatacctgggcaccaaaaaaaatgtgtttttccgatggttggttgctcataacagatgttggacagcaggcagattggcttatagaggtttacctcatccagtgcaatgtcccttgtgtgatcaggaggatgagaccgttgatcatattgtctagttgtgtgttctcaagaacagtgtggtcacttctctttgccactagactaccaaatgtctctccattcctcgaggacaagggtttcttttgtgaggatgatctaatccgactcggccaggggactatgtcggacgcaccaccgtgccctaatcgggagcgcaacaacccgttgcttgttgtctcctttcacaccacatataaaaacaggggaaatggctggcacgtgaaccaacattcgtcgtaccctctttcaccaaacacacacgag

SEQ ID NO: 54751 - DNA, 833 bp, Zea Mays
agaacagaacacgagaagttgactatcgcgaggtggccaagaaggaaaagtagcggcggcatggggtcgcccaaggcggccaagagcatggtgaagcaacgcatctggcgtcaccggctcgtcgcgccgttcgctgccgttctcatcacggccgtcgtcgtattctccggcctgttcgcgcaggacccaagtgccacctcggagttcactgccgtgaacgcgggtaacaccctgccagtgcgcgataagtcggaatccacaggtgcagcagccagaggatctcccaacaaggaggatcttgcaacagctgcatttgagcaagaattggatgttggaaattctgagcccaatcaagctttccaaggcaccgtgcctgcagcaggcgagagagggacagcaacggcagtgccggtccaacgagaaagaagcagtggaggatctgaacctgaagagaagcaatcgcccccacaggaccaggaaggagaagaaacctctgctaagtcagcttctgtgctcggacggtggtacacaaactggaggaagaatatgtcctttgtgctctgctggagcctcggctctcaacaaactcctctctaggttgctctcctcgggctttctatctcaaggagatgttttcgtgggtcgaggttgtatttttgttttgactttgtacctttgtacggggttcagagaggcctctcaataactccctgtactattttttttcttctttttaatgaaatgccacacgagtttattttgcattgttcgagaaaaaaaatagataaatatgttttataaaaaaaagatcaaggattgtttgtttgggatta

SEQ ID NO: 54752 - DNA, 759 bp, Zea Mays
agaacagaacacgagaagttgactatcgcgaggtggccaagaaggaaaagtagcggcggcatggggtcgcccaaggcggccaagagcatggtgaagcaacgcatctggcgtcaccggctcgtcgcgccgttcgctgccgttctcatcacggccgtcgtcgtattctccggcctgttcgcgcaggacccaagtgccacctcggagttcactgccgtgaacgcgggtaacaccctgccagtgcgcgataagtcggaatccacagagcccaatcaagctttccaaggcaccgtgcctgcagcaggcgagagagggacagcaacggcagtgccggtccaacgagaaagaagcagtggaggatctgaacctgaagagaagcaatcgcccccacaggaccaggaaggagaagaaacctctgctaagtcaggagctagcttctgtgctcggacggtggtacacaaactggaggaagaatatgtcctttgtgctctgctggagcctcggctctcaacaaactcctctctaggttgctctcctcgggctttctatctcaaggagatgttttcgtgggtcgaggttgtatttttgttttgactttgtacctttgtacggggttcagagaggcctctcaataactccctgtactattttttttcttctttttaatgaaatgccacacgagtttattttgcattgttcgagaaaaaaaatagataaatatgttttataaaaaaaagatcaaggattgtttgtttgggatta

SEQ ID NO: 54753 - DNA, 2220 bp, Zea Mays
agaacagaacacgagaagttgactatcgcgaggtggccaagaaggaaaagtagcggcggcatggggtcgcccaaggcggccaagagcatggtgaagcaacgcatctggcgtcaccggctcgtcgcgccgttcgctgccgttctcatcacggccgtcgtcgtattctccggcctgttcgcgcaggacccaagtgccacctcggagttcactgccgtgaacgcgggtaacaccctgccagtgcgcgataagtcggaatccacagagcccaatcaagctttccaaggcaccgtgcctgcagcaggcgagagagggacagcaacggcagtgccggtccaacgagaaagaagcagtggaggatctgaacctgaagagaagcaatcgcccccacaggaccaggaaggagaagaaacctctgctaagtcaggtttagtccagtacacaacatgcacacctcgaacgggagcaaccgtctgtgatctctccaaccagcggtacgacatctgtgagctttgcggtgatgctcgcgccattggccgctcctccaccgtaatgtacgtcccacagccccttacttccaacggtgaagagtggaacattccagcacaatcacggaagagccttccatggatcaagaaggtgactgtcaaaaccctgaaggcttcccaacaggcgccaagctgcacatccaggcacaccatgccagccatcgtctttgcgttgggcgggttcacaggaaacgtctggcacgacgtgagcgacgtccttgtccctctgttccttaccgcccgccagttcgaccaagatgtccagctactcgtcaccgacaaccggccctggttcatcaagaaatactcggcaatcctccgccgcctcacgagacacagtgtcatcgatttcgatgcagacgacgaggtgaggtgctatccgcatgtcatcgtcgggctgaggagccaccgggacctcggcatcgatccggactccacgccgcagaagaactacacgatggtggatttccgtctgtttgtccgcgaagcctacggactgcccgcgcctggagtggacataccgtacagggctgacaaagacgagcccgagaagaagaagccccggatgatgctcatcgagcggggcaagacgcggaggctcgtgaacacgcctgacgttctactcgggcttggctggttcggcttcgaggtggtcagggcggatccaaggacccactctgacctcgaggagtttgcccgcctagtcgactcgtgtgacgcgatgatgggcgtccacggtgccggtttgaccaacatggtgttcctgaggtcgggcgcggcgctggtgcacgtcgtgccctacggggtcgagttcatggctgacgggttctacggcgcgcctgcgagggacatgggcctcaggcatgtgcggtacagcgtcggtccagacgagagcacgctgctggagaagtacggcaggaaccatgcggtggtgagagacccggaggccgtaaggagcggcggatgggagaaggtcggggaggtctacatgaccgagcaggacgtcgtgctcaacgtgacgaggtttggacctagtttgttgaaggcaatagagttcattgtgtaggtgggtggacgagatgaggtttgtgttagctatgacaatggaactagtgtacaccgtcttttttttatattaggttttattgtttctgcttctgtacagggtctaaaatgtatgatgtagtgctctgaccaattttaaggtacaattaggaacaacactgagatagtactgtcccaatctttgacttttaactaaataatattattaaaggatcgtcctattccattctattctgtcgttacaatgaaacgtattattgattttttttttgaaggagctagcttctgtgctcggacggtggtacacaaactggaggaagaatatgtcctttgtgctctgctggagcctcggctctcaacaaactcctctctaggttgctctcctcgggctttctatctcaaggagatgttttcgtgggtcgaggttgtatttttgttttgactttgtacctttgtacggggttcagagaggcctctcaataactccctgtactattttttttcttctttttaatgaaatgccacacgagtttattttgcattgttcgagaaaaaaaatagataaatatgttttataaaaaaaagatcaaggattgtttgtttgggatta

SEQ ID NO: 54754 - DNA, 2292 bp, Zea Mays
agaacagaacacgagaagttgactatcgcgaggtggccaagaaggaaaagtagcggcggcatggggtcgcccaaggcggccaagagcatggtgaagcaacgcatctggcgtcaccggctcgtcgcgccgttcgctgccgttctcatcacggccgtcgtcgtattctccggcctgttcgcgcaggacccaagtgccacctcggagttcactgccgtgaacgcgggtaacaccctgccagtgcgcgataagtcggaatccacagccagaggatctcccaacaaggaggatcttgcaacagctgcatttgagcaagaattggatgttggaaattctgagcccaatcaagctttccaaggcaccgtgcctgcagcaggcgagagagggacagcaacggcagtgccggtccaacgagaaagaagcagtggaggatctgaacctgaagagaagcaatcgcccccacaggaccaggaaggagaagaaacctctgctaagtcaggtttagtccagtacacaacatgcacacctcgaacgggagcaaccgtctgtgatctctccaaccagcggtacgacatctgtgagctttgcggtgatgctcgcgccattggccgctcctccaccgtaatgtacgtcccacagccccttacttccaacggtgaagagtggaacattccagcacaatcacggaagagccttccatggatcaagaaggtgactgtcaaaaccctgaaggcttcccaacaggcgccaagctgcacatccaggcacaccatgccagccatcgtctttgcgttgggcgggttcacaggaaacgtctggcacgacgtgagcgacgtccttgtccctctgttccttaccgcccgccagttcgaccaagatgtccagctactcgtcaccgacaaccggccctggttcatcaagaaatactcggcaatcctccgccgcctcacgagacacagtgtcatcgatttcgatgcagacgacgaggtgaggtgctatccgcatgtcatcgtcgggctgaggagccaccgggacctcggcatcgatccggactccacgccgcagaagaactacacgatggtggatttccgtctgtttgtccgcgaagcctacggactgcccgcgcctggagtggacataccgtacagggctgacaaagacgagcccgagaagaagaagccccggatgatgctcatcgagcggggcaagacgcggaggctcgtgaacacgcctgacgttctactcgggcttggctggttcggcttcgaggtggtcagggcggatccaaggacccactctgacctcgaggagtttgcccgcctagtcgactcgtgtgacgcgatgatgggcgtccacggtgccggtttgaccaacatggtgttcctgaggtcgggcgcggcgctggtgcacgtcgtgccctacggggtcgagttcatggctgacgggttctacggcgcgcctgcgagggacatgggcctcaggcatgtgcggtacagcgtcggtccagacgagagcacgctgctggagaagtacggcaggaaccatgcggtggtgagagacccggaggccgtaaggagcggcggatgggagaaggtcggggaggtctacatgaccgagcaggacgtcgtgctcaacgtgacgaggtttggacctagtttgttgaaggcaatagagttcattgtgtaggtgggtggacgagatgaggtttgtgttagctatgacaatggaactagtgtacaccgtcttttttttatattaggttttattgtttctgcttctgtacagggtctaaaatgtatgatgtagtgctctgaccaattttaaggtacaattaggaacaacactgagatagtactgtcccaatctttgacttttaactaaataatattattaaaggatcgtcctattccattctattctgtcgttacaatgaaacgtattattgattttttttttgaaggagctagcttctgtgctcggacggtggtacacaaactggaggaagaatatgtcctttgtgctctgctggagcctcggctctcaacaaactcctctctaggttgctctcctcgggctttctatctcaaggagatgttttcgtgggtcgaggttgtatttttgttttgactttgtacctttgtacggggttcagagaggcctctcaataactccctgtactattttttttcttctttttaatgaaatgccacacgagtttattttgcattgttcgagaaaaaaaatagataaatatgttttataaaaaaaagatcaaggattgtttgtttgggatta

SEQ ID NO: 54755 - DNA, 834 bp, Zea Mays
cagaaacagaacagaacacgagaagttgactatcgcgaggtggccaagaaggaaaagtagcggcggcatggggtcgcccaaggcggccaagagcatggtgaagcaacgcatctggcgtcaccggctcgtcgcgccgttcgctgccgttctcatcacggccgtcgtcgtattctccggcctgttcgcgcaggacccaagtgccacctcggagttcactgccgtgaacgcgggtaacaccctgccagtgcgcgataagtcggaatccacagcagccagaggatctcccaacaaggaggatcttgcaacagctgcatttgagcaagaattggatgttggaaattctgagcccaatcaagctttccaaggcaccgtgcctgcagcaggcgagagagggacagcaacggcagtgccggtccaacgagaaagaagcagtggaggatctgaacctgaagagaagcaatcgcccccacaggaccaggaaggagaagaaacctctgctaagtcagcttctgtgctcggacggtggtacacaaactggaggaagaatatgtcctttgtgctctgctggagcctcggctctcaacaaactcctctctaggttgctctcctcgggctttctatctcaaggagatgttttcgtgggtcgaggttgtatttttgttttgactttgtacctttgtacggggttcagagaggcctctcaataactccctgtactattttttttcttctttttaatgaaatgccacacgagtttattttgcattgttcgagaaaaaaaatagataaatatgttttataaaaaaaagatcaaggattgtttgtttgggatta

SEQ ID NO: 54756 - DNA, 887 bp, Zea Mays
agaacagaacacgagaagttgactatcgcgaggtggccaagaaggaaaagtagcggcggcatggggtcgcccaaggcggccaagagcatggtgaagcaacgcatctggcgtcaccggctcgtcgcgccgttcgctgccgttctcatcacggccgtcgtcgtattctccggcctgttcgcgcaggacccaagtgccacctcggagttcactgccgtgaacgcgggtaacaccctgccagtgcgcgataagtcggaatccacaggtgcagcagccagaggatctcccaacaaggaggatcttgcaacagctgcatttgagcaagaattggatgttggaaattctgagcccaatcaagctttccaaggcaccgtgcctgcagcaggcgagagagggacagcaacggcagtgccggtccaacgagaaagaagcagtggaggatctgaacctgaagagaagcaatcgcccccacaggaccaggaaggagaagaaacctctgctaagtcagcataatgttcacccatcgtggataatgggacataagagtttcaaagtgctgaaaataggaatcttgattattgtatcaaagagaggcatggtgcttcattgaaggaaacaaaaatacattagcacaactagtagtatcccactagctttgctggtttcttggattaggctacccgcagtgagcaacggtacgcgaagcgctacttctgtatttaacagatgcaatgtttcctaatctatttatactttcgaaagtataccatgggatgcaaagtttgaaacatgccgttccatgaaatttgatttcttttaatgaaacaatgctggcttcacataattacacccttccaatttgtccaaagaaacatatctaacgatttaag

SEQ ID NO: 54757 - DNA, 3818 bp, Zea Mays
tggcccgagcagccctggcaactgacgcgacggattcgcctaggccatgcaggcacccggcgtcgcggtcgcggtcgcgggcggcgaaaccgacgagagccacccgcttgaaccgctgcccccgcacgcggagaaccaccgactgcccgggcctgccggcgaactcctcctctgccgccgcggcccgcaggaggccgccgagctggacgtcgagcctcctcaggacggcgttctcgaactcggagcccgagacgtggggctgcacctgcacgtccttgtccgtcacggcgaccgcgagtatgtcgccgtcccagtccgagaattcgctgtccttagctgcaaagctgatctgagacaacagacaacagcgcgcgcgcgggttgagcggcgtgcggtcgacggtagcactaacactgtcgcggatggcttgtgctagctaggcggatgatcgaatcgattccgctttccacgtacgggaatccgaaccaaaccactagatgcatatatataggaattgacaggccgatcctggtgaatcaaggcatcgtatgtagttggagtagaaacaaaacaggcggcgcacctgaggcagttcgacggcggcgttgggccaggtcaggccgagagtggcggcggcggcagtagcggcgtcacccatcggagacaacaggaaatgtgccggccggaatgtgggaggcgtgcgttgaactgatagctagcgtggcgaggacccttggaatgcgagagccgagagggcgtgcgctgaattcctgctgctcactgtggagtgtggacttcactcgctagaagacggggacgaggctttatagaaagggtaaaaacgttgtcaggagataaattttccatctcctgccatggcggtggcggctaattcattcattgaaccttgggcggggcccgcgatgacggatgttgcggactctcgaacggagaacgggcgagggctttgtgtatgttgtagttgtagttgtagcgtgtagccgtgtaggcaaccgttctcacccgtttccctgatctgccatccaccgtcgtggcgttccgccagaagccatccgtcgccatcggagctgccaaagcaagcagactgcaggcagccacaccaaacgtgccaaacccccaacgccatcctctataaacggcttcctcgcgggctccccctccccctccccgactcctccccatcgcccatcgccgccctccgatccttcatggccgctgccacagccgccgccgccgcgctcgcctccccggcgggcctctccacatcgctggcgcgccgcggcctcgtcagcttcgcacccgcgctccgccccggccctgaccgcagctctcgcgccgtcgccctcctcggtgtacgaactcatgtcacggctgttgatcaagccattgtaaaaggtgatacaaagttggaaggtcctgtggttgttgttactggtgcttccagggggattggaaaagccactgcattggctcttggaaaagcaggctgcaaggttacaagtttaagtaatctgcttataaatatagagaagtttatcaaatgtgtatgcttctcttaaactctgcacaaacctcaagcccacaatggccattgctagaccaagctgttagattgtcaatttaaatggaccattatgcatagtggataaatggttttatcatcagaataatatgaaagctgtatttaaactgcaggtcttggtgaattatgctcgatcttcaaaggaggctgaagaagtctccaaggagattgaagcatctggaggccaggccattacctttggaggagatgtttccaaagaggctgatgttgaatctatgataaaagtggctgttgatacatggggaacgattgatgtactagtaaataatgcaggaatcacacgggacacattgttgatgagaatgaagaaatcacagtggcaagatgtgattgatttgaatcttacaggcgttttcctttgcacgcaggctgcaacaaaagtaatgatgaagaagaaaaagggaagaattatcaatatagcatcggttgttggtcttactggtaatgctggacaagctaattatgctgctgccaaggctggggttattgggttcacaaaaacagttgctagggagtatgccagcagaaatattaatggcgctatggtcggccagaggatgtagcaggcctggtggaattcttagccctcagccctgctgcaagctacatcactggacaggtcctcaccatcgatggaggaatggtaatgtaaggcttcgaatctgtgccgctggcctctaatgtgtcgcagaaaaaaaatgtaattcagttttttgagtgtcatttttaaggggtggtttcttttgtccgcagcggtttgtggtatagtacagtttgtttcgaagggagagttgatactagaaatttgcacacgtatagttagcttaatttctttgcgattggccgattgctccaaacatgttattggaacgctctttccctgagtcttcgtttccgtttcccttataaagtcttataaagtgtttggtttgatgaatcactctattcaaaattcaaaatgaaacggtatatcatggatttattccttaaatttggtgggataactccattccacatattagtactaaacaactaactatgaagaatgaggtggtgatggattaactcactccattctacaaaccaaacaaaaaatgagggagaagatgatggactacatcattcctcaaaccaaacactccagtactgtcgagcctcggctcaacttctgtttctgggacggagtacataccatgagcaacggtcacacaaatataatgaacagcaaacatctagtttagaagaatacaaagaaaagttgccaccaaatatgaacgccaatacgaattgccagtcaaaccaatttagccatttatggaaatggaggaatacatcgtacttccgacccacagcaaatgtccatacaaaccaaaaattaaaacacagccgatgatatgctaagcgcagcatctcacagttctgacctaggccttgatagcatacttcctcatggggaagtacttctcacgcttcttttccctctcggtcttcagagagagctgcaggacagacagagcaaaatgtcaggccatctatgattaaaaaaccaacacaaaagagcaatcactcaaagaaatatgccatgcaatttcaaatgtcacttggacacgtgtcaaacattcagaaactgattgtataccaccattttgtgcgatgtcatagtcatagcaattgaaagatgacaggcctgtttggttcgttatctaacttgccataattcgactaacttttttttgcctaaggttaatgattcaatttggccagctaaccttatgcaagttgtggcacagttagccaggaaccaaacaggcccaacaactggctaatgcttgcatacaccttataatcctaaaacctaaacctgggctgcaaatattagtgctctttcagacttgagctctgcatggagagggttatcaggtatcttgcaaatgcttaatatcatatatgatcagattgacgaaaaaacattaacaacaaacacttcaccttgattttgcacaacaatgagaagtaacattattcagatcacatagtcagtcatcaaacattactcactttctacagttgcatccgtacgcaaaatatattggctcataaagctaagaggaatttcaaaaaaatatcattcgttgctctattaatgcttcatccagcaatgaacataacttatataccacttattgacacgagc

SEQ ID NO: 54758 - DNA, 3615 bp, Zea Mays
tggcccgagcagccctggcaactgacgcgacggattcgcctaggccatgcaggcacccggcgtcgcggtcgcggtcgcgggcggcgaaaccgacgagagccacccgcttgaaccgctgcccccgcacgcggagaaccaccgactgcccgggcctgccggcgaactcctcctctgccgccgcggcccgcaggaggccgccgagctggacgtcgagcctcctcaggacggcgttctcgaactcggagcccgagacgtggggctgcacctgcacgtccttgtccgtcacggcgaccgcgagtatgtcgccgtcccagtccgagaattcgctgtccttagctgcaaagctgatctgagacaacagacaacagcgcgcgcgcgggttgagcggcgtgcggtcgacggtagcactaacactgtcgcggatggcttgtgctagctaggcggatgatcgaatcgattccgctttccacgtacgggaatccgaaccaaaccactagatgcatatatataggaattgacaggccgatcctggtgaatcaaggcatcgtatgtagttggagtagaaacaaaacaggcggcgcacctgaggcagttcgacggcggcgttgggccaggtcaggccgagagtggcggcggcggcagtagcggcgtcacccatcggagacaacaggaaatgtgccggccggaatgtgggaggcgtgcgttgaactgatagctagcgtggcgaggacccttggaatgcgagagccgagagggcgtgcgctgaattcctgctgctcactgtggagtgtggacttcactcgctagaagacggggacgaggctttatagaaagggtaaaaacgttgtcaggagataaattttccatctcctgccatggcggtggcggctaattcattcattgaaccttgggcggggcccgcgatgacggatgttgcggactctcgaacggagaacgggcgagggctttgtgtatgttgtagttgtagttgtagcgtgtagccgtgtaggcaaccgttctcacccgtttccctgatctgccatccaccgtcgtggcgttccgccagaagccatccgtcgccatcggagctgccaaagcaagcagactgcaggcagccacaccaaacgtgccaaacccccaacgccatcctctataaacggcttcctcgcgggctccccctccccctccccgactcctccccatcgcccatcgccgccctccgatccttcatggccgctgccacagccgccgccgccgcgctcgcctccccggcgggcctctccacatcgctggcgcgccgcggcctcgtcagcttcgcacccgcgctccgccccggccctgaccgcagctctcgcgccgtcgccctcctcggtgtacgaactcatgtcacggctgttgatcaagccattgtaaaaggtgatacaaagttggaaggtcctgtggttgttgttactggtgcttccagggggattggaaaagccactgcattggctcttggaaaagcaggctgcaaggtcttggtgaattatgctcgatcttcaaaggaggctgaagaagtctccaaggagattgaagcatctggaggccaggccattacctttggaggagatgtttccaaagaggctgatgttgaatctatgataaaagtggctgttgatacatggggaacgattgatgtactagtaaataatgcaggctgcaacaaaagtaatgatgaagaagaaaaagggaagaattatcaatatagcatcggttgttggtcttactggtaatgctggacaagctaattatgctgctgccaaggctggggttattgggttcacaaaaacagttgctagggagtatgccagcagaaatattaatgcaaacgttatcgctcctggatttattgcttcagatatgactgctgaacttggtgaagagttagagaagaaaattctgtcaactattcctttagggcgctatggtcggccagaggatgtagcaggcctggtggaattcttagccctcagccctgctgcaagctacatcactggacaggtcctcaccatcgatggaggaatggtaatgtaaggcttcgaatctgtgccgctggcctctaatgtgtcgcagaaaaaaaatgtaattcagttttttgagtgtcatttttaaggggtggtttcttttgtccgcagcggtttgtggtatagtacagtttgtttcgaagggagagttgatactagaaatttgcacacgtatagttagcttaatttctttgcgattggccgattgctccaaacatgttattggaacgctctttccctgagtcttcgtttccgtttcccttataaagtcttataaagtgtttggtttgatgaatcactctattcaaaattcaaaatgaaacggtatatcatggatttattccttaaatttggtgggataactccattccacatattagtactaaacaactaactatgaagaatgaggtggtgatggattaactcactccattctacaaaccaaacaaaaaatgagggagaagatgatggactacatcattcctcaaaccaaacactccagtactgtcgagcctcggctcaacttctgtttctgggacggagtacataccatgagcaacggtcacacaaatataatgaacagcaaacatctagtttagaagaatacaaagaaaagttgccaccaaatatgaacgccaatacgaattgccagtcaaaccaatttagccatttatggaaatggaggaatacatcgtacttccgacccacagcaaatgtccatacaaaccaaaaattaaaacacagccgatgatatgctaagcgcagcatctcacagttctgacctaggccttgatagcatacttcctcatggggaagtacttctcacgcttcttttccctctcggtcttcagagagagctgcaggacagacagagcaaaatgtcaggccatctatgattaaaaaaccaacacaaaagagcaatcactcaaagaaatatgccatgcaatttcaaatgtcacttggacacgtgtcaaacattcagaaactgattgtataccaccattttgtgcgatgtcatagtcatagcaattgaaagatgacaggcctgtttggttcgttatctaacttgccataattcgactaacttttttttgcctaaggttaatgattcaatttggccagctaaccttatgcaagttgtggcacagttagccaggaaccaaacaggcccaacaactggctaatgcttgcatacaccttataatcctaaaacctaaacctgggctgcaaatattagtgctctttcagacttgagctctgcatggagagggttatcaggtatcttgcaaatgcttaatatcatatatgatcagattgacgaaaaaacattaacaacaaacacttcaccttgattttgcacaacaatgagaagtaacattattcagatcacatagtcagtcatcaaacattactcactttctacagttgcatccgtacgcaaaatatattggctcataaagctaagaggaatttcaaaaaaatatcattcgttgctctattaatgcttcatccagcaatgaacataacttatataccacttattgacacgagc

SEQ ID NO: 54759 - DNA, 3605 bp, Zea Mays
tggcccgagcagccctggcaactgacgcgacggattcgcctaggccatgcaggcacccggcgtcgcggtcgcggtcgcgggcggcgaaaccgacgagagccacccgcttgaaccgctgcccccgcacgcggagaaccaccgactgcccgggcctgccggcgaactcctcctctgccgccgcggcccgcaggaggccgccgagctggacgtcgagcctcctcaggacggcgttctcgaactcggagcccgagacgtggggctgcacctgcacgtccttgtccgtcacggcgaccgcgagtatgtcgccgtcccagtccgagaattcgctgtccttagctgcaaagctgatctgagacaacagacaacagcgcgcgcgcgggttgagcggcgtgcggtcgacggtagcactaacactgtcgcggatggcttgtgctagctaggcggatgatcgaatcgattccgctttccacgtacgggaatccgaaccaaaccactagatgcatatatataggaattgacaggccgatcctggtgaatcaaggcatcgtatgtagttggagtagaaacaaaacaggcggcgcacctgaggcagttcgacggcggcgttgggccaggtcaggccgagagtggcggcggcggcagtagcggcgtcacccatcggagacaacaggaaatgtgccggccggaatgtgggaggcgtgcgttgaactgatagctagcgtggcgaggacccttggaatgcgagagccgagagggcgtgcgctgaattcctgctgctcactgtggagtgtggacttcactcgctagaagacggggacgaggctttatagaaagggtaaaaacgttgtcaggagataaattttccatctcctgccatggcggtggcggctaattcattcattgaaccttgggcggggcccgcgatgacggatgttgcggactctcgaacggagaacgggcgagggctttgtgtatgttgtagttgtagttgtagcgtgtagccgtgtaggcaaccgttctcacccgtttccctgatctgccatccaccgtcgtggcgttccgccagaagccatccgtcgccatcggagctgccaaagcaagcagactgcaggcagccacaccaaacgtgccaaacccccaacgccatcctctataaacggcttcctcgcgggctccccctccccctccccgactcctccccatcgcccatcgccgccctccgatccttcatggccgctgccacagccgccgccgccgcgctcgcctccccggcgggcctctccacatcgctggcgcgccgcggcctcgtcagcttcgcacccgcgctccgccccggccctgaccgcagctctcgcgccgtcgccctcctcggtgtacgaactcatgtcacggctgttgatcaagccattgtaaaaggtgatacaaagttggaaggtcctgtggttgttgttactggtgcttccagggggattggaaaagccactgcattggctcttggaaaagcaggctgcaaggtcttggtgaattatgctcgatcttcaaaggaggctgaagaagtctccaaggagattgaagcatctggaggccaggccattacctttggaggagatgtttccaaagaggctgatgttgaatctatgataaaagtggctgttgatacatggggaacgattgatgtactagtaaataatgcaggaatcacacgggacacattgttgatgagaatgaagaaatcacagtggcaagatgtgattgatttgaatcttacaggcgttttcctttgcacgcaggctgcaacaaaagtaatgatgaagaagaaaaagggaagaattatcaatatagcatcggttgttggtcttactggtaatgctggacaagctaattatgctgctgccaaggctggggttattgggttcacaaaaacagttgctagggagtatgccagcagaaatattaatgcaaacgttatcgctcctggatttattgcttcagatatgactgctgaacttggtgaagagttagagaagaaaattctgtcaactattcctttagggcgctatggtcggccagaggatgtagcaggcctggtggaattcttagccctcagccctgctgcaagctacatcactggacaggtcctcaccatcgatggaggaatggtaatcggtttgtggtatagtacagtttgtttcgaagggagagttgatactagaaatttgcacacgtatagttagcttaatttctttgcgattggccgattgctccaaacatgttattggaacgctctttccctgagtcttcgtttccgtttcccttataaagtcttataaagtgtttggtttgatgaatcactctattcaaaattcaaaatgaaacggtatatcatggatttattccttaaatttggtgggataactccattccacatattagtactaaacaactaactatgaagaatgaggtggtgatggattaactcactccattctacaaaccaaacaaaaaatgagggagaagatgatggactacatcattcctcaaaccaaacactccagtactgtcgagcctcggctcaacttctgtttctgggacggagtacataccatgagcaacggtcacacaaatataatgaacagcaaacatctagtttagaagaatacaaagaaaagttgccaccaaatatgaacgccaatacgaattgccagtcaaaccaatttagccatttatggaaatggaggaatacatcgtacttccgacccacagcaaatgtccatacaaaccaaaaattaaaacacagccgatgatatgctaagcgcagcatctcacagttctgacctaggccttgatagcatacttcctcatggggaagtacttctcacgcttcttttccctctcggtcttcagagagagctgcaggacagacagagcaaaatgtcaggccatctatgattaaaaaaccaacacaaaagagcaatcactcaaagaaatatgccatgcaatttcaaatgtcacttggacacgtgtcaaacattcagaaactgattgtataccaccattttgtgcgatgtcatagtcatagcaattgaaagatgacaggcctgtttggttcgttatctaacttgccataattcgactaacttttttttgcctaaggttaatgattcaatttggccagctaaccttatgcaagttgtggcacagttagccaggaaccaaacaggcccaacaactggctaatgcttgcatacaccttataatcctaaaacctaaacctgggctgcaaatattagtgctctttcagacttgagctctgcatggagagggttatcaggtatcttgcaaatgcttaatatcatatatgatcagattgacgaaaaaacattaacaacaaacacttcaccttgattttgcacaacaatgagaagtaacattattcagatcacatagtcagtcatcaaacattactcactttctacagttgcatccgtacgcaaaatatattggctcataaagctaagaggaatttcaaaaaaatatcattcgttgctctattaatgcttcatccagcaatgaacataacttatataccacttattgacacgagc

SEQ ID NO: 54760 - DNA, 2283 bp, Zea Mays
gtttgaactgcgtcttatacttatatcaatgtaaacaatgtcagaattgtacataacctaatctgttattacggcatacctaaactgccctgcataaatccaccgttccttgatacgacagctctgaaacgcggacaagtctctacagcctcagcacggacccggcctgcctcctcttctctctctcggcgacgactgggcgaccgaccaaccgtcgctgcgctacgccaggtgccaaggtcttcttcgggtccttcgccggcgaccagcagcaccaggcatagacttgtgtaagaaatggatgcaactgccggttaattgcgacacagatttatatggacatagatattggggccatgtgtaagggcggaagctgttcctaccgcgtcaataaggggagtcctgctggttctaccaggaagatccattccacagcctctcaaggtcggatggcatctgacacagcgagggtaacgaaaacagaggcatcaaagctgaagaacctgatctcggcatcattcaaacccttgtctctgaccattcccatcggcgacggattccacgaatcgctccctttcagccattgtcatttatagtagagaaagacctacgagaacgtccaggtgctttctgcaggatctcataatacttgcacgagctaggatgcagctcaagcctcctgcaagacccaagctctattcagggctcatgccccaagaggatttggatccgtaccgtgatctaataccaggcttgcctgaagacttggcgaagatatgtcttgcccttgtccctcgtgctcattttcctgccatgggcgcagtttccaagaggtggatgtcgttcctcgaaagcaaggagctcgtagctgtgaggaaggaggttgggaaacttgaggagtgggtgtatgtcctggttccagatgctggggcgaaggggtcacactgggagattttagagtgttcggggcaaaagcagagccctcttccacgcatgcctggactaaccaaagcggggtttggtgtggttgttattggtggtaagctctttgttattgcgggctatgccgctgaccatgggaaagactgtgcttcagatgaggtttatcagtatgattcttgcctcaacaggtggactgtgcttgctaagatgaatgtagctcggtgcgacttcgcctgtgcagaggtcaatggggtgatatatgttgctggtggatttggtccaaacggcgagagtttatctagcgtcgaagtgtatgacccagaacagaataagtggacactgatcgagggcctgcgcagaccaaggtggggctgcttcgggtgcagcttcgaagggaagctgtcaagaacggctgcgtgatggtcacggctcatgcggtcctcggcaagaggctcttctgcatcgaatggaagaaccagaggtctctagcaatcttcaacccagctgacgactcctggcagaaggtccccgtgccgctcaccggcagctcaagcactcgtttctccctcgtggtgcacgaggacaagctgctgctcttccctctggaggaagagcccgggtaccaaacgctgatgtatgaccctgcagctccgatggggtccgagtggtgcacgtcgaagctgaagccgacgggttcttgcctgtgcagcgtgaccatcaaagcctgatgatgaccttgaatgcgtgggatgcggtggtcgtactgtcctcataagatggagtcccacacgccttcatatttcagagttgggatgaggctgccttcagttggtctcatgcgcactttctttgcttgaaattttaattttgcgtgtcgcatcgacaaataatggataggacatttatgcttcggttcattgagttgctgaagcttatgatgtattctcacttctgtattgaactctgttcgtttggttgtttagttgatttgatcttttgttttttgctggcactcacatgataacgacagccgtgctgtcaacagtcaactgatgctcggcagaaaggtttatgtcgttggctcgttgcacatgatcaggtcggcttttcttatttggggctgaaagtatagctcgggctcaaatttcattaatcagatggaggattaagattctggagcactcattttatgagaacctttgcgcacagatgagctggtcaagtatattactacttgtgacctttgatcttgcaagtcctgattgattctcatgatgcagtatgtgcgcccacgttttatcccgtacagtatgataagaggacttttggcttttgccccct

SEQ ID NO: 54761 - DNA, 967 bp, Zea Mays
atggtggatagggccatatggggtgagcatgagatagcatgccaccaacggaagcggatctcgggagatctcacctctattgaccgccagcccgtcaccttggttggtctgtggttagggatgaaaacaaatgcaaacggacgaacaaacccctctcttgtttctattcccgcattttatcaccggaaacgggattggtctggaatagtcgggaatgggaacgggtatttgacgttgttatttatactgattaatgattgtaaccgtgtctacatgtggagattggaaggagctcggaaggctgggacgctgacccactttacgacgaggagcgtgggatggttcaaggtggccatgttcgcagaccagctttacgacgaggatgcgtggacggactggtgccccgcgcaggacgccacgtccgaccgcgttatggccgtcgtcctcgacgccgagaacctaggtgcctaccttcccacgctctccttctgcttccctttacggttcacccctttcctccaaatgaactgacacggaactccctctgccgcacggtctctgtaaccaatttaaccctactgattttctgaaatcagcggtgaaattaacaagatgcccacgcctgccaaaattagccaccttatggtatctctttcacgtatgttcattgacatcgtttatcagtacagtgaataggcaggacaagattgcgagttcaaaataatgtcaacctggcagtctattatatcatatattgtggcaccacatctcagataaaaagtatcttactagagtgaaaaggggccgagtgttaattggtgaatttctccaccatcacagcaacagtcgagagactactcagttagctgctgtaaccacaaggatagcgaatgtgcacggagatgaactcattatcacaaccacaagtccatatgagcaacaagcattcgcatcgaagactgattga

SEQ ID NO: 54762 - DNA, 1203 bp, Zea Mays
agatcagggagtccaaacgggtcgcacccacctgccaggctgccacccgcaatccgcaacagggacaccgggcacagcccacaagatgagcagcggcggcgacagcttcaggcccggtgttcactactaggcctggtacgccagtacggtgtcgtcatcaagctcaactccggcgtcgactaccgagcaaactgaagaatacgtcaatggtcagctgaagaaagaagaaggtgatgccttcataagaggaaatggtggtgcggattatatgatgtgaatattctgagatctatgtcgggcaaattcttgtagcagtcttctgaatatgcagttctgtacatcagtatacccaagcgtacccttgcagacaattaggaagatggtgaaagccaaaactgctgctataaaaaaacacaagccgatggattaaagccgcagcgaacaggctttagcgccggtctggcaaaacttggtcgtttatgagagactttaatatattgtacttttttgttatcattattatgttcatctggcaaaagaattgcaaaagggaaaaagagaagagaaatgagttacatcgccatggccatcaagatatctggtaataattgggcctttagtgatactgataaggtgtcattgtcattgctggatcctcgatgttgccctgaagcatcggcccggccttgttgtatgcagctgctggttctactttgagtgcggcctttagcttacccgattttttttggtgggggggggggggggggcacactgcagttttgttggacaaattttggtcaccaacaccgccttcaaacggtatggaatgtatcgtgcacaggtgcactgatgaacacgatgcatttcgtgttggagatggaaccaggacaattatgcttctctggcctagaatgatcaagttactgttctgcaattacacattacgccgagctaaatatggcgtggtatgagcactaatcatccataagatgatgtggccctcttgttcaaagatcgccaaactgaagcgatcactcgccacctcaaaatcatagcatcgatactatcgtacggttgacacttcacaaactgtttgaatcttacgagccagtataagagaatctagaaatacttggctcccaggcattatatgcctcccggaaatgttggtgtgtcagttcataattcaagaatcaatcccag

SEQ ID NO: 54763 - DNA, 1273 bp, Zea Mays
gacggtgtgcatgtcatcggagtacagacggtactgacacaaagggcccagatcagggagtccaaacgggtcgcacccacctgccaggctgccacccgcaatccgcaacagggacaccgggcacagcccacaagatgagcagcggcggcgacagcttcaggcccggtgttcactactaggcctggtacgccagtacggtgtcgtcatcaagctcaactccggcgtcgactaccgagcaaactgaagaatacgtcaatggtcagctgaagaaagaagaaggtgatgccttcataagaggaaatggtggtgcggattatatgatgtgaatattctgagatctatgtcgggcaaattcttgtagcagtcttctgaatatgcagttctgtacatcagtatacccaagcgtacccttgcagacaattaggaagatggtgaaagccaaaactgctgctataaaaaaacacaagccgatggattaaagccgcagcgaacaggctttagcgccggtctggcaaaacttggtcgtttatgagagactttaatatattgtacttttttgttatcattattatgttcatctggcaaaagaattgcaaaagggaaaaagagaagagaaatgagttacatcgccatggccatcaagatatctggtaataattgggcctttagtgatactgataaggtgccgttgtctactactgaaatgtcattgtcattgctggatcctcgatgttgccctgaagcatcggcccggccttgttgtatgcagctgctggttctactttgagtgcggcctttagcttacccgattttttttggtgggggggggggggggggcacactgcagttttgttggacaaattttggtcaccaacaccgccttcaaacggtatggaatgtatcgtgcacaggtgcactgatgaacacgatgcatttcgtgttggagatggaaccaggacaattatgcttctctggcctagaatgatcaagttactgttctgcaattacacattacgccgagctaaatatggcgtggtatgagcactaatcatccataagatgatgtggccctcttgttcaaagatcgccaaactgaagcgatcactcgccacctcaaaatcatagcatcgatactatcgtacggttgacacttcacaaactgtttgaatcttacgagccagtataagagaatctagaaatacttggctcccaggcattatatgcctcccggaaatgttggtgtgtcagttcataattcaagaatcaatcccag

SEQ ID NO: 54764 - DNA, 1262 bp, Zea Mays
attccgttaaaaaaagaggggagattgtggacttgactgtggacgacggtgtgcatgtcatcggagtacagacggtactgacacaaagggcccagatcagggagtccaaacgggtcgcacccacctgccaggctgccacccgcaatccgcaacagggacaccgggcacagcccacaagatgagcagcggcggcgacagcttcaggcccggtgttcactactaggcctggtacgccagtacggtgtcgtcatcaagctcaactccggcgtcgactaccgagcaaactgaagaatacgtcaatggtcagctgaagaaagaagaaggtgatgccttcataagaggaaatggtggtgcggattatatgatgtgaatattctgagatctatgtcgggcaaattcttgtagcagtcttctgaatatgcagttctgtacatcagtatacccaagcgtacccttgcagacaattaggaagatggtgaaagccaaaactgctgctataaaaaaacacaagccgatggattaaagccgcagcgaacaggctttagcgccggtctggcaaaacttggtcgtttatgagagactttaatatattgtacttttttgttatcattattatgttcatctggcaaaagaattgcaaaagggaaaaagagaagagaaatgagttacatcgccatggccatcaagatatctggtcattgtcattgctggatcctcgatgttgccctgaagcatcggcccggccttgttgtatgcagctgctggttctactttgagtgcggcctttagcttacccgattttttttggtgggggggggggggggggcacactgcagttttgttggacaaattttggtcaccaacaccgccttcaaacggtatggaatgtatcgtgcacaggtgcactgatgaacacgatgcatttcgtgttggagatggaaccaggacaattatgcttctctggcctagaatgatcaagttactgttctgcaattacacattacgccgagctaaatatggcgtggtatgagcactaatcatccataagatgatgtggccctcttgttcaaagatcgccaaactgaagcgatcactcgccacctcaaaatcatagcatcgatactatcgtacggttgacacttcacaaactgtttgaatcttacgagccagtataagagaatctagaaatacttggctcccaggcattatatgcctcccggaaatgttggtgtgtcagttcataattcaagaatcaatcccag

SEQ ID NO: 54765 - DNA, 1362 bp, Zea Mays
gtggattacaaacgtggtgtccagtgagcgctggtacacgatagcgtgcgtcaaggagattttgaactattccgttaaaaaaagaggggagattgtggacttgactgtggacgacggtgtgcatgtcatcggagtacagacggtactgacacaaagggcccagatcagggagtccaaacgggtcgcacccacctgccaggctgccacccgcaatccgcaacagggacaccgggcacagcccacaagatgagcagcggcggcgacagcttcaggcccggtgttcactactaggcctggtacgccagtacggtgtcgtcatcaagctcaactccggcgtcgactaccgagcaaactgaagaatacgtcaatggtcagctgaagaaagaagaaggtgatgccttcataagaggaaatggtggtgcggattatatgatgtgaatattctgagatctatgtcgggcaaattcttgtagcagtcttctgaatatgcagttctgtacatcagtatacccaagcgtacccttgcagacaattaggaagatggtgaaagccaaaactgctgctataaaaaaacacaagccgatggattaaagccgcagcgaacaggctttagcgccggtctggcaaaacttggtcgtttatgagagactttaatatattgtacttttttgttatcattattatgttcatctggcaaaagaattgcaaaagggaaaaagagaagagaaatgagttacatcgccatggccatcaagatatctggtaataattgggcctttagtgatactgataaggtcattgtcattgctggatcctcgatgttgccctgaagcatcggcccggccttgttgtatgcagctgctggttctactttgagtgcggcctttagcttacccgattttttttggtgggggggggggggggggcacactgcagttttgttggacaaattttggtcaccaacaccgccttcaaacggtatggaatgtatcgtgcacaggtgcactgatgaacacgatgcatttcgtgttggagatggaaccaggacaattatgcttctctggcctagaatgatcaagttactgttctgcaattacacattacgccgagctaaatatggcgtggtatgagcactaatcatccataagatgatgtggccctcttgttcaaagatcgccaaactgaagcgatcactcgccacctcaaaatcatagcatcgatactatcgtacggttgacacttcacaaactgtttgaatcttacgagccagtataagagaatctagaaatacttggctcccaggcattatatgcctcccggaaatgttggtgtgtcagttcataattcaagaatcaatcccag

SEQ ID NO: 54766 - DNA, 969 bp, Zea Mays
cgcacatcccgccccctcccttgcccctgtcgccaccgcgcgcgcacctccgggcgtcgtgaccgccagttcccattttggaggaatgccagaaccgagatgttggcaattggctattgcatcgatgcagggaaaggtggacatgatctatatgaagtaattgttctttctgaagctattgtatcatgactgaagtgaggttggactcagagagtccgaccttccagggatggaggtggccaagacggtggcgctcgtagcgctgggagcgctggccaccaggttctgcagcgcatggaagcatagaacgaggaggtatgctgcctcgtgttgctcgcagtggtggaagaggagaccgtcgcgtggaggcaagcctactactacaggctacagctactacaacgggttcgtgtgtgtgtccgtcttgttggaggcaccctcgctgtggactatgcagaaggtgccctctgcgccaaaggaggtggactggtggaggctgaggtggtagtagcggcctcccctgcggcagggaagggcgtctacgcgatgtgctccaaggtccaagccaacgatgctcctatgcaagagatgcaagagtgtcaagtactggtaagtgaggtctattcctgcacttgtttccgctctctctggtgatgggattcttgttccgtctgtgattcatatgttgcggcaatgcggcattgcgcgatgggtgcttgtgttatgaccggccaccactacaggcgccgcataagagcagaggcaatggatagacatgcaaattagttgaataaggatctagacatgcagattagttggataaggattagaagattaaggagataagatttgttagagagaaaagagggatttgatctcattagataagtactagaagggagtataaataattgtaagcaccaccctatatggaattaagcagaaacaattatagtttctcgcctgtcc

SEQ ID NO: 54767 - DNA, 2085 bp, Zea Mays
ggaaacatacacctagaatcctgtgaaacaatgcttctttctcccttcgcacctttgtgatgcactgaacactagtcaggagctctagtaatcctctaatggccgaatgttcattggcaacgctgagagtgagaggccagtatcaagggagatggacctggtccaacagcaagttgaatatgccaatcatggatccaaagaggaactacgccctcaagattcatcttccatgccaatccaaagcagcaagagaatggacaagtgttgcatttaccccttttggttttcatggaagggatcacagggtggaaacttcagttaaatgttactgtttgcagccactcatggattcggagagcatggtctcaccaaatctaatactgatttcggatgaagctcttctcactatcagcatggtttttgcatatttggctggagttgtaccctctgggcagacatctcctcgtgtcagaaatcagaatgtttctcaacatattccagagccaagctcctctcattctgggacctaaagttcttgcctgaaaggaatgctgcatttgaccccaacgatatgtggagtgaagtgagtgctaaactttccaaagccttacaagcacatgttcaagatgcccttttggatagccgagaggatggactcatgagtgataggaaaaactatcctttgagtatgcttgccattcatgctggtcccagattgcggcttcttctgatcacattccagcttctggaaatggaggtaagaaatatctctggaagttctgaactcgatggaatcaggtggttgcaagtatcgactaccttgatagatagtttaattcaaccagtatttatgaaatggattgaagaagaacaggccttggaaaatggacaaatcaacgaaaaacttatgaagacgataagcagcaaactaaaggagggcaataagatcttgaggaggtttaacagatttgggaaatctgaactctatttggatatgctctttttcctaagatttggttctgcaaggtgtgacagttattttaatgtcaaatttcttgctgaacatggagaaagaattttagaggaccttgttatttccttagctgatgtgattgctagtatttatctggagcttatgtcagtggatggtgatatgtctgctgaagttgttggttccagcttggttctatgttctctatcaaccagagaactccaaaagctgcgcaatgaggtggcaattaattggtggttgcaccaatacttcaagtcagttgtttcaatgtatgaggacaggttcgagttatatgttctatgcagcaaaaaatgtgaaaaaacagccgacaatcaagctgagagggcaaattggtggaggattgcatctggcaagcctaatgtgcttactcttgattatgttaacatcagtccattttcccttccagcaagaaggacaaaggaattaagagctttgattggatggaggtattacttcagcttattcttagagttgtcagatattgccatgcccttcataagggttgctatcagcaaagtgagctctgcggtgtcctacttctgggtgtcaatgattggaaggtctcttgggctgattttctcagggattagacaatcactaggctggaaataagcttatacggtcatacctgttgagttttgagtctgacttctgggactgaatgaatgtctgttaggttatgcattgtaaatctttgagatggctgtcatttttctctgctttctttttcatcttagtgtgtaagaaagtccattgatttcgtggacggaatatgttaatctgtggattactgaaatccatccacatccagtctttctcaaaacagaattcatgtacacgaaatgtctagatgcatttttgtttttttattcaagagggacggaacatcatatttttctcgagacagaatagcaaggacagcatacattacgagcacgcatcattaattttgtacagggtttcatttctctccacccatacaatctggaacgaaatcatgtagtgtcaagaaatggaaaattcatccaaaaacgaaacaaaacggaactgag

SEQ ID NO: 54768 - DNA, 2090 bp, Zea Mays
gggaaacatacacctagaatcctgtgaaacaatgcttctttctcccttcgcacctttgtgatgcactgaacactagtcaggagctctagtaatcctctaatggccgaatgttcattggcaacgctgagagtgagaggccagtatcaagggagatggacctggtccaacagcaagttgaatatgccaatcatggatccaaagaggaactacgccctcaagattcatcttccatgccaatccaaagcagcaagagaatggacaagtgttgcatttaccccttttggttttcatggaagggatcacagggtggaaacttcagttaaatgttactgtttgcagccactcatggattcggagagcatggtctcaccaaatctaatactgatttcggatgaagctcttctcactatcagcatggtttttgcatatttggctggagttgtaccctctgggcagacatctcctcgtgtcagaaatcagaatgtttctcaacatattccagagccaagctcctctcattctggtagggacctaaagttcttgcctgaaaggaatgctgcatttgaccccaacgatatgtggagtgaagtgagtgctaaactttccaaagccttacaagcacatgttcaagatgcccttttggatagccgagaggatggactcatgagtgataggaaaaactatcctttgagtatgcttgccattcatgctggtcccagattgcggcttcttctgatcacattccagcttctggaaatggaggtaagaaatatctctggaagttctgaactcgatggaatcaggtggttgcaagtatcgactaccttgatagatagtttaattcaaccagtatttatgaaatggattgaagaagaacaggccttggaaaatggacaaatcaacgaaaaacttatgaagacgataagcagcaaactaaaggagggcaataagatcttgaggaggtttaacagatttgggaaatctgaactctatttggatatgctctttttcctaagatttggttctgcaaggtgtgacagttattttaatgtcaaatttcttgctgaacatggagaaagaattttagaggaccttgttatttccttagctgatgtgattgctagtatttatctggagcttatgtcagtggatggtgatatgtctgctgaagttgttggttccagcttggttctatgttctctatcaaccagagaactccaaaagctgcgcaatgaggtggcaattaattggtggttgcaccaatacttcaagtcagttgtttcaatgtatgaggacaggttcgagttatatgttctatgcagcaaaaaatgtgaaaaaacagccgacaatcaagctgagagggcaaattggtggaggattgcatctggcaagcctaatgtgcttactcttgattatgttaacatcagtccattttcccttccagcaagaaggacaaaggaattaagagctttgattggatggaggtattacttcagcttattcttagagttgtcagatattgccatgcccttcataagggttgctatcagcaaagtgagctctgcggtgtcctacttctgggtgtcaatgattggaaggtctcttgggctgattttctcagggattagacaatcactaggctggaaataagcttatacggtcatacctgttgagttttgagtctgacttctgggactgaatgaatgtctgttaggttatgcattgtaaatctttgagatggctgtcatttttctctgctttctttttcatcttagtgtgtaagaaagtccattgatttcgtggacggaatatgttaatctgtggattactgaaatccatccacatccagtctttctcaaaacagaattcatgtacacgaaatgtctagatgcatttttgtttttttattcaagagggacggaacatcatatttttctcgagacagaatagcaaggacagcatacattacgagcacgcatcattaattttgtacagggtttcatttctctccacccatacaatctggaacgaaatcatgtagtgtcaagaaatggaaaattcatccaaaaacgaaacaaaacggaactgag

SEQ ID NO: 54769 - DNA, 2122 bp, Zea Mays
atttagccagatctaacttgcgcatttgctgttgattggaatgttattgcttcagcttcaggaaacaatgcttctttctcccttcgcacctttgtgatgcactgaacactagtcaggagctctagtaatcctctaatggccgaatgttcattggcaacgctgagagtgagaggccagtatcaagggagatggacctggtccaacagcaagttgaatatgccaatcatggatccaaagaggaactacgccctcaagattcatcttccatgccaatccaaagcagcaagagaatggacaagtgttgcatttaccccttttggttttcatggaagggatcacagggtggaaacttcagttaaatgttactgtttgcagccactcatggattcggagagcatggtctcaccaaatctaatactgatttcggatgaagctcttctcactatcagcatggtttttgcatatttggctggagttgtaccctctgggcagacatctcctcgtgtcagaaatcagaatgtttctcaacatattccagagccaagctcctctcattctgggacctaaagttcttgcctgaaaggaatgctgcatttgaccccaacgatatgtggagtgaagtgagtgctaaactttccaaagccttacaagcacatgttcaagatgcccttttggatagccgagaggatggactcatgagtgataggaaaaactatcctttgagtatgcttgccattcatgctggtcccagattgcggcttcttctgatcacattccagcttctggaaatggaggtaagaaatatctctggaagttctgaactcgatggaatcaggtggttgcaagtatcgactaccttgatagatagtttaattcaaccagtatttatgaaatggattgaagaagaacaggccttggaaaatggacaaatcaacgaaaaacttatgaagacgataagcagcaaactaaaggagggcaataagatcttgaggaggtttaacagatttgggaaatctgaactctatttggatatgctctttttcctaagatttggttctgcaaggtgtgacagttattttaatgtcaaatttcttgctgaacatggagaaagaattttagaggaccttgttatttccttagctgatgtgattgctagtatttatctggagcttatgtcagtggatggtgatatgtctgctgaagttgttggttccagcttggttctatgttctctatcaaccagagaactccaaaagctgcgcaatgaggtggcaattaattggtggttgcaccaatacttcaagtcagttgtttcaatgtatgaggacaggttcgagttatatgttctatgcagcaaaaaatgtgaaaaaacagccgacaatcaagctgagagggcaaattggtggaggattgcatctggcaagcctaatgtgcttactcttgattatgttaacatcagtccattttcccttccagcaagaaggacaaaggaattaagagctttgattggatggaggtattacttcagcttattcttagagttgtcagatattgccatgcccttcataagggttgctatcagcaaagtgagctctgcggtgtcctacttctgggtgtcaatgattggaaggtctcttgggctgattttctcagggattagacaatcactaggctggaaataagcttatacggtcatacctgttgagttttgagtctgacttctgggactgaatgaatgtctgttaggttatgcattgtaaatctttgagatggctgtcatttttctctgctttctttttcatcttagtgtgtaagaaagtccattgatttcgtggacggaatatgttaatctgtggattactgaaatccatccacatccagtctttctcaaaacagaattcatgtacacgaaatgtctagatgcatttttgtttttttattcaagagggacggaacatcatatttttctcgagacagaatagcaaggacagcatacattacgagcacgcatcattaattttgtacagggtttcatttctctccacccatacaatctggaacgaaatcatgtagtgtcaagaaatggaaaattcatccaaaaacgaaacaaaacggaactgag

SEQ ID NO: 54770 - DNA, 2259 bp, Zea Mays
atcttcgcagcattgttgctgtccgaggtcagccgccctctctctctcctcgtgctccgattcgtgggctcgagctccggtgactaggaacagcggcaaggaaacaatgcttctttctcccttcgcacctttgtgatgcactgaacactagtcaggagctctagtaatcctctaatggccgaatgttcattggcaacgctgagagtgagaggccagtatcaagggagatggacctggtccaacagcaagttgaatatgccaatcatggatccaaagaggaactacgccctcaagattcatcttccatgccaatccaaagcagcaagagaatggacaagtgttgcatttaccccttttggttttcatggaagggatcacagggtggaaacttcagttaaatgttactgtttgcagccactcatggattcggagagcatggtctcaccaaatctaatactgatttcggatgaagctcttctcactatcagcatggtttttgcatatttggctggagttgtaccctctgggcagacatctcctcgtgtcagaaatcagaatgtttctcaacatattccagagccaagctcctctcattctgggacctaaagttcttgcctgaaaggaatgctgcatttgaccccaacgatatgtggagtgaagtgagtgctaaactttccaaagccttacaagcacatgttcaagatgcccttttggatagccgagaggatggactcatgagtgataggaaaaactatcctttgagtatgcttgccattcatgctggtcccagattgcggcttcttctgatcacattccagcttctggaaatggaggcaagaggcacaccataactcgttgtttgactaggattgcttatgtatactcagtttattacaagttagtatctgatctgttttcaactaaaagaggggtaagaaatatctctggaagttctgaactcgatggaatcaggtggttgcaagtatcgactaccttgatagatagtttaattcaaccagtatttatgaaatggattgaagaagaacaggccttggaaaatggacaaatcaacgaaaaacttatgaagacgataagcagcaaactaaaggagggcaataagatcttgaggaggtttaacagatttgggaaatctgaactctatttggatatgctctttttcctaagatttggttctgcaaggtgtgacagttattttaatgtcaaatttcttgctgaacatggagaaagaattttagaggaccttgttatttccttagctgatgtgattgctagtatttatctggagcttatgtcagtggatggtgatatgtctgctgaagttgttggttccagcttggttctatgttctctatcaaccagagaactccaaaagctgcgcaatgaggtggcaattaattggtggttgcaccaatacttcaagtcagttgtttcaatgtatgaggacaggttcgagttatatgttctatgcagcaaaaaatgtgaaaaaacagccgacaatcaagctgagagggcaaattggtggaggattgcatctggcaagcctaatgtgcttactcttgattatgttaacatcagtccattttcccttccagcaagaaggacaaaggaattaagagctttgattggatggaggtattacttcagcttattcttagagttgtcagatattgccatgcccttcataagggttgctatcagcaaagtgagctctgcggtgtcctacttctgggtgtcaatgattggaaggtctcttgggctgattttctcagggattagacaatcactaggctggaaataagcttatacggtcatacctgttgagttttgagtctgacttctgggactgaatgaatgtctgttaggttatgcattgtaaatctttgagatggctgtcatttttctctgctttctttttcatcttagtgtgtaagaaagtccattgatttcgtggacggaatatgttaatctgtggattactgaaatccatccacatccagtctttctcaaaacagaattcatgtacacgaaatgtctagatgcatttttgtttttttattcaagagggacggaacatcatatttttctcgagacagaatagcaaggacagcatacattacgagcacgcatcattaattttgtacagggtttcatttctctccacccatacaatctggaacgaaatcatgtagtgtcaagaaatggaaaattcatccaaaaacgaaacaaaacggaactgag

SEQ ID NO: 54771 - DNA, 2088 bp, Zea Mays
atcttcgcagcattgttgctgtccgaggtcagccgccctctctctctcctcgtgctccgattcgtgggctcgagctccggtgactaggaacagcggcaaggaaacaatgcttctttctcccttcgcacctttgtgatgcactgaacactagtcaggagctctagtaatcctctaatggccgaatgttcattggcaacgctgagagtgagaggccagtatcaagggagatggacctggtccaacagcaagttgaatatgccaatcatggatccaaagaggaactacgccctcaagattcatcttccatgccaatccaaagcagcaagagaatggacaaccactcatggattcggagagcatggtctcaccaaatctaatactgatttcggatgaagctcttctcactatcagcatggtttttgcatatttggctggagttgtaccctctgggcagacatctcctcgtgtcagaaatcagaatgtttctcaacatattccagagccaagctcctctcattctggtagggacctaaagttcttgcctgaaaggaatgctgcatttgaccccaacgatatgtggagtgaagtgagtgctaaactttccaaagccttacaagcacatgttcaagatgcccttttggatagccgagaggatggactcatgagtgataggaaaaactatcctttgagtatgcttgccattcatgctggtcccagattgcggcttcttctgatcacattccagcttctggaaatggaggtaagaaatatctctggaagttctgaactcgatggaatcaggtggttgcaagtatcgactaccttgatagatagtttaattcaaccagtatttatgaaatggattgaagaagaacaggccttggaaaatggacaaatcaacgaaaaacttatgaagacgataagcagcaaactaaaggagggcaataagatcttgaggaggtttaacagatttgggaaatctgaactctatttggatatgctctttttcctaagatttggttctgcaaggtgtgacagttattttaatgtcaaatttcttgctgaacatggagaaagaattttagaggaccttgttatttccttagctgatgtgattgctagtatttatctggagcttatgtcagtggatggtgatatgtctgctgaagttgttggttccagcttggttctatgttctctatcaaccagagaactccaaaagctgcgcaatgaggtggcaattaattggtggttgcaccaatacttcaagtcagttgtttcaatgtatgaggacaggttcgagttatatgttctatgcagcaaaaaatgtgaaaaaacagccgacaatcaagctgagagggcaaattggtggaggattgcatctggcaagcctaatgtgcttactcttgattatgttaacatcagtccattttcccttccagcaagaaggacaaaggaattaagagctttgattggatggaggtattacttcagcttattcttagagttgtcagatattgccatgcccttcataagggttgctatcagcaaagtgagctctgcggtgtcctacttctgggtgtcaatgattggaaggtctcttgggctgattttctcagggattagacaatcactaggctggaaataagcttatacggtcatacctgttgagttttgagtctgacttctgggactgaatgaatgtctgttaggttatgcattgtaaatctttgagatggctgtcatttttctctgctttctttttcatcttagtgtgtaagaaagtccattgatttcgtggacggaatatgttaatctgtggattactgaaatccatccacatccagtctttctcaaaacagaattcatgtacacgaaatgtctagatgcatttttgtttttttattcaagagggacggaacatcatatttttctcgagacagaatagcaaggacagcatacattacgagcacgcatcattaattttgtacagggtttcatttctctccacccatacaatctggaacgaaatcatgtagtgtcaagaaatggaaaattcatccaaaaacgaaacaaaacggaactgag

SEQ ID NO: 54772 - DNA, 1991 bp, Zea Mays
atcttcgcagcattgttgctgtccgaggtcagccgccctctctctctcctcgtgctccgattcgtgggctcgagctccggtgactaggaacagcggcaaggaaacaatgcttctttctcccttcgcacctttgtgatgcactgaacactagtcaggagctctagtaatcctctaatggccgaatgttcattggcaacgctgagagtgagaggccagtatcaagggagatggacctggtccaacagcaagttgaatatgccaatcatggatccaaagaggaactacgccctcaagattcatcttccatgccaatccaaagcagcaagagaatggacaagtgttgcatttaccccttttggttttcatggaagggatcacagggtggaaacttcagttaaatgttactgtttgcagccactcatggattcggagagcatggtctcaccaaatctaatactgatttcggatgaagctcttctcactatcagcatggtttttgcatatttggctggagttgtaccctctgggcagacatctcctcgtgtcagaaatcagaatgtttctcaacatattccagagccaagctcctctcattctggtagggacctaaagttcttgcctgaaaggaatgctgcatttgaccccaacgatatgtggagtgaagtaagaaatatctctggaagttctgaactcgatggaatcaggtggttgcaagtatcgactaccttgatagatagtttaattcaaccagtatttatgaaatggattgaagaagaacaggccttggaaaatggacaaatcaacgaaaaacttatgaagacgataagcagcaaactaaaggagggcaataagatcttgaggaggtttaacagatttgggaaatctgaactctatttggatatgctctttttcctaagatttggttctgcaaggtgtgacagttattttaatgtcaaatttcttgctgaacatggagaaagaattttagaggaccttgttatttccttagctgatgtgattgctagtatttatctggagcttatgtcagtggatggtgatatgtctgctgaagttgttggttccagcttggttctatgttctctatcaaccagagaactccaaaagctgcgcaatgaggtggcaattaattggtggttgcaccaatacttcaagtcagttgtttcaatgtatgaggacaggttcgagttatatgttctatgcagcaaaaaatgtgaaaaaacagccgacaatcaagctgagagggcaaattggtggaggattgcatctggcaagcctaatgtgcttactcttgattatgttaacatcagtccattttcccttccagcaagaaggacaaaggaattaagagctttgattggatggaggtattacttcagcttattcttagagttgtcagatattgccatgcccttcataagggttgctatcagcaaagtgagctctgcggtgtcctacttctgggtgtcaatgattggaaggtctcttgggctgattttctcagggattagacaatcactaggctggaaataagcttatacggtcatacctgttgagttttgagtctgacttctgggactgaatgaatgtctgttaggttatgcattgtaaatctttgagatggctgtcatttttctctgctttctttttcatcttagtgtgtaagaaagtccattgatttcgtggacggaatatgttaatctgtggattactgaaatccatccacatccagtctttctcaaaacagaattcatgtacacgaaatgtctagatgcatttttgtttttttattcaagagggacggaacatcatatttttctcgagacagaatagcaaggacagcatacattacgagcacgcatcattaattttgtacagggtttcatttctctccacccatacaatctggaacgaaatcatgtagtgtcaagaaatggaaaattcatccaaaaacgaaacaaaacggaactgag

SEQ ID NO: 54773 - DNA, 2229 bp, Zea Mays
atcttcgcagcattgttgctgtccgaggtcagccgccctctctctctcctcgtgctccgattcgtgggctcgagctccggtgactaggaacagcggcaaggaaacaatgcttctttctcccttcgcacctttgtgatgcactgaacactagtcaggagctctagtaatcctctaatggccgaatgttcattggcaacgctgagagtgagaggccagtatcaagggagatggacctggtccaacagcaagttgaatatgccaatcatggatccaaagaggaactacgccctcaagattcatcttccatgccaatccaaagcagcaagagaatggacaagtgttgcatttaccccttttggttttcatggaagggatcacagggtggaaacttcagttaaatgttactgtttgcagccactcatggattcggagagcatggtctcaccaaatctaatactgatttcggatgaagctcttctcactatcagcatggtttttgcatatttggctggagttgtaccctctgggcagacatctcctcgtgtcagaaatcagaatgtttctcaacatattccagagccaagctcctctcattctggtagggacctaaagttcttgcctgaaaggaatgctgcatttgaccccaacgatatgtggagtgaagtgagtgctaaactttccaaagccttacaagcacatgttcaagatgcccttttggatagccgagaggatggactcatgagtgataggaaaaactatcctttgagtatgcttgccattcatgctggtcccagattgcggcttcttctgatcacattccagcttctggaaatggaggcaagaggcacaccataactcgttgtttgactaggattgcttatgtatactcagtttattacaagtaagaaatatctctggaagttctgaactcgatggaatcaggtggttgcaagtatcgactaccttgatagatagtttaattcaaccagtatttatgaaatggattgaagaagaacaggccttggaaaatggacaaatcaacgaaaaacttatgaagacgataagcagcaaactaaaggagggcaataagatcttgaggaggtttaacagatttgggaaatctgaactctatttggatatgctctttttcctaagatttggttctgcaaggtgtgacagttattttaatgtcaaatttcttgctgaacatggagaaagaattttagaggaccttgttatttccttagctgatgtgattgctagtatttatctggagcttatgtcagtggatggtgatatgtctgctgaagttgttggttccagcttggttctatgttctctatcaaccagagaactccaaaagctgcgcaatgaggtggcaattaattggtggttgcaccaatacttcaagtcagttgtttcaatgtatgaggacaggttcgagttatatgttctatgcagcaaaaaatgtgaaaaaacagccgacaatcaagctgagagggcaaattggtggaggattgcatctggcaagcctaatgtgcttactcttgattatgttaacatcagtccattttcccttccagcaagaaggacaaaggaattaagagctttgattggatggaggtattacttcagcttattcttagagttgtcagatattgccatgcccttcataagggttgctatcagcaaagtgagctctgcggtgtcctacttctgggtgtcaatgattggaaggtctcttgggctgattttctcagggattagacaatcactaggctggaaataagcttatacggtcatacctgttgagttttgagtctgacttctgggactgaatgaatgtctgttaggttatgcattgtaaatctttgagatggctgtcatttttctctgctttctttttcatcttagtgtgtaagaaagtccattgatttcgtggacggaatatgttaatctgtggattactgaaatccatccacatccagtctttctcaaaacagaattcatgtacacgaaatgtctagatgcatttttgtttttttattcaagagggacggaacatcatatttttctcgagacagaatagcaaggacagcatacattacgagcacgcatcattaattttgtacagggtttcatttctctccacccatacaatctggaacgaaatcatgtagtgtcaagaaatggaaaattcatccaaaaacgaaacaaaacggaactgag

SEQ ID NO: 54774 - DNA, 2256 bp, Zea Mays
cacacttttgcgcacgggagaagcttggcgtgcgcgcctccgtggtccgtcggatgcccaggcggaagatccaacggcaacgctccccaaaccttatcttcgcagcattgttgctgtccgaggtcagccgccctctctctctcctcgtgctccgattcgtgggctcgagctccggtgactaggaacagcggcaaggaaacaatgcttctttctcccttcgcacctttgtgatgcactgaacactagtcaggagctctagtaatcctctaatggccgaatgttcattggcaacgctgagagtgagaggccagtatcaagggagatggacctggtccaacagcaagttgaatatgccaatcatggatccaaagaggaactacgccctcaagattcatcttccatgccaatccaaagcagcaagagaatggacaagtgttgcatttaccccttttggttttcatggaagggatcacagggtggaaacttcagttaaatgttactgtttgcagccactcatggattcggagagcatggtctcaccaaatctaatactgatttcggatgaagctcttctcactatcagcatggtttttgcatatttggctggagttgtaccctctgggcagacatctcctcgtgtcagaaatcagaatgtttctcaacatattccagagccaagctcctctcattctgggacctaaagttcttgcctgaaaggaatgctgcatttgaccccaacgatatgtggagtgaagtgagtgctaaactttccaaagccttacaagcacatgttcaagatgcccttttggatagccgagaggatggactcatgagtgataggaaaaactatcctttgagtatgcttgccattcatgctggtcccagattgcggcttcttctgatcacattccagcttctggaaatggaggtaagaaatatctctggaagttctgaactcgatggaatcaggtggttgcaagtatcgactaccttgatagatagtttaattcaaccagtatttatgaaatggattgaagaagaacaggccttggaaaatggacaaatcaacgaaaaacttatgaagacgataagcagcaaactaaaggagggcaataagatcttgaggaggtttaacagatttgggaaatctgaactctatttggatatgctctttttcctaagatttggttctgcaaggtgtgacagttattttaatgtcaaatttcttgctgaacatggagaaagaattttagaggaccttgttatttccttagctgatgtgattgctagtatttatctggagcttatgtcagtggatggtgatatgtctgctgaagttgttggttccagcttggttctatgttctctatcaaccagagaactccaaaagctgcgcaatgaggtggcaattaattggtggttgcaccaatacttcaagtcagttgtttcaatgtatgaggacaggttcgagttatatgttctatgcagcaaaaaatgtgaaaaaacagccgacaatcaagctgagagggcaaattggtggaggattgcatctggcaagcctaatgtgcttactcttgattatgttaacatcagtccattttcccttccagcaagaaggacaaaggaattaagagctttgattggatggaggtattacttcagcttattcttagagttgtcagatattgccatgcccttcataagggttgctatcagcaaagtgagctctgcggtgtcctacttctgggtgtcaatgattggaaggtctcttgggctgattttctcagggattagacaatcactaggctggaaataagcttatacggtcatacctgttgagttttgagtctgacttctgggactgaatgaatgtctgttaggttatgcattgtaaatctttgagatggctgtcatttttctctgctttctttttcatcttagtgtgtaagaaagtccattgatttcgtggacggaatatgttaatctgtggattactgaaatccatccacatccagtctttctcaaaacagaattcatgtacacgaaatgtctagatgcatttttgtttttttattcaagagggacggaacatcatatttttctcgagacagaatagcaaggacagcatacattacgagcacgcatcattaattttgtacagggtttcatttctctccacccatacaatctggaacgaaatcatgtagtgtcaagaaatggaaaattcatccaaaaacgaaacaaaacggaactgag

SEQ ID NO: 54775 - DNA, 1210 bp, Zea Mays
cttgcttatgggactgagtaaccagttggcaagcccctgcttcgcagattgaaggatggcaggatggtgaactggaacgtgcaatcagaggacgctctttgcacactcgaagaagcgttcgagaaggtcaatccaaggttgggcttcaacgtcgagctgaaatttgacgacagtcttgaatacaccgaggaagagctcactcgcatcctccaggccatcctgaaggtggttttcgagtacgccaaggacaggcctatacttttctccagttttcagcccgacgctgcgcagctcatgcgcaaattgcaaggcacataccctgtctacttcttgacgaacggagggacggagctatacgccgacgtgaggaggaactcgctggaggaggccgtcaagctgtgccttgccggtggcctgcaaggaatagtttcagaagcccgcgggatcttcaggcaccctgccgccgtgccaaagatcaaggaggctaacctctccctgctaacctatggaacattgaacaacgtgccggaggcggtgtacatgcagcacctcatgggagtgaacggggtcatcgtcgacctggtgccggagatcaccgaggcagtctctgagctcatcgccctgcccgagcccgacctcgacctggaagtgggcagcttgagcaaccaggcggcagctagaggagccacaacaccgaatttctcgcagcgcgagatctcgttcctgctgaggcttattcctgagcttgtccaataatgcctagacttcctggtgtctgtctgtctgtctatcatggatgaattgactaatgtgttactgatgtactgatccgcatacaagaaaagaagcccttgtgcagggtattatttgtttatagaaaaaaaatagagttacagaacagaataaagaagccaggttctaattttatctcctattactggcttaactcgatgactaagaaggttcatttcagatttgaacatatctcgacaaccttccaccgtggacggaatctcattgaacacccaattatttctgcattcagatgccacaggtcaataagattatagcttcacgtttccaagggacttgccaacgtcttctgattcttaaaatggtgttgaataaatccgcagaacgtgaaggagagattccaaccaaggaccaacatctcttagcaaaattgcatctgaaaaaaagatgaatgacc

SEQ ID NO: 54776 - DNA, 1506 bp, Zea Mays
ttttgattgagagtagagagcatccaccggacagttaaaagtcaccaaggacgggtgcccaatcatcttccatgacaacttcatcttcacacaagacgatggtaagatttcacaaaagcgtgtggccgatattcagctggaagacttcctgcagtatgggctccagaatgagcaggggaaggttggcaagcccctgcttcgcagattgaaggatggcaggatggtgaactggaacgtgcaatcagaggacgctctttgcacactcgaagaagcgttcgagaaggtcaatccaaggttgggcttcaacgtcgagctgaaatttgacgacagtcttgaatacaccgaggaagagctcactcgcatcctccaggccatcctgaaggtggttttcgagtacgccaaggacaggcctatacttttctccagttttcagcccgacgctgcgcagctcatgcgcaaattgcaaggcacataccctgtctacttcttgacgaacggagggacggagctatacgccgacgtgaggaggaactcgctggaggaggccgtcaagctgtgccttgccggtggcctgcaaggaatagtttcagaagcccgcgggatcttcaggcaccctgccgccgtgccaaagatcaaggaggctaacctctccctgctaacctatggaacattgaacaacgtgccggaggcggtgtacatgcagcacctcatgggagtgaacggggtcatcgtcgacctggtgccggagatcaccgaggcagtctctgagctcatcgccctgcccgagcccgacctcgacctggaagtgggcagcttgagcaaccaggcggcagctagaggagccacaacaccgaatttctcgcagcgcgagatctcgttcctgctgaggcttattcctgagcttgtccaataatgcctagacttcctggtgtctgtctgtctgtctatcatggatgaattgactaatgtgttactgatgtactgatccgcatacaagaaaagaagcccttgtgcagggtattatttgttgtcgtgggttgatttgtctgtcctgaagcttgtcctgctcccagttttacttttttcttaagtaaaagttactgtaggaggtctacagtatttttttgcttaaggaaacaagattggggtgaagatacaggagggtgagtatagaaaaaaaatagagttacagaacagaataaagaagccaggttctaattttatctcctattactggcttaactcgatgactaagaaggttcatttcagatttgaacatatctcgacaaccttccaccgtggacggaatctcattgaacacccaattatttctgcattcagatgccacaggtcaataagattatagcttcacgtttccaagggacttgccaacgtcttctgattcttaaaatggtgttgaataaatccgcagaacgtgaaggagagattccaaccaaggaccaacatctcttagcaaaattgcatctgaaaaaaagatgaatgacc

SEQ ID NO: 54777 - DNA, 1781 bp, Zea Mays
cgcctcccggttcccttccccgtcgcgacctcgccacccaaattcatcaagctcaacacgatctcgattcgattccagttcatccatccaacgcctcccgcctgtacgtatagaagaaagaaggaagaaccgtcaccgtacgtcctcgccagtacaaataatggccctgctcaaagccgcgcgcgtcgccgatgtgcccaccctggacgtggtggtggcccccggcctggtggcggttgccaaggcgaggagcgccgcggcggtgggcggccggttctcggtgatcgggcaccgcggcaaggggatgaacgcgctggcgtcggaggacccgcgtctgcgggaggtccgcgagaacacggtccgctccttcaacgacgccggacgattccccgtcgactacgtcgagttcgacgtccagatgttgagaagagaaccgtgaataccgattttgcaggtcaccaaggacgggtgcccaatcatcttccatgacaacttcatcttcacacaagacgatggtaagatttcacaaaagcgtgtggccgatattcagctggaagacttcctgcagtatgggctccagaatgagcaggggaaggttggcaagcccctgcttcgcagattgaaggatggcaggatggtgaactggaacgtgcaatcagaggacgctctttgcacactcgaagaagcgttcgagaaggtcaatccaaggttgggcttcaacgtcgagctgaaatttgacgacagtcttgaatacaccgaggaagagctcactcgcatcctccaggccatcctgaaggtggttttcgagtacgccaaggacaggcctatacttttctccagttttcagcccgacgctgcgcagctcatgcgcaaattgcaaggcacataccctgtctacttcttgacgaacggagggacggagctatacgccgacgtgaggaggaactcgctggaggaggccgtcaagctgtgccttgccggtggcctgcaaggaatagtttcagaagcccgcgggatcttcaggcaccctgccgccgtgccaaagatcaaggaggctaacctctccctgctaacctatggaacattgaacaacgtgccggaggcggtgtacatgcagcacctcatgggagtgaacggggtcatcgtcgacctggtgccggagatcaccgaggcagtctctgagctcatcgccctgcccgagcccgacctcgacctggaagtgggcagcttgagcaaccaggcggcagctagaggagccacaacaccgaatttctcgcagcgcgagatctcgttcctgctgaggcttattcctgagcttgtccaataatgcctagacttcctggtgtctgtctgtctgtctatcatggatgaattgactaatgtgttactgatgtactgatccgcatacaagaaaagaagcccttgtgcagggtattatttgtttatagaaaaaaaatagagttacagaacagaataaagaagccaggttctaattttatctcctattactggcttaactcgatgactaagaaggttcatttcagatttgaacatatctcgacaaccttccaccgtggacggaatctcattgaacacccaattatttctgcattcagatgccacaggtcaataagattatagcttcacgtttccaagggacttgccaacgtcttctgattcttaaaatggtgttgaataaatccgcagaacgtgaaggagagattccaaccaaggaccaacatctcttagcaaaattgcatctgaaaaaaagatgaatgacc

SEQ ID NO: 54778 - DNA, 1623 bp, Zea Mays
cttaaaccttggagacatgtaaaggttgtggggagatgaactcgtgtgtactgatgcgatcacaacatgcggctgagaaagcaagagctaagagtaatgggctcaccaaagaggcttcagtgccaaaggatgccaacggcaatgccatctcagcgcagactttcaccttccgtgagctcgccaccgccaccaggaacttcaggcctgaatgcttcctgggagaaggaggttttggacgtgtttacaagggccgcctcgagagcacaggccaggttgttgctataaagcagcttaacagggatgggcttcaaggaaacagagaatttctagtagaagttctcatgctcagcttactacatcatcaaaacttggttaatttgattggctattgtgctgatggagaccagcgacttcttgtttatgaatatatgccctctggatcacttgaagatcatttgcacgatatacctcttgataaagaggccttggactggaacaccaggatgaaaattgcagcaggtgctgccaaaggactggagtacctacacgacaaagctaatccaccagttatttatagggatttcaagtcgtcgaacattctgttggatgaaagtttccacccgaagctctctgactttggacttgccaagttgggtccagttggcgacaaatcacacgtctcaacacgtgtaatgggtacatatggttattgtgcaccagaatatgctatgacagggcagctgacagtgaagtctgatgtgtatagctttggggtcgtcttgctagagttgataactggtcgtagggctatcgacagcaccagaccacatggagaacaaaatcttgtctcatgggcacgtcctcttttcaacgacagaaggaagctccccaagatggccgacccaaggctggaagggcggtaccccatgcgcgggctgtaccaagccctggcggtggcttccatgtgcactcagtcggaggccgcttcgcggccactgatcgcggacgtcgtgaccgctctgtcctacctggcgtcccagccgtatgaccccagcacagctttcgcttcaaggaggcttggtggaagcaagcctggcgagaacggtggcagggtggtttccaggaacgacgagaccggaacctcaaggtcgctggggaaggaccgggaggactcgcccagggacctcccggctatcctcctgaacaaggacctcgaacgcgagcgcatggtggcagaggccaagatgtggggcgaccgggagcgcttggtggcggaggccaagatgtggggcgaccgggagcgcatggtggccgaggccaagatgtggggcgagaattggcgcgacaagcggcgcgctgagaacgggcagggcagcctggactcgccgcctactaggaacagctaggggactggggagagcctttcacacatccatccatgcttatcggttgtttatttcctggtcgattttcgtcgccgcggcgggcaggggcagggtcagggagggtagatgtacatttctagggcagcgtcgtactggatagtgaatgcatttggttgtacttgtaaattctcagaaaaattttgtgagaatgaaaggacgcattttgagttccactcgt

SEQ ID NO: 54779 - DNA, 1312 bp, Zea Mays
tttgcatgagaatttctagtagaagttctcatgctcagcttactacatcatcaaaacttggttaatttgattggctattgtgctgatggagaccagcgacttcttgtttatgaatatatgccctctggatcacttgaagatcatttgcacgatatacctcttgataaagaggccttggactggaacaccaggatgaaaattgcagcaggtgctgccaaaggactggagtacctacacgacaaagctaatccaccagttatttatagggatttcaagtcgtcgaacattctgttggatgaaagtttccacccgaagctctctgactttggacttgccaagttgggtccagttggcgacaaatcacacgtctcaacacgtgtaatgggtacatatggttattgtgcaccagaatatgctatgacagggcagctgacagtgaagtctgatgtgtatagctttggggtcgtcttgctagagttgataactggtcgtagggctatcgacagcaccagaccacatggagaacaaaatcttgtctcatgggcacgtcctcttttcaacgacagaaggaagctccccaagatggccgacccaaggctggaagggcggtaccccatgcgcgggctgtaccaagccctggcggtggcttccatgtgcactcagtcggaggccgcttcgcggccactgatcgcggacgtcgtgaccgctctgtcctacctggcgtcccagccgtatgaccccagcacagctttcgcttcaaggaggcttggtggaagcaagcctggcgagaacggtggcagggtggtttccaggaacgacgagaccggaacctcaaggtcgctggggaaggaccgggaggactcgcccagggacctcccggctatcctcctgaacaaggacctcgaacgcgagcgcatggtggcagaggccaagatgtggggcgaccgggagcgcttggtggcggaggccaagatgtggggcgaccgggagcgcatggtggccgaggccaagatgtggggcgagaattggcgcgacaagcggcgcgctgagaacgggcagggcagcctggactcgccgcctactaggaacagctaggggactggggagagcctttcacacatccatccatgcttatcggttgtttatttcctggtcgattttcgtcgccgcggcgggcaggggcagggtcagggagggtagatgtacatttctagggcagcgtcgtactggatagtgaatgcatttggttgtacttgtaaattctcagaaaaattttgtgagaatgaaaggacgcattttgagttccactcgt

SEQ ID NO: 54780 - DNA, 948 bp, Zea Mays
atcactcaccaagactccaagcactcacctcctcagctcattgccagcctttggttccttccagctagcaaccggacggccagcaagccagcagactagtagctcttctcagttctcacacctactgtgtctgtgtgtgctcgcctttagcggcaagcgacccaccccccttcggtagcgagcgacaatgcagtacgcggcggcggagcaggcgtggtacatgccggcgaccacgacgatgatggcggagagcgcggtggcgcgcgtggagcggctggcgtcggagagcgcggtggtggtgttcagcgtgagcagctgctgcatgtgccacgccgtgaagcggctcttctgcggcatgggcgtgcacccgacggtgcacgagctggacctggacccgcgcggacgagagctggagcacgccctcgcccgcctcatcggctacggccccgccggcgcgcccgtcgtccccgtcgtcttcatcggcgggaagctggtcggcgccatggaccgggtcatggccgcgcatatcaacggctccctcgtcccacttctcaaggaggccggcgcgctctggctctgaactaacctgatgtcacttgctgcaagctaatcaaactacgtactaagctacggtgataggaggatacatccatggacagggccggatggtggtagatcagtgatgcatcggattgggcttaatgtgtgtgagtagtgtgtgcaagagagaagagaggctggtaccgtgtgtgtgcttttttctcactacctactgcctccgtcggtgtttgtgtgtgcgtgcatgtggtgtttgacgcatgcgctggatttgctttgcttggggtgctacactgttaccaccactgttgtttaatttgatatcctttaattttaataccttgtttcctctcacttttatgggtgtatgtctttgcctactgatgtctg

SEQ ID NO: 54781 - DNA, 1456 bp, Zea Mays
tttttgaactgctaggattgagttcatcaggtgaagaacagatgggctggaaagaccatcgttgacctcttcactgatgagttcaaagggcgttcccgcgattactatgttcatgcagtgaagtgtgggaggcttcaggttgatgggcaaatggttcacacagactatattgtgaaatcatcacaaaagataagccacttcttgcataggcacgagccacctgtcttggcgggtgatatttcaatacttaagaatgaagttgatgtcgtaactatttgcaaaccagcttctgttccagttcatccatgtggtcaataccgcaagaatactgtagttgggattctgcaggcagagcatgggttaacacccctatttccggtgcatcggttagatcgtttggtttcaggcctccttatatttgcaaaaaatgccgacagagctgaatgtttcaggcaacagattgaagctggtctgctgcaaaaagaatatgtggccaaggttgttggggtttttcctgatggtgagcaaaccgtcgatgccaatgtaaatttcaacgcacgggaaggaaggagtaccgtggagattagtggtggtgctggtgaagaaccaaatggaaaacaagcactcactaggtttcaaaggatttgcacggatgggactcacagtattgtcttgtgcaaacctgtgactggtcgaactcaccagataagggtgcatctaaagcaagctggttatccaatagctaatgatgagctgtacctatcggggaacttttgtccacgatcaacaaaaggaacaaatgccagtaaaaaaattgcaccatcagatccagacagtagtgctgctgatcatggcagcaaagatgcaggaacggatgtggagtttgatatcgaccccatgtgcacaaactgtccaaatcttgctccagtaggttatgatagagatgaggaaggactatggttgcattgtgtgcggtacactggtcctgattggagctacgaatgtccttatcctgattgggcgttccttggtagcgtgtcaacaaagaagatgaagtcatgatgtagttcatggtgattggtgaatagtaagcccataaaaaaactgaacaatcaaatagtattgttttggcgttacctatgactgggcttccgaggttttcattcaaatcaaacacattagatccggttttcctcggcttctcattcagccaattcacggttcaaaatccactccttaaaattcaacatacattatcgcatccagcctttttgattggttccatatttacggcattcctgtgttgtgacgtcccagctttgaaaaaaaaatgcatgttgtaatttagatagcattccagtgttgtgcccgcgggacagacgttggaagttctgaactaacttgcatgtgaacaagctgcaggatgtatttgctagcagcagaggtgacgacaatt

SEQ ID NO: 54782 - DNA, 2460 bp, Zea Mays
cagtcaaacccaccgtcccttgcacgctcggcttggctgaagcggagagtttcctctgttcccccattccgtcgtgtcaccaccgccgccgccggagtgtgtcatcgccgattcgcctggtatggcagcaccgcccgggggagcggggatagtgtggcagacgccggccaacccgcccgagtcgcacgactacatcatccgcaacggtcggcgctacgtgaggccttactacttcgagttcatctcccatgtgaagaacagatgggctggaaagaccatcgttgacctcttcactgatgagttcaaagggcgttcccgcgattactatgtatgatgccattatttcctttgaatttcatgtaccatactgtttcttttcattacacgccattgtggttatatcattgtctgccaggaggtcctagttgtagagagatgtccataacaggcttgctactgaatgaagtctctgttgtttattgaaccccatcgtcttgaaccgtgcatcttcctttttatttaaaccttgtgcttcagattttgagctcattcatagtaacatatgcattgctgcatgtaagtgaaaggtgaaattgctaggttcatgcagtgaagtgtgggaggcttcaggttgatgggcaaatggttcacacagactatattgtgaaatcatcacaaaagataagccacttcttgcataggtcagttgctttgatcaattttgaaattattacccccactaaacaagtgttcgataatttcacttcataagttcaacatagattactccatacaaacaaatgttccaaagattaggagcagcataaatcttcacaattttctgcagatacattatcctttacatgcttatatcataaaaatggcaagtgaatcaacaggtaagtaacagatgttttggttaatgtctcaatttgctctttctattggaattatttttagaatatcaataaaatattagttatactgatgaactgttgttgattccttgacttctaagttaatgatgtcatttagtttaactttgtgtgccattttaccttcatgtagttctctagttaaccagatacttcctgtggcatgcagacaggaacctagaccctctgtgttctgacttaacaaaaataattcacatgtctttttctcatttacaaatttttagttcaagtctttttctaaaggtgtttttttcttccaggcacgagccacctgtcttggcgggtgatatttcaatacttaagaatgaagttgatgtcgtaactatttgcaaaccagcttctgttccagttcatccatgtggtcaataccgcaagaatactgtagttgggattctgcaggcagagcatgggttaacacccctatttctgcatcggttagatcgtttggtttcaggcctccttatatttgcaaaaaatgccgacagagctgaatgtttcaggcaacagattgaagctggtctgctgcaaaaagaatatgtggccaaggttgttggggtttttcctgatggtgagcaaaccgtcgatgccaatgtaaatttcaacgcacgggaaggaaggagtaccgtggagattagtggtggtgctggtgaagaaccaaatggaaaacaagcactcactaggtttcaaaggatttgcacggatgggactcacagtattgtcttgtgcaaacctgtgactggtcgaactcaccagataagggtgcatctaaagcaagctggttatccaatagctaatgatgagctgtacctatcggggaacttttgtccacgatcaacaaaaggaacaaatgccagtaaaaaaattgcaccatcagatccagacagtagtgctgctgatcatggcagcaaagatgcaggaacggatgtggagtttgatatcgaccccatgtgcacaaactgtccaaatcttgctccagtaggttatgatagagatgaggaaggactatggttgcattgtgtgcggtacactggtcctgattggagctacgaatgtccttatcctgattgggcgttccttggtagcgtgtcaacaaagaagatgaagtcatgatgtagttcatggtgattggtgaatagtaagcccataaaaaaactgaacaatcaaatagtattgttttggcgttacctatgactgggcttccgaggttttcattcaaatcaaacacattagatccggttttcctcggcttctcattcagccaattcacggttcaaaatccactccttaaaattcaacatacattatcgcatccagcctttttgattggttccatatttacggcattcctgtgttgtgacgtcccagctttgaaaaaaaaatgcatgttgtaatttagatagcattccagtgttgtgcccgcgggacagacgttggaagttctgaactaacttgcatgtgaacaagctgcaggatgtatttgctagcagcagaggtgacgacaatt

SEQ ID NO: 54783 - DNA, 2191 bp, Zea Mays
cagtcaaacccaccgtcccttgcacgctcggcttggctgaagcggagagtttcctctgttcccccattccgtcgtgtcaccaccgccgccgccggagtgtgtcatcgccgattcgcctggtatggcagcaccgcccgggggagcggggatagtgtggcagacgccggccaacccgcccgagtcgcacgactacatcatccgcaacggtcggcgctacgtgaggccttactacttcgagttcatctcccatgtgaagaacagatgggctggaaagaccatcgttgacctcttcactgatgagttcaaagggcgttcccgcgattactatgttcatgcagtgaagtgtgggaggcttcaggttgatgggcaaatggttcacacagactatattgtgaaatcatcacaaaagataagccacttcttgcataggtcagttgctttgatcaattttgaaattattacccccactaaacaagtgttcgataatttcacttcataagttcaacatagattactccatacaaacaaatgttccaaagattaggagcagcataaatcttcacaattttctgcagatacattatcctttacatgcttatatcataaaaatggcaagtgaatcaacaggtaagtaacagatgttttggttaatgtctcaatttgctctttctattggaattatttttagaatatcaataaaatattagttatactgatgaactgttgttgattccttgacttctaagttaatgatgtcatttagtttaactttgtgtgccattttaccttcatgtagttctctagttaaccagatacttcctgtggcatgcagacaggaacctagaccctctgtgttctgacttaacaaaaataattcacatgtctttttctcatttacaaatttttagttcaagtctttttctaaaggtgtttttttcttccaggcacgagccacctgtcttggcgggtgatatttcaatacttaagaatgaagttgatgtcgtaactatttgcaaaccagcttctgttccagttcatccatgtggtcaataccgcaagaatactgtagttgggattctgcaggcagagcatgggttaacacccctatttccggtgcatcggttagatcgtttggtttcaggcctccttatatttgcaaaaaatgccgacagagctgaatgtttcaggcaacagattgaagctggtctgctgcaaaaagaatatgtggccaaggttgttggggtttttcctgatggtgagcaaaccgtcgatgccaatgtaaatttcaacgcacgggaaggaaggagtaccgtggagattagtggtggtgctggtgaagaaccaaatggaaaacaagcactcactaggtttcaaaggatttgcacggatgggactcacagtattgtcttgtgcaaacctgtgactggtcgaactcaccagataagggtgcatctaaagcaagctggttatccaatagctaatgatgagctgtacctatcggggaacttttgtccacgatcaacaaaaggaacaaatgccagtaaaaaaattgcaccatcagatccagacagtagtgctgctgatcatggcagcaaagatgcaggaacggatgtggagtttgatatcgaccccatgtgcacaaactgtccaaatcttgctccagtaggttatgatagagatgaggaaggactatggttgcattgtgtgcggtacactggtcctgattggagctacgaatgtccttatcctgattgggcgttccttggtagcgtgtcaacaaagaagatgaagtcatgatgtagttcatggtgattggtgaatagtaagcccataaaaaaactgaacaatcaaatagtattgttttggcgttacctatgactgggcttccgaggttttcattcaaatcaaacacattagatccggttttcctcggcttctcattcagccaattcacggttcaaaatccactccttaaaattcaacatacattatcgcatccagcctttttgattggttccatatttacggcattcctgtgttgtgacgtcccagctttgaaaaaaaaatgcatgttgtaatttagatagcattccagtgttgtgcccgcgggacagacgttggaagttctgaactaacttgcatgtgaacaagctgcaggatgtatttgctagcagcagaggtgacgacaatt

SEQ ID NO: 54784 - DNA, 2273 bp, Zea Mays
cagtcaaacccaccgtcccttgcacgctcggcttggctgaagcggagagtttcctctgttcccccattccgtcgtgtcaccaccgccgccgccggagtgtgtcatcgccgattcgcctggtatggcagcaccgcccgggggagcggggatagtgtggcagacgccggccaacccgcccgagtcgcacgactacatcatccgcaacggtgaagaacagatgggctggaaagaccatcgttgacctcttcactgatgagttcaaagggcgttcccgcgattactatgtatgatgccattatttcctttgaatttcatgtaccatactgtttcttttcattacacgccattgtggttatatcattgtctgccaggaggtcctagttgtagagagatgtccataacaggcttgctactgaatgaagtctctgttgtttattgaaccccatcgtcttgaaccgtgcatcttcctttttatttaaaccttgtgcttcagattttgagctcattcatagtaacatatgcattgctgcatgtaagtgaaaggtgaaattgctaggttcatgcagtgaagtgtgggaggcttcaggttgatgggcaaatggttcacacagactatattgtgaaatcatcacaaaagataagccacttcttgcatagatacattatcctttacatgcttatatcataaaaatggcaagtgaatcaacaggtaagtaacagatgttttggttaatgtctcaatttgctctttctattggaattatttttagaatatcaataaaatattagttatactgatgaactgttgttgattccttgacttctaagttaatgatgtcatttagtttaactttgtgtgccattttaccttcatgtagttctctagttaaccagatacttcctgtggcatgcagacaggaacctagaccctctgtgttctgacttaacaaaaataattcacatgtctttttctcatttacaaatttttagttcaagtctttttctaaaggtgtttttttcttccaggcacgagccacctgtcttggcgggtgatatttcaatacttaagaatgaagttgatgtcgtaactatttgcaaaccagcttctgttccagttcatccatgtggtcaataccgcaagaatactgtagttgggattctgcaggcagagcatgggttaacacccctatttccggtgcatcggttagatcgtttggtttcaggcctccttatatttgcaaaaaatgccgacagagctgaatgtttcaggcaacagattgaagctggtctgctgcaaaaagaatatgtggccaaggttgttggggtttttcctgatggtgagcaaaccgtcgatgccaatgtaaatttcaacgcacgggaaggaaggagtaccgtggagattagtggtggtgctggtgaagaaccaaatggaaaacaagcactcactaggtttcaaaggatttgcacggatgggactcacagtattgtcttgtgcaaacctgtgactggtcgaactcaccagataagggtgcatctaaagcaagctggttatccaatagctaatgatgagctgtacctatcggggaacttttgtccacgatcaacaaaaggaacaaatgccagtaaaaaaattgcaccatcagatccagacagtagtgctgctgatcatggcagcaaagatgcaggaacggatgtggagtttgatatcgaccccatgtgcacaaactgtccaaatcttgctccagtaggttatgatagagatgaggaaggactatggttgcattgtgtgcggtacactggtcctgattggagctacgaatgtccttatcctgattgggcgttccttggtagcgtgtcaacaaagaagatgaagtcatgatgtagttcatggtgattggtgaatagtaagcccataaaaaaactgaacaatcaaatagtattgttttggcgttacctatgactgggcttccgaggttttcattcaaatcaaacacattagatccggttttcctcggcttctcattcagccaattcacggttcaaaatccactccttaaaattcaacatacattatcgcatccagcctttttgattggttccatatttacggcattcctgtgttgtgacgtcccagctttgaaaaaaaaatgcatgttgtaatttagatagcattccagtgttgtgcccgcgggacagacgttggaagttctgaactaacttgcatgtgaacaagctgcaggatgtatttgctagcagcagaggtgacgacaatt

SEQ ID NO: 54785 - DNA, 1904 bp, Zea Mays
cagtcaaacccaccgtcccttgcacgctcggcttggctgaagcggagagtttcctctgttcccccattccgtcgtgtcaccaccgccgccgccggagtgtgtcatcgccgattcgcctggtatggcagcaccgcccgggggagcggggatagtgtggcagacgccggccaacccgcccgagtcgcacgactacatcatccgcaacggtgaagaacagatgggctggaaagaccatcgttgacctcttcactgatgagttcaaagggcgttcccgcgattactatgtatgatgccattatttcctttgaatttcatgtaccatactgtttcttttcattacacgccattgtggttatatcattgtctgccaggaggtcctagttgtagagagatgtccataacaggcttgctactgaatgaagtctctgttgtttattgaaccccatcgtcttgaaccgtgcatcttcctttttatttaaaccttgtgcttcagattttgagctcattcatagtaacatatgcattgctgcatgtaagtgaaaggtgaaattgctaggttcatgcagtgaagtgtgggaggcttcaggttgatgggcaaatggttcacacagactatattgtgaaatcatcacaaaagataagccacttcttgcataggcacgagccacctgtcttggcgggtgatatttcaatacttaagaatgaagttgatgtcgtaactatttgcaaaccagcttctgttccagttcatccatgtggtcaataccgcaagaatactgtagttgggattctgcaggcagagcatgggttaacacccctatttccggtgcatcggttagatcgtttggtttcaggcctccttatatttgcaaaaaatgccgacagagctgaatgtttcaggcaacagattgaagctggtctgctgcaaaaagaatatgtggccaaggttgttggggtttttcctgatggtgagcaaaccgtcgatgccaatgtaaatttcaacgcacgggaaggaaggagtaccgtggagattagtggtggtgctggtgaagaaccaaatggaaaacaagcactcactaggtttcaaaggatttgcacggatgggactcacagtattgtcttgtgcaaacctgtgactggtcgaactcaccagataagggtgcatctaaagcaagctggttatccaatagctaatgatgagctgtacctatcggggaacttttgtccacgatcaacaaaaggaacaaatgccagtaaaaaaattgcaccatcagatccagacagtagtgctgctgatcatggcagcaaagatgcaggaacggatgtggagtttgatatcgaccccatgtgcacaaactgtccaaatcttgctccagtaggttatgatagagatgaggaaggactatggttgcattgtgtgcggtacactggtcctgattggagctacgaatgtccttatcctgattgggcgttccttggtagcgtgtcaacaaagaagatgaagtcatgatgtagttcatggtgattggtgaatagtaagcccataaaaaaactgaacaatcaaatagtattgttttggcgttacctatgactgggcttccgaggttttcattcaaatcaaacacattagatccggttttcctcggcttctcattcagccaattcacggttcaaaatccactccttaaaattcaacatacattatcgcatccagcctttttgattggttccatatttacggcattcctgtgttgtgacgtcccagctttgaaaaaaaaatgcatgttgtaatttagatagcattccagtgttgtgcccgcgggacagacgttggaagttctgaactaacttgcatgtgaacaagctgcaggatgtatttgctagcagcagaggtgacgacaatt

SEQ ID NO: 54786 - DNA, 1674 bp, Zea Mays
cagtcaaacccaccgtcccttgcacgctcggcttggctgaagcggagagtttcctctgttcccccattccgtcgtgtcaccaccgccgccgccggagtgtgtcatcgccgattcgcctggtatggcagcaccgcccgggggagcggggatagtgtggcagacgccggccaacccgcccgagtcgcacgactacatcatccgcaacggtgaagaacagatgggctggaaagaccatcgttgacctcttcactgatgagttcaaagggcgttcccgcgattactattgaagtgtgggaggcttcaggttgatgggcaaatggttcacacagactatattgtgaaatcatcacaaaagataagccacttcttgcatagatacattatcctttacatgcttatatcataaaaatggcaagtgaatcaacaggcacgagccacctgtcttggcgggtgatatttcaatacttaagaatgaagttgatgtcgtaactatttgcaaaccagcttctgttccagttcatccatgtggtcaataccgcaagaatactgtagttgggattctgcaggcagagcatgggttaacacccctatttccggtgcatcggttagatcgtttggtttcaggcctccttatatttgcaaaaaatgccgacagagctgaatgtttcaggcaacagattgaagctggtctgctgcaaaaagaatatgtggccaaggttgttggggtttttcctgatggtgagcaaaccgtcgatgccaatgtaaatttcaacgcacgggaaggaaggagtaccgtggagattagtggtggtgctggtgaagaaccaaatggaaaacaagcactcactaggtttcaaaggatttgcacggatgggactcacagtattgtcttgtgcaaacctgtgactggtcgaactcaccagataagggtgcatctaaagcaagctggttatccaatagctaatgatgagctgtacctatcggggaacttttgtccacgatcaacaaaaggaacaaatgccagtaaaaaaattgcaccatcagatccagacagtagtgctgctgatcatggcagcaaagatgcaggaacggatgtggagtttgatatcgaccccatgtgcacaaactgtccaaatcttgctccagtaggttatgatagagatgaggaaggactatggttgcattgtgtgcggtacactggtcctgattggagctacgaatgtccttatcctgattgggcgttccttggtagcgtgtcaacaaagaagatgaagtcatgatgtagttcatggtgattggtgaatagtaagcccataaaaaaactgaacaatcaaatagtattgttttggcgttacctatgactgggcttccgaggttttcattcaaatcaaacacattagatccggttttcctcggcttctcattcagccaattcacggttcaaaatccactccttaaaattcaacatacattatcgcatccagcctttttgattggttccatatttacggcattcctgtgttgtgacgtcccagctttgaaaaaaaaatgcatgttgtaatttagatagcattccagtgttgtgcccgcgggacagacgttggaagttctgaactaacttgcatgtgaacaagctgcaggatgtatttgctagcagcagaggtgacgacaatt

SEQ ID NO: 54787 - DNA, 2317 bp, Zea Mays
cagtcaaacccaccgtcccttgcacgctcggcttggctgaagcggagagtttcctctgttcccccattccgtcgtgtcaccaccgccgccgccggagtgtgtcatcgccgattcgcctggtatggcagcaccgcccgggggagcggggatagtgtggcagacgccggccaacccgcccgagtcgcacgactacatcatccgcaacggtcggcgctacgtgaggccttactacttcgagttcatctcccatgtgaagaacagatgggctggaaagaccatcgttgacctcttcactgatgagttcaaagggcgttcccgcgattactatgtatgatgccattatttcctttgaatttcatgtaccatactgtttcttttcattacacgccattgtggttatatcattgtctgccaggaggtcctagttgtagagagatgtccataacaggcttgctactgaatgaagtctctgttgtttattgaaccccatcgtcttgaaccgtgcatcttcctttttatttaaaccttgtgcttcagattttgagctcattcatagtaacatatgcattgctgcatgtaagtgaaaggtgaaattgctaggttcatgcagtgaagtgtgggaggcttcaggttgatgggcaaatggttcacacagactatattgtgaaatcatcacaaaagataagccacttcttgcatagatacattatcctttacatgcttatatcataaaaatggcaagtgaatcaacaggtaagtaacagatgttttggttaatgtctcaatttgctctttctattggaattatttttagaatatcaataaaatattagttatactgatgaactgttgttgattccttgacttctaagttaatgatgtcatttagtttaactttgtgtgccattttaccttcatgtagttctctagttaaccagatacttcctgtggcatgcagacaggaacctagaccctctgtgttctgacttaacaaaaataattcacatgtctttttctcatttacaaatttttagttcaagtctttttctaaaggtgtttttttcttccaggcacgagccacctgtcttggcgggtgatatttcaatacttaagaatgaagttgatgtcgtaactatttgcaaaccagcttctgttccagttcatccatgtggtcaataccgcaagaatactgtagttgggattctgcaggcagagcatgggttaacacccctatttccggtgcatcggttagatcgtttggtttcaggcctccttatatttgcaaaaaatgccgacagagctgaatgtttcaggcaacagattgaagctggtctgctgcaaaaagaatatgtggccaaggttgttggggtttttcctgatggtgagcaaaccgtcgatgccaatgtaaatttcaacgcacgggaaggaaggagtaccgtggagattagtggtggtgctggtgaagaaccaaatggaaaacaagcactcactaggtttcaaaggatttgcacggatgggactcacagtattgtcttgtgcaaacctgtgactggtcgaactcaccagataagggtgcatctaaagcaagctggttatccaatagctaatgatgagctgtacctatcggggaacttttgtccacgatcaacaaaaggaacaaatgccagtaaaaaaattgcaccatcagatccagacagtagtgctgctgatcatggcagcaaagatgcaggaacggatgtggagtttgatatcgaccccatgtgcacaaactgtccaaatcttgctccagtaggttatgatagagatgaggaaggactatggttgcattgtgtgcggtacactggtcctgattggagctacgaatgtccttatcctgattgggcgttccttggtagcgtgtcaacaaagaagatgaagtcatgatgtagttcatggtgattggtgaatagtaagcccataaaaaaactgaacaatcaaatagtattgttttggcgttacctatgactgggcttccgaggttttcattcaaatcaaacacattagatccggttttcctcggcttctcattcagccaattcacggttcaaaatccactccttaaaattcaacatacattatcgcatccagcctttttgattggttccatatttacggcattcctgtgttgtgacgtcccagctttgaaaaaaaaatgcatgttgtaatttagatagcattccagtgttgtgcccgcgggacagacgttggaagttctgaactaacttgcatgtgaacaagctgcaggatgtatttgctagcagcagaggtgacgacaatt

SEQ ID NO: 54788 - DNA, 1728 bp, Zea Mays
cagtcaaacccaccgtcccttgcacgctcggcttggctgaagcggagagtttcctctgttcccccattccgtcgtgtcaccaccgccgccgccggagtgtgtcatcgccgattcgcctggtatggcagcaccgcccgggggagcggggatagtgtggcagacgccggccaacccgcccgagtcgcacgactacatcatccgcaacggtcggcgctacgtgaggccttactacttcgagttcatctcccatgtgaagaacagatgggctggaaagaccatcgttgacctcttcactgatgagttcaaagggcgttcccgcgattactatgttcatgcagtgaagtgtgggaggcttcaggttgatgggcaaatggttcacacagactatattgtgaaatcatcacaaaagataagccacttcttgcatagatacattatcctttacatgcttatatcataaaaatggcaagtgaatcaacaggcacgagccacctgtcttggcgggtgatatttcaatacttaagaatgaagttgatgtcgtaactatttgcaaaccagcttctgttccagttcatccatgtggtcaataccgcaagaatactgtagttgggattctgcaggcagagcatgggttaacacccctatttccggtgcatcggttagatcgtttggtttcaggcctccttatatttgcaaaaaatgccgacagagctgaatgtttcaggcaacagattgaagctggtctgctgcaaaaagaatatgtggccaaggttgttggggtttttcctgatggtgagcaaaccgtcgatgccaatgtaaatttcaacgcacgggaaggaaggagtaccgtggagattagtggtggtgctggtgaagaaccaaatggaaaacaagcactcactaggtttcaaaggatttgcacggatgggactcacagtattgtcttgtgcaaacctgtgactggtcgaactcaccagataagggtgcatctaaagcaagctggttatccaatagctaatgatgagctgtacctatcggggaacttttgtccacgatcaacaaaaggaacaaatgccagtaaaaaaattgcaccatcagatccagacagtagtgctgctgatcatggcagcaaagatgcaggaacggatgtggagtttgatatcgaccccatgtgcacaaactgtccaaatcttgctccagtaggttatgatagagatgaggaaggactatggttgcattgtgtgcggtacactggtcctgattggagctacgaatgtccttatcctgattgggcgttccttggtagcgtgtcaacaaagaagatgaagtcatgatgtagttcatggtgattggtgaatagtaagcccataaaaaaactgaacaatcaaatagtattgttttggcgttacctatgactgggcttccgaggttttcattcaaatcaaacacattagatccggttttcctcggcttctcattcagccaattcacggttcaaaatccactccttaaaattcaacatacattatcgcatccagcctttttgattggttccatatttacggcattcctgtgttgtgacgtcccagctttgaaaaaaaaatgcatgttgtaatttagatagcattccagtgttgtgcccgcgggacagacgttggaagttctgaactaacttgcatgtgaacaagctgcaggatgtatttgctagcagcagaggtgacgacaatt

SEQ ID NO: 54789 - DNA, 1641 bp, Zea Mays
ggcagttggcagtcaaacccaccgtcccttgcacgctcggcttggctgaagcggagagtttcctctgttcccccattccgtcgtgtcaccaccgccgccgccggagtgtgtcatcgccgattcgcctggtatggcagcaccgcccgggggagcggggatagtgtggcagacgccggccaacccgcccgagtcgcacgactacatcatccgcaacggtgaagaacagatgggctggaaagaccatcgttgacctcttcactgatgagttcaaagggcgttcccgcgattactatgttcatgcagtgaagtgtgggaggcttcaggttgatgggcaaatggttcacacagactatattgtgaaatcatcacaaaagataagccacttcttgcataggcacgagccacctgtcttggcgggtgatatttcaatacttaagaatgaagttgatgtcgtaactatttgcaaaccagcttctgttccagttcatccatgtggtcaataccgcaagaatactgtagttgggattctgcaggcagagcatgggttaacacccctatttccggtgcatcggttagatcgtttggtttcaggcctccttatatttgcaaaaaatgccgacagagctgaatgtttcaggcaacagattgaagctggtctgctgcaaaaagaatatgtggccaaggttgttggggtttttcctgatggtgagcaaaccgtcgatgccaatgtaaatttcaacgcacgggaaggaaggagtaccgtggagattagtggtggtgctggtgaagaaccaaatggaaaacaagcactcactaggtttcaaaggatttgcacggatgggactcacagtattgtcttgtgcaaacctgtgactggtcgaactcaccagataagggtgcatctaaagcaagctggttatccaatagctaatgatgagctgtacctatcggggaacttttgtccacgatcaacaaaaggaacaaatgccagtaaaaaaattgcaccatcagatccagacagtagtgctgctgatcatggcagcaaagatgcaggaacggatgtggagtttgatatcgaccccatgtgcacaaactgtccaaatcttgctccagtaggttatgatagagatgaggaaggactatggttgcattgtgtgcggtacactggtcctgattggagctacgaatgtccttatcctgattgggcgttccttggtagcgtgtcaacaaagaagatgaagtcatgatgtagttcatggtgattggtgaatagtaagcccataaaaaaactgaacaatcaaatagtattgttttggcgttacctatgactgggcttccgaggttttcattcaaatcaaacacattagatccggttttcctcggcttctcattcagccaattcacggttcaaaatccactccttaaaattcaacatacattatcgcatccagcctttttgattggttccatatttacggcattcctgtgttgtgacgtcccagctttgaaaaaaaaatgcatgttgtaatttagatagcattccagtgttgtgcccgcgggacagacgttggaagttctgaactaacttgcatgtgaacaagctgcaggatgtatttgctagcagcagaggtgacgacaatt

SEQ ID NO: 54790 - DNA, 2017 bp, Zea Mays
caactgatggcagttggcagtcaaacccaccgtcccttgcacgctcggcttggctgaagcggagagtttcctctgttcccccattccgtcgtgtcaccaccgccgccgccggagtgtgtcatcgccgattcgcctggtatggcagcaccgcccgggggagcggggatagtgtggcagacgccggccaacccgcccgagtcgcacgactacatcatccgcaacggtcggcgctacgtgaggccttactacttcgagttcatctcccatgtgaagaacagatgggctggaaagaccatcgttgacctcttcactgatgagttcaaagggcgttcccgcgattactatgtatgatgccattatttcctttgaatttcatgtaccatactgtttcttttcattacacgccattgtggttatatcattgtctgccaggaggtcctagttgtagagagatgtccataacaggcttgctactgaatgaagtctctgttgtttattgaaccccatcgtcttgaaccgtgcatcttcctttttatttaaaccttgtgcttcagattttgagctcattcatagtaacatatgcattgctgcatgtaagtgaaaggtgaaattgctaggttcatgcagtgaagtgtgggaggcttcaggttgatgggcaaatggttcacacagactatattgtgaaatcatcacaaaagataagccacttcttgcatagatacattatcctttacatgcttatatcataaaaatggcaagtgaatcaacaggcacgagccacctgtcttggcgggtgatatttcaatacttaagaatgaagttgatgtcgtaactatttgcaaaccagcttctgttccagttcatccatgtggtcaataccgcaagaatactgtagttgggattctgcaggcagagcatgggttaacacccctatttccggtgcatcggttagatcgtttggtttcaggcctccttatatttgcaaaaaatgccgacagagctgaatgtttcaggcaacagattgaagctggtctgctgcaaaaagaatatgtggccaaggttgttggggtttttcctgatggtgagcaaaccgtcgatgccaatgtaaatttcaacgcacgggaaggaaggagtaccgtggagattagtggtggtgctggtgaagaaccaaatggaaaacaagcactcactaggtttcaaaggatttgcacggatgggactcacagtattgtcttgtgcaaacctgtgactggtcgaactcaccagataagggtgcatctaaagcaagctggttatccaatagctaatgatgagctgtacctatcggggaacttttgtccacgatcaacaaaaggaacaaatgccagtaaaaaaattgcaccatcagatccagacagtagtgctgctgatcatggcagcaaagatgcaggaacggatgtggagtttgatatcgaccccatgtgcacaaactgtccaaatcttgctccagtaggttatgatagagatgaggaaggactatggttgcattgtgtgcggtacactggtcctgattggagctacgaatgtccttatcctgattgggcgttccttggtagcgtgtcaacaaagaagatgaagtcatgatgtagttcatggtgattggtgaatagtaagcccataaaaaaactgaacaatcaaatagtattgttttggcgttacctatgactgggcttccgaggttttcattcaaatcaaacacattagatccggttttcctcggcttctcattcagccaattcacggttcaaaatccactccttaaaattcaacatacattatcgcatccagcctttttgattggttccatatttacggcattcctgtgttgtgacgtcccagctttgaaaaaaaaatgcatgttgtaatttagatagcattccagtgttgtgcccgcgggacagacgttggaagttctgaactaacttgcatgtgaacaagctgcaggatgtatttgctagcagcagaggtgacgacaatt

SEQ ID NO: 54791 - DNA, 762 bp, Zea Mays
cagtcaaacccaccgtcccttgcacgctcggcttggctgaagcggagagtttcctctgttcccccattccgtcgtgtcaccaccgccgccgccggagtgtgtcatcgccgattcgcctggtatggcagcaccgcccgggggagcggggatagtgtggcagacgccggccaacccgcccgagtcgcacgactacatcatccgcaacggtcggcgctacgtgaggccttactacttcgagttcatctcccatgtgaagaacagatgggctggaaagaccatcgttgacctcttcactgatgagttcaaagggcgttcccgcgattactatgttcatgcagtgaagtgtgggaggcttcaggttgatgggcaaatggttcacacagactatattgtgaaatcatcacaaaagataagccacttcttgcataggcacgagccacctgtcttggcgggtgatatttcaatacttaagaatgaagttgatgtcgtaactatttgcaaaccagcttctgttccagttcatccatgtggtcaataccgcaagaatactgtagttgggattctgcaggcagagcatgggttaacacccctatttccggtgcatcggttagatcgtttggtttcaggcctccttatatttgcaaaaaatgccgacagagctgaatgtttcaggcaacagcttcttcaccaaaaatggcgatatagcaagcatatggaatgatcatcttaagacgtgggtcaagaataacagcaacaaccatg

SEQ ID NO: 54792 - DNA, 2052 bp, Zea Mays
cagtcaaacccaccgtcccttgcacgctcggcttggctgaagcggagagtttcctctgttcccccattccgtcgtgtcaccaccgccgccgccggagtgtgtcatcgccgattcgcctggtatggcagcaccgcccgggggagcggggatagtgtggcagacgccggccaacccgcccgagtcgcacgactacatcatccgcaacggtgaagaacagatgggctggaaagaccatcgttgacctcttcactgatgagttcaaagggcgttcccgcgattactatgtatgatgccattatttcctttgaatttcatgtaccatactgtttcttttcattacacgccattgtggttatatcattgtctgccaggaggtcctagttgtagagagatgtccataacaggcttgctactgaatgaagtctctgttgtttattgaaccccatcgtcttgaaccgtgcatcttcctttttatttaaaccttgtgcttcagattttgagctcattcatagtaacatatgcattgctgcatgtaagtgaaaggtgaaattgctaggttcatgcagtgaagtgtgggaggcttcaggttgatgggcaaatggttcacacagactatattgtgaaatcatcacaaaagataagccacttcttgcataggtcagttgctttgatcaattttgaaattattacccccactaaacaagtgttcgataatttcacttcataagttcaacatagattactccatacaaacaaatgttccaaagattaggagcagcataaatcttcacaattttctgcagatacattatcctttacatgcttatatcataaaaatggcaagtgaatcaacaggtaagtaacagatgttttggttaatgtctcaatttgctctttctattggaattatttttagaatatcaataaaatattagttatactgatgaactgttgttgattccttgacttctaagttaatgatgtcatttagtttaactttgtgtgccattttaccttcatgtagttctctagttaaccagatacttcctgtggcatgcagacaggaacctagaccctctgtgttctgacttaacaaaaataattcacatgtctttttctcatttacaaatttttagttcaagtctttttctaaaggtgtttttttcttccaggcacgagccacctgtcttggcgggtgatatttcaatacttaagaatgaagttgatgtcgtaactatttgcaaaccagcttctgttccagtaggtttatatttataatgtaccggcacgagccacctgtcctgcctacttattgttattcttctaatcaagtgcatttgtcaatatgtcatatgtttgttaaatatgtcacctgaactaaaatgcattaagttttgtagcaacacaaattatatgtgctagtaaatagtcaatacagtactcctaaaattatatctgatgggctttttcgggcatttgtactggtagaatcttagcttttgtttctagtaatttgttatacaacttgatgatgcctttatcaagtaatcatgaaggattttagaagtaactatgggaaaactagaatacctaggtggaagcaatatcattgttcttataagaattaagaaaatagcccccccaagtgttaaccaaagaggacctgaacttaggtggtgtgtacacacacgccttctgccaattgagctaagtttagtacctacagaaatacttaattgctaattagtgtatgtttgattgaagtcagaatgttatatacataactcaagtgctttccattttgtaggttcatccatgtggtcaataccgcaagaatactgtagttgggattctgcaggcagagcatgggttaacacccctatttccggtgcatcggttagatcgtttggtttcaggcctccttatatttgcaaaaaatgccgacagagctgaatgtttcaggcaacagcttcttcaccaaaaatggcgatatagcaagcatatggaatgatcatcttaagacgtgggtcaagaataacagcaacaaccatg

SEQ ID NO: 54793 - DNA, 1274 bp, Zea Mays
cagtcaaacccaccgtcccttgcacgctcggcttggctgaagcggagagtttcctctgttcccccattccgtcgtgtcaccaccgccgccgccggagtgtgtcatcgccgattcgcctggtatggcagcaccgcccgggggagcggggatagtgtggcagacgccggccaacccgcccgagtcgcacgactacatcatccgcaacggtcggcgctacgtgaggccttactacttcgagttcatctcccatgtgaagaacagatgggctggaaagaccatcgttgacctcttcactgatgagttcaaagggcgttcccgcgattactatgttcatgcagtgaagtgtgggaggcttcaggttgatgggcaaatggttcacacagactatattgtgaaatcatcacaaaagataagccacttcttgcataggtcagttgctttgatcaattttgaaattattacccccactaaacaagtgttcgataatttcacttcataagttcaacatagattactccatacaaacaaatgttccaaagattaggagcagcataaatcttcacaattttctgcagatacattatcctttacatgcttatatcataaaaatggcaagtgaatcaacaggtaagtaacagatgttttggttaatgtctcaatttgctctttctattggaattatttttagaatatcaataaaatattagttatactgatgaactgttgttgattccttgacttctaagttaatgatgtcatttagtttaactttgtgtgccattttaccttcatgtagttctctagttaaccagatacttcctgtggcatgcagacaggaacctagaccctctgtgttctgacttaacaaaaataattcacatgtctttttctcatttacaaatttttagttcaagtctttttctaaaggtgtttttttcttccaggcacgagccacctgtcttggcgggtgatatttcaatacttaagaatgaagttgatgtcgtaactatttgcaaaccagcttctgttccagttcatccatgtggtcaataccgcaagaatactgtagttgggattctgcaggcagagcatgggttaacacccctatttctgcatcggttagatcgtttggtttcaggcctccttatatttgcaaaaaatgccgacagagctgaatgtttcaggcaacagcttcttcaccaaaaatggcgatatagcaagcatatggaatgatcatcttaagacgtgggtcaagaataacagcaacaaccatg

SEQ ID NO: 54794 - DNA, 2682 bp, Zea Mays
ctaccacgcatcgaccgtattaaccccacgccaccctgtccctttccccgcgccaccgccctctccgtcgccgccgttcgaccgagcgccgctcacccaccccacgagctcccgcgcgggttcatgtccatctctccacacgaacgcaccggaggagcctattacccgcgcccgcacaaccctagccctagtccccaacatggcagcgacagacgccgccacggccgccgctcccctccggcatccgtctcgccacccggcgccgctgcggaagctagcgacggcggggtcggctcgagctccaacccagtggttccagctattggagaatctattaatgctcccgaaaaggtagttggatttataatatctggggaagagaatgatacatgtacacaagaggttggcaatgtttcagaatgccactcttcagaacagggggattccggtttgcctgtagataattttggctcagttgggtcatatcctgagagacctaaaatggtgggatcccttcaggctgaccatttggcttcaggttctactggactgggtaatgggactcagatagctgccaggaagaatcagaccgtgaatgctaatcacctactgaatttccagtatgatcctatttctcggccacagcccagaggccctagaacatatcttccgagaagacaaaggaagataaaaccttacaacaaggatctgttcatccaagcaaactataagtttgttgtattggatactgggaattaccagattgattcaatggatcctgataagatgcttcagtgggaagatattatctgtgtaagatactatagcccttctgaggtacaatgccctatttgcttggaaagaccattgtgcccacagatcacatcatgcggacacatatattgctttccatgcattttacgttatctaatgatgggcaaagatgattatagaggtgagtgttggaagaagtgtcctctgtgtttcatgatgatatcatcaaaggatttgtatacaatacaaattactcaagtccagaatgtccgtgctggtgacgttgtcacatttacacttctgagcaggtcaagaaattcgctcactccttccatcaaaagctcctccagtgaaagttctacaacagatgaagagcattataatgttttctcaaagtttattttgacatctgatgtggagttgtctgttcgagatgcaaaattggatcttagtaattggttgcatatggctgacttaggccttgttgatgacttggagaaacttccatttgtttctgctgctttggagcaactggaagagaagacgaaatattggattgattacagaaattatggtggtagtcctccatcaaaagatagcttctctcctggatctagtttcaagtctaggaactcttttgatgtgaatacttctcagcagatgagtgagcacaagatctctctttcagatagagatatggtcaatggtatttcagaactctccatgtctcccgagttgagtaaaacctctggtaaaggaacaatatctaaagtaaatgagaaatgtaccacaaccattgattcaaatgaacatgacccatacacattttaccaggtgtcagatggccaacacctaattctccatccactaaacatgagatgtcttctaaaccattttggaggttctgatatgcttccacctagaataactgccaaaatattggagctggaaactgtaacacagtctgaggctataaggaagcgctatcggtttttgagtcacttctcattaacaactacatttcagtgtctcctaactcactggctccattcttggatgaaatcaagaagcgtgagaaacaaagaaaacgagccgccaagaaggaagaaagtgagagagtgaaggcggaagttgctgctgctgttcaggcatcagctatgcgatttgagtatacaaattcctctcaaagtcacaacgatgtcatgttctctctggatgactttgaagccctgggaaacaacgctgggccgtccaccagtccaccagcgagtgaaaggaagcttttctctgatgtaacacgcttgggttttgcatctgctcaagactcacctcccttaagactcggaactggggatgcaaatggccaaagtgaaacctcgagagaccaagggccgttagcgacacccgcattatcatttgccagcatcatatcttccagtagagccgtgactgcagctgacaactcggagatgcagaaagcaaatggcgctgggaagaagggtaagaaagcaactagagtgcttttgtcgactggtggtggccgtcgatactgaaggactatagatgcattggaacgaacagtttggttgtttccatataatgccgtagctcaatgcaatgtgcatagtacataacctggctgggatacgcttgtaagttgtaacactgagcggcagtcgtgtgtgttttgcctttcttgtgggtgtgcttgcgttgtgcccacatcctgtcccttgcatgatctggaaacgagcgcagagaagcgtgtaccataactaataaaggtggcgcaacactttagttgtggaacgccgctagtctgcccggagtgtcaaaatctccaaaaatgtgtacttttgatcattgaacatagttcatcagggttcaaagattgtctgactcgctcca

SEQ ID NO: 54795 - DNA, 2714 bp, Zea Mays
cggcgatcctaccacgcatcgaccgtattaaccccacgccaccctgtccctttccccgcgccaccgccctctccgtcgccgccgttcgaccgagcgccgctcacccaccccacgagctcccgcgcgggttcatgtccatctctccacacgaacgcaccggaggagcctattacccgcgcccgcacaaccctagccctagtccccaacatggcagcgacagacgccgccacggccgccgctcccctccggcatccgtctcgccacccggcgccgctgcggaagctagcgacggcggggtcggctcgagctccaacccagtggttccagctattggagaatctattaatgctcccgaaaaggtagttggatttataatatctggggaagagaatgatacatgtacacaagaggttggcaatgtttcagaatgccactcttcagaacagggggattccggtttgcctgtagataattttggctcagttgggtcatatcctgagagacctaaaatggtgggatcccttcaggctgaccatttggcttcaggttctactggactgggtaatgggactcagatagctgccaggaagaatcagaccgtgaatgctaatcacctactgaatttccagtatgatcctatttctcggccacagcccagaggccctagaacatatcttccgagaagacaaaggaagataaaaccttacaacaaggatctgttcatccaagcaaactataagtttgttgtattggatactgggaattaccagattgattcaatggatcctgataagatgcttcagtgggaagatattatctgtgtaagatactatagcccttctgaggtacaatgccctatttgcttggaaagaccattgtgcccacagatcacatcatgcggacacatatattgctttccatgcattttacgttatctaatgatgggcaaagatgattatagaggtgagtgttggaagaagtgtcctctgtgtttcatgatgatatcatcaaaggatttgtatacaatacaaattactcaagtccagaatgtccgtgctggtgacgttgtcacatttacacttctgagcaggtcaagaaattcgctcactccttccatcaaaagctcctccagtgaaagttctacaacagatgaagagcattataatgttttctcaaagtttattttgacatctgatgtggagttgtctgttcgagatgcaaaattggatcttagtaattggttgcatatggctgacttaggccttgttgatgacttggagaaacttccatttgtttctgctgctttggagcaactggaagagaagacgaaatattggattgattacagaaattatggtggtagtcctccatcaaaagatagcttctctcctggatctagtttcaagtctaggaactcttttgatgtgaatacttctcagcagatgagtgagcacaagatctctctttcagatagagatatggtcaatggtatttcagaactctccatgtctcccgagttgagtaaaacctctggtaaaggaacaatatctaaagtaaatgagaaatgtaccacaaccattgattcaaatgaacatgacccatacacattttaccaggtgtcagatggccaacacctaattctccatccactaaacatgagatgtcttctaaaccattttggaggttctgatatgcttccacctagaataactgccaaaatattggagctggaaactgtaacacagtctgaggctataaggaagcgctatcggtttttgagtcacttctcattaacaactacatttcagttctgtgaaattgacttgagtgatgtagtgtctcctaactcactggctccattcttggatgaaatcaagaagcgtgagaaacaaagaaaacgagccgccaagaagaaagtgagagagtgaaggcggaagttgctgctgctgttcaggcatcagctatgcgatttgagtatacaaattcctctcaaagtcacaacgatgtcatgttctctctggatgactttgaagccctgggaaacaacgctgggccgtccaccagtccaccagcgagtgaaaggaagcttttctctgatgtaacacgcttgggttttgcatctgctcaagactcacctcccttaagactcggaactggggatgcaaatggccaaagtgaaacctcgagagaccaagggccgttagcgacacccgcattatcatttgccagcatcatatcttccagtagagccgtgactgcagctgacaactcggagatgcagaaagcaaatggcgctgggaagaagggtaagaaagcaactagagtgcttttgtcgactggtggtggccgtcgatactgaaggactatagatgcattggaacgaacagtttggttgtttccatataatgccgtagctcaatgcaatgtgcatagtacataacctggctgggatacgcttgtaagttgtaacactgagcggcagtcgtgtgtgttttgcctttcttgtgggtgtgcttgcgttgtgcccacatcctgtcccttgcatgatctggaaacgagcgcagagaagcgtgtaccataactaataaaggtggcgcaacactttagttgtggaacgccgctagtctgcccggagtgtcaaaatctccaaaaatgtgtacttttgatcattgaacatagttcatcagggttcaaagattgtctgactcgctcca

SEQ ID NO: 54796 - DNA, 571 bp, Zea Mays
acatcgaaagacacacagcctgagcaaagctctgagagggacgcaccggctgagcagggtggacagaagagaccgcggaccgacgaagcggctggagaaggagaaggcacagcatacctgcagagcaagctgatcgagatcctagaccggaacagccggttggtggccgcacagttggaggcgcagaaccagaactgcgagctcgacagggagcaaaggaacgaccaggccaacagcctagttctcgtgctcggcaggctggccgacgcccttggcaggatcgccgacaagctatagaacattcagtcacctaggtgtatatgtgttgacggaaataattacagcaggaagatgacatttgtaagtgcatgtacagattggtgtagggctactggcattcgattcttttttgggccggttctggaaattctgtattgtggggggtggtgttatgtaggaaggggtcaggtttgtagcactcaaatgatattcagttgtgtggctgctgtagattctgaggctgtgttattgttaattgttatacagggacgcgagtaattattctcagcaa

SEQ ID NO: 54797 - DNA, 876 bp, Zea Mays
aaagacgagggaagcatgtaccgacaattaacagctaccgcatggagaaacttcttgagttcttcagagataacaagaggatagacgacatttttactttcctcagattggtagcagctatctggatatgctcgcacaggcaagagtttgaaccacttatacctgagctcagccaaggttacactctcaccgagatcatattcagataacagcactagtcagggcgcttcgggtgcctctgcgagtggagtacctctttcaagtagatggtcaagacctctatactggcggccaagattcccaagatgatatgccaagaagcacgtgttggccacgtcgttatcaccaggtaccccctgatcatgaagttccccgagtgaccgtgctgtacacgcaggagcactacgacatcatatacccatagcatcctggtagtcctgtgacaatacagagagcccggcctctaagactaggagtccaagtcaataccagataagtagctgcagtggtgagacatcaagtcaacagactgaccgggtagagggcggaggcgggaggttaagttcgtccctgaccagtgaccatgactatgatgaacatgtgttgagagaagctacgggattgagaattacgcatacactgacgagatagataggcatatatttgtggattctttatcctgttggtacaaactgctggtgccaataggattgtggatgatcagtagttgctcctcccttgtatctgacaaggctgaaaactttgttctgtagctcagtttaggtctcgacttggtacatttattttattttttctgtgaattgtgatcacatttccttaactatgttcctgtggtaacttttgtctcataataat

SEQ ID NO: 54798 - DNA, 1208 bp, Zea Mays
atggcctcttgttcaggaaagaaccaagaagacaccgaaaccgaagactcggcccatttgctgcgcgagcagcaggagtccaacgccgccgccgccgtctctgcagagccgccttcccttgctccgcagtccgagatcactgaagaagaggtccatgggccaccggaagccggagaccgggacccctccgccgccacagccgcggcggccgaacggaagggcgacgagaccatgtctcttttccgacggggctccgaaggtggcaagccccctcttcctccacgccctccctccatctcgagaaccagaggtccgagctccgcaggcggcaagccccctcttcctccacgccctccctccgcctcgagaaccagagttccgagctcctcgggcggcaagccccccagcccgccctctccgccccgcagcatattccacgaggtgtgggggagcagcatggcgatgagagatggtgacagagagagtcgcttcgatttgaaggacgtgttcgatgaactgatggtggagtgccggcggaacggggaaacggaccagaaagccgaggctgaggtgaaagacaagaaaccgctctggagaaagttttttgacaggataggaaactccaaccgaaattacacgacacctgatgtgaactaccagaaagttcacataaccgagctcattaggcattacgatctctttgcaatggttgctgtacaaggagtggaattgcatttacatgctctgaacctttgtcgtgaatattctgaatttaggcctgtgcatggagatggagagtgtttctacaggagcttcatattttcatacctcgtaaatgtcctcccttttcctttgaataatatttatgttttgtggttaacaccccagtttgcgccactctaaaacaggagcaagttcttgataggcaggatacacatgaggagcaccgtcttcttgctgctgttaaaggagtggctaggcaacatgcacgccttgggtgggcgtgggcctccgaattttccaggagccacaaagatatgcaccattgtttcaatgtagtggaataggggcatgccatcacaattttacaacctgttcatgggttcaaatttgaatttattggaaatgtaacaatctaatgctaataaatatacatgttgacataagttcatttttacagaacagcatcatgagacatcgttgtagag

SEQ ID NO: 54799 - DNA, 1985 bp, Zea Mays
atggcctccggttcaggaagggcccgaggcggcggcatccgaatccaagaaccgggtagtaggcaccgcgatgagtccaacgccggcgccgccgccgcagctgcagagccgccgccaccctctccgtccaccgacggtctccaagaacggccccatgggccattgggagccgagagcgggagcccctctgcggccgccgccgcactgaaggggaagggggtcttggctccatccccactgccttccccgacccgctccgaggaaaccaactccctggtatcatccgacatcgtctccgacgaggaagccgaagagttgaggtccgccaacacgctcgcggacggtgacaggaggtttggagtgtcttggaagagcccgttggtggaggcgatgatggaggtgccgaaggtgacgaggcatatcgattcgaagacggcgttcgacaacttgtcgatggagcagcaatgggccctggcggaggagatagaaatgcaacagcggcagcaggcgcagcagaggaaatgtctctggatcacattcaaaggtggcatgtcaaacatgtttttggactggataggaaggcaaatgcacaacttcaattcagattctacagtaatcataccccatgtgaatcaccagacaatccctatgaccgggatcattgagcattacaacctcatggaaacggatgctggacgaggagtaatatttcattcaaatgtactgaaccttcgtcgtgcctattctgaatttaggccagtgcatggagatggagactgtttctacaggagcttcatgttttcctacctcgagcaagttcttgataggcaggatacacacgaggaacaccgtcttcttgctgctgttgaaggagtggctaggcatcatgcgcaccttgagtggaactccgaattttccctgagacacaaagcatttaagacgttgataaagaaagtaatgagatggaaaagacacaacagatggaagaatgtactgacgaccgatagctacagcaaacagaaacttctcaagttcttcagcggttgtggcaggccagacaacatttttgctttcctcagattggtagcagctatctggatatattcgcacagtgaagagtttgaaccacttatacccgagctcgatgaatatgacactctcagagaatggtgctctcaggaagtaatcaggcataaggttttcacagatcatgtccagatgacagcattggtcaccgctcttggggtgccgctgcgagtggagtacctcttacaagtaggagatggtcaagacctctacgatcgtcaggaggattcgcaagactatacgccaacaagtacatgttggtctagtcatcgtcgtcaactaccccatgttcatgtagtcccccgtgtgaccgtgctctacacaaacgctcactatgacatcatctatccccaccgtcgcgatggtcctcctgttccttctattgatgagagatgttgtcagcagactgcactggtacagcgcccaactactgagagttcaggtcaacaaattgcccagagagatagctgcagtggtactggtgagagttcaagccaacatattgctcaggtggagatctccactgatgagaattcagatcaacatgcagagctaaagttgacttctactgatgcccatgagtatgatgatcattgctgagtgaagctataggtagagaattagggcattaggcacacactgatgactgagatagctgatattctggactttttgttacattggtacaaactgctggtgccaactggagatcagtagctactcctcccttatatgaaaactctgcaaaggatgagaatcaggcatacagtgatgaggtagcaattaattgttacaagttcataatttttttttgctgaaaatttagtattcgatcaaatccgcctcaaccaggggtggagggagagagtaataatatatcctgtgcaatcagttttttt

SEQ ID NO: 54800 - DNA, 2402 bp, Zea Mays
atggcctccggttcaggaagggcccgaggcggcggcatccgaatccaagaaccgggtagtaggcaccgcgatgagtccaacgccggcgccgccgccgcagctgcagagccgccgccaccctctccgtccaccgacggtctccaagaacggccccatgggccattgggagccgagagcgggagcccctctgcggccgccgccgcactgaaggggaagggggtcttggctccatccccactgccttccccgacccgctccgaggaaaccaactccctggtatcatccgacatcgtctccgacgaggaagccgaagagttgaggtccgccaacacgctcgcggacggtgacaggaggtttggagtgtcttggaagagcccgttggtggaggcgatgatggaggtgccgaaggtgacgaggcatatcgattcgaagacggcgttcgacaacttgtcgatggagcagcaatgggccctggcggaggagatagaaatgcaacagcggcagcaggcgcagcagaggaaatgtctctggatcacattcaaaggtggcatgtcaaacatgtttttggactggataggaaggcaaatgcacaacttcaattcagattctacagtaatcataccccatgtgaatcaccagacaatccctatgaccgggatcattgagcattacaacctcatggaaacggatgctggacgaggagtaatatttcattcaaatgtactgaaccttcgtcgtgcctattctgaatttaggccagtgcatggagatggagactgtttctacaggagcttcatgttttcctacctcgagcaagttcttgataggcaggatacacacgaggaacaccgtcttcttgctgctgttgaaggagtggctaggcatcatgcgcaccttgagtggaactccgaattttccctgagacacaaagatatgcacattgtttcacattagtggtgtattggcatgccatcacaattttacctcttgacattgatacagatttgttttttttttgaaaatataacatatgaatacatgttgaaataagatcaatttcatataacagcactgatgagtaatatttacagttatttagtaataaataactcatgcttctacttccccgagataatgcacccaagctgttttgtgtgttcatctgattcaatcacaaatgtttcctttcacacttctctattaaaacatttttttttcaattacttaccatgtaatcggtgttctttggctgaaggttctcagacaagtgttatcatggtcatacttgctcatgcctttgttataagtgatcagtattgtgtaagcattgttgctgtatacagtgacaatctgattctttcaggcatttaagacgttgataaagaaagtaatgagatggaaaagacacaacagatggaagaatgtactgacgaccgatagctacagcaaacagaaacttctcaagttcttcagcggttgtggcaggccagacaacaattggtagcagctatctggatatattcgcacagtgaagagtttgaaccacttatacccgagctcgatgaatatgacactctcagagaatggtgctctcaggaagtaatcaggcataaggttttcacagatcatgtccagatgacagcattggtcaccgctcttggggtgccgctgcgagtggagtacctcttacaagtaggagatggtcaagacctctacgatcgtcaggaggattcgcaagactatacgccaacaagtacatgttggtctagtcatcgtcgtcaactaccccatgttcatgtagtcccccgtgtgaccgtgctctacacaaacgctcactatgacatcatctatccccaccgtcgcgatggtcctcctgttccttctattgatgagagatgttgtcagcagactgcactggtacagcgcccaactactgagagttcaggtcaacaaattgcccagagagatagctgcagtggtactggtgagagttcaagccaacatattgctcaggtggagatctccactgatgagaattcagatcaacatgcagagctaaagttgacttctactgatgcccatgagtatgatgatcattgctgagtgaagctataggtagagaattagggcattaggcacacactgatgactgagatagctgatattctggactttttgttacattggtacaaactgctggtgccaactggagatcagtagctactcctcccttatatgaaaactctgcaaaggatgagaatcaggcatacagtgatgaggtagcaattaattgttacaagttcataatttttttttgctgaaaatttagtattcgatcaaatccgcctcaaccaggggtggagggagagagtaataatatatcctgtgcaatcagttttttt

SEQ ID NO: 54801 - DNA, 3008 bp, Zea Mays
acctctccaccaatcccgtgcaacatcagtgcacggagcacgtggacatcgacccgcacttcgtccgcgagcgtgtcgttgctggtgacgttcgggttctcagtatccggaccacgttgcagttcgccgacatcttcaccaaaggggctgccgtcaagtgttttcgctagaggctattataccgtgaaggccgtgtagttagcttcagactttggtacagggagggaacacagctagacagtatatataattttaaggggcttcattgaaaattcaaagaccgtctctgcaaaccaccatgtttgtgccaatgtgttgtcgcaccaactgcctaatgactatagaccattagttgattcaatttgtttagtgacctagatgtgcaagtttggagtgcatgtacccaattgaacctatatgatacgtcacaagtctcatgacccttaatgcaatttacttgcatttacaactttaacacaattggtagcttgttctctagtggcctaaggtaacacatacatgacttagatatgagcatcatattttacaactgcaaagcagcacttgcatgttgcatcacctgaaggttgttgtggttccacaatttcttatgttaaattgtttcaagaccatcctaattttggattaataccattttttacttcattgaagacagactttttttgcaggttatcaccaaacgggacagactgctgactctgaagcttggtgtttctgaacataacttgccaaatcctaataattttggtgagctaactgttcaggctgaagaaagttcaggttcaaaagcaataatggagatgatattccgctgttcggatcttgaaatcaaggatcttctaacaaagagtgatacttttttgctaatatctggaatatcagatagtggaatgcctgttccaatttgcaagacagaagtaagaaagaatgatctcaatcctaggtggaggccagtgagtctgaatctgcaacagattggaagtaagcaagatagtcaagtcagttgcagaattggaaaatatgtaccataggaagaatggtgaaaatttctttgttcctgccagcaatgcacatgaatgtcacagtaaggaggtgttgaagagccagctatatgtagagaaatatgttgagagtaacagacatactttcctagattatatttctgttgggtgccagttgaattttatggtaggcgtagatttcacagcttcaaatggaaatccacggcttccagattctttgcattatattgacccctcaggtcggccaaatgtatatcagaaggcaatactggaaattggtgatgttctacaatattatgacccaccgaagcgtttccccgcttggggctttggagcaagacctattgacggtcctgtttctcattgttttaatttgaatggcagcacttatcaacctgaggttgacggaatacaaggaattatgtcagcttatatcagcgctcttcgtaatgtatcattagctggtcctaccctctttggtcagttgataagcaccgccatggcgatagctagccaatctcttgctgagaatcaacataaatacttcattttgttaatagtcactgatggcgtggtaactgattttcaagagactattgatgcgatcataaaggcatcagattttcctatatccataattgttgttggagttggaggggctgatttcaaggaaatggagtttctagatccaaacaaaggagagaaactggaaagctcaaccgggagagttgcatcaagggatatgatacagtttgccccgatgaaggatatgcacggcactgggatatccacacttcaatcacttcttgctgaggtaccagggcaattcatgacatacatgaggacaagagaaacccaaacagacagttagtacatgcatgctgccttcaatcagtacaagatgcaccttggaatattctttgttaatatcattttcgtccttcccgttacatagtggtgcaagtttcaagtcatgggtgtgagatagatagtatggacgtgtcaagtgtaggtgagacatcgatctcctggagacgccaacatcaaattggttagctgagcttgtttaaaatcgtcgccgttaaaaaaaaatgctgcttgttaagagaaatgaggacctccaccagcccaccttaattccatggcatctttttttttattattattctgtgtcaagttggattcctaggctgtaccgcccatctttctctacctgtttgtaagatatgactttaggggtttcggcctttattatccctagtaggcccattggaataggaacttttttggcattgcacattagaattttcaagtgttggcatggctgtttagttctatggtggtgactcgtgacctgtataatataatttagacaatggaatatacagcatttgtggtacagccatgtgacaatgtcagattaagatttgaggcatctggttgcaatacgtttatgtatcgttttctcttttaactatgtatagcaccgatggaacctggagtctgaactagaaattggcagtggctgttctcggacagtttccggaagagaaacccctagctactatgcaagacggtaggactacaaaggaacaactagacccccggcccaaattgcatcctggggaatgccgagggcggagggagatcgatcgatgctccggttccacgactatgtgcgtggtccttgtagaaaagaaaagaaaaagtatgcgtaatctgggtgaaagcaccagcagagtagttaatttggttcagacgttcagtggacaatcgaatcgagcaagcagtggaaggaatccatttcgatacgctgtggaggcaaaggcgccactccaacgatcccagcgatatctacgagaggaacttttcagaagatcttacgtggacaaacatgccaataagccaatcaggcttcggttacggtctcactcaggacatttccctgtgtccacccaacatccc

SEQ ID NO: 54802 - DNA, 2979 bp, Zea Mays
acctctccaccaatcccgtgcaacatcagtgcacggagcacgtggacatcgacccgcacttcgtccgcgagcgtgtcgttgctggtgacgttcgggttctcagtatccggaccacgttgcagttcgccgacatcttcaccaaaggggctgccgtcaagtgttttcgctagaggctattataccgtgaaggccgtgtagttagcttcagactttggtacagggagggaacacagctagacagtatatataattttaaggggcttcattgaaaattcaaagaccgtctctgcaaaccaccatgtttgtgccaatgtgttgtcgcaccaactgcctaatgactatagaccattagttgattcaatttgtttagtgacctagatgtgcaagtttggagtgcatgtacccaattgaacctatatgatacgtcacaagtctcatgacccttaatgcaatttacttgcatttacaactttaacacaattggtagcttgttctctagtggcctaaggtaacacatacatgacttagatatgagcatcatattttacaactgcaaagcagcacttgcatgttgcatcacctgaaggttgttgtggttccacaatttcttatgttaaattgtttcaagaccatcctaattttggattaataccattttttacttcattgaagacagactttttttgcaggttatcaccaaacgggacagactgctgactctgaagcttggtgtttctgaacataacttgccaaatcctaataattttggtgagctaactgttcaggctgaagaaagttcaggttcaaaagcaataatggagatgatattccgctgttcggatcttgaaatcaaggatcttctaacaaagagtgatacttttttgctaatatctggaatatcagatagtggaatgcctgttccaatttgcaagacagaagtaagaaagaatgatctcaatcctaggtggaggccagtgagtctgaatctgcaacagattggaagagaaccctctaattgtagagtgctttaacttcagtagcaatggcaaacatgacctagtcggcaagatagtcaagtcagttgcagaattggaaaatatgtaccataggaagaatggtgaaaatttctttgttcctgccagcaatgcacatgaatgtcacagtaaggaggtgttgaagagccagctatatgtagagaaatatgttgagagtaacagacatactttcctagattatatttctgttgggtgccagttgaattttatggtaggcgtagatttcacagcttcaaatggaaatccacggcttccagattctttgcattatattgacccctcaggtcggccaaatgtatatcagaaggcaatactggaaattggtgatgttctacaatattatgacccaccgaagcgtttccccgcttggggctttggagcaagacctattgacggtcctgtttctcattgttttaatttgaatggcagcacttatcaacctgaggttgacggaatacaaggaattatgtcagcttatatcagcgctcttcgtaatgtatcattagctggtcctaccctctttggatggcgtggtaactgattttcaagagactattgatgcgatcataaaggcatcagattttcctatatccataattgttgttggagttggaggggctgatttcaaggaaatggagtttctagatccaaacaaaggagagaaactggaaagctcaaccgggagagttgcatcaagggatatgatacagtttgccccgatgaaggatatgcacggcactgggatatccacacttcaatcacttcttgctgaggtaccagggcaattcatgacatacatgaggacaagagaaacccaaacagacagttagtacatgcatgctgccttcaatcagtacaagatgcaccttggaatattctttgttaatatcattttcgtccttcccgttacatagtggtgcaagtttcaagtcatgggtgtgagatagatagtatggacgtgtcaagtgtaggtgagacatcgatctcctggagacgccaacatcaaattggttagctgagcttgtttaaaatcgtcgccgttaaaaaaaaatgctgcttgttaagagaaatgaggacctccaccagcccaccttaattccatggcatctttttttttattattattctgtgtcaagttggattcctaggctgtaccgcccatctttctctacctgtttgtaagatatgactttaggggtttcggcctttattatccctagtaggcccattggaataggaacttttttggcattgcacattagaattttcaagtgttggcatggctgtttagttctatggtggtgactcgtgacctgtataatataatttagacaatggaatatacagcatttgtggtacagccatgtgacaatgtcagattaagatttgaggcatctggttgcaatacgtttatgtatcgttttctcttttaactatgtatagcaccgatggaacctggagtctgaactagaaattggcagtggctgttctcggacagtttccggaagagaaacccctagctactatgcaagacggtaggactacaaaggaacaactagacccccggcccaaattgcatcctggggaatgccgagggcggagggagatcgatcgatgctccggttccacgactatgtgcgtggtccttgtagaaaagaaaagaaaaagtatgcgtaatctgggtgaaagcaccagcagagtagttaatttggttcagacgttcagtggacaatcgaatcgagcaagcagtggaaggaatccatttcgatacgctgtggaggcaaaggcgccactccaacgatcccagcgatatctacgagaggaacttttcagaagatcttacgtggacaaacatgccaataagccaatcaggcttcggttacggtctcactcaggacatttccctgtgtccacccaacatccc

SEQ ID NO: 54803 - DNA, 3091 bp, Zea Mays
acctctccaccaatcccgtgcaacatcagtgcacggagcacgtggacatcgacccgcacttcgtccgcgagcgtgtcgttgctggtgacgttcgggttctcagtatccggaccacgttgcagttcgccgacatcttcaccaaaggggctgccgtcaagtgttttcgctagaggctattataccgtgaaggccgtgtagttagcttcagactttggtacagggagggaacacagctagacagtatatataattttaaggggcttcattgaaaattcaaagaccgtctctgcaaaccaccatgtttgtgccaatgtgttgtcgcaccaactgcctaatgactatagaccattagttgattcaatttgtttagtgacctagatgtgcaagtttggagtgcatgtacccaattgaacctatatgatacgtcacaagtctcatgacccttaatgcaatttacttgcatttacaactttaacacaattggtagcttgttctctagtggcctaaggtaacacatacatgacttagatatgagcatcatattttacaactgcaaagcagcacttgcatgttgcatcacctgaaggttgttgtggttccacaatttcttatgttaaattgtttcaagaccatcctaattttggattaataccattttttacttcattgaagacagactttttttgcaggttatcaccaaacgggacagactgctgactctgaagcttggtgtttctgaacataacttgccaaatcctaataattttggtgagctaactgttcaggctgaagaaagttcaggttcaaaagcaataatggagatgatattccgctgttcggatcttgaaatcaaggatcttctaacaaagagtgatacttttttgctaatatctggaatatcagatagtggaatgcctgttccaatttgcaagacagaagtaagaaagaatgatctcaatcctaggtggaggccagtgagtctgaatctgcaacagattggaagagaaccctctaattgtagagtgctttaacttcagtagcaatggcaaacatgacctagtcggataccctttgtaattcgacagcaagatagtcaagtcagttgcagaattggaaaatatgtaccataggaagaatggtgaaaatttctttgttcctgccagcaatgcacatgaatgtcacagtaaggaggtgttgaagagccagctatatgtagagaaatatgttgagagtaacagacatactttcctagattatatttctgttgggtgccagttgaattttatggtaggcgtagatttcacagcttcaaatggaaatccacggcttccagattctttgcattatattgacccctcaggtcggccaaatgtatatcagaaggcaatactggaaattggtgatgttctacaatattatgacccaccgaagcgtttccccgcttggggctttggagcaagacctattgacggtcctgtttctcattgttttaatttgaatggcagcacttatcaacctgaggttgacggaatacaaggaattatgtcagcttatatcagcgctcttcgtaatgtatcattagctggtcctaccctctttggtcagttgataagcaccgccatggcgatagctagccaatctcttgctgagaatcaacataaatacttcattttgttaatagtcactgatggcgtggtaactgattttcaagagactattgatgcgatcataaaggcatcagattttcctatatccataattgttgttggagttggaggggctgatttcaaggaaatggaggtaattttctagatccaaacaaaggagagaaactggaaagctcaaccgggagagttgcatcaagggatatgatacagtttgccccgatgaaggatatgcacggcactgggatatccacacttcaatcacttcttgctgaggtaccagggcaattcatgacatacatgaggacaagagaaacccaaacagacagttagtacatgcatgctgccttcaatcagtacaagatgcaccttggaatattctttgttaatatcattttcgtccttcccgttacatagtggtgcaagtttcaagtcatgggtgtgagatagatagtatggacgtgtcaagtgtaggtgagacatcgatctcctggagacgccaacatcaaattggttagctgagcttgtttaaaatcgtcgccgttaaaaaaaaatgctgcttgttaagagaaatgaggacctccaccagcccaccttaattccatggcatctttttttttattattattctgtgtcaagttggattcctaggctgtaccgcccatctttctctacctgtttgtaagatatgactttaggggtttcggcctttattatccctagtaggcccattggaataggaacttttttggcattgcacattagaattttcaagtgttggcatggctgtttagttctatggtggtgactcgtgacctgtataatataatttagacaatggaatatacagcatttgtggtacagccatgtgacaatgtcagattaagatttgaggcatctggttgcaatacgtttatgtatcgttttctcttttaactatgtatagcaccgatggaacctggagtctgaactagaaattggcagtggctgttctcggacagtttccggaagagaaacccctagctactatgcaagacggtaggactacaaaggaacaactagacccccggcccaaattgcatcctggggaatgccgagggcggagggagatcgatcgatgctccggttccacgactatgtgcgtggtccttgtagaaaagaaaagaaaaagtatgcgtaatctgggtgaaagcaccagcagagtagttaatttggttcagacgttcagtggacaatcgaatcgagcaagcagtggaaggaatccatttcgatacgctgtggaggcaaaggcgccactccaacgatcccagcgatatctacgagaggaacttttcagaagatcttacgtggacaaacatgccaataagccaatcaggcttcggttacggtctcactcaggacatttccctgtgtccacccaacatccc

SEQ ID NO: 54804 - DNA, 3107 bp, Zea Mays
agcgcgtcgccctcgtctactgcgacaacgtcagcgcggtctacctctccaccaatcccgtgcaacatcagtgcacggagcacgtggacatcgacccgcacttcgtccgcgagcgtgtcgttgctggtgacgttcgggttctcagtatccggaccacgttgcagttcgccgacatcttcaccaaaggggctgccgtcaagtgttttcgctagaggctattataccgtgaaggccgtgtagttagcttcagactttggtacagggagggaacacagctagacagtatatataattttaaggggcttcattgaaaattcaaagaccgtctctgcaaaccaccatgtttgtgccaatgtgttgtcgcaccaactgcctaatgactatagaccattagttgattcaatttgtttagtgacctagatgtgcaagtttggagtgcatgtacccaattgaacctatatgatacgtcacaagtctcatgacccttaatgcaatttacttgcatttacaactttaacacaattggtagcttgttctctagtggcctaaggtaacacatacatgacttagatatgagcatcatattttacaactgcaaagcagcacttgcatgttgcatcacctgaaggttgttgtggttccacaatttcttatgttaaattgtttcaagaccatcctaattttggattaataccattttttacttcattgaagacagactttttttgcaggttatcaccaaacgggacagactgctgactctgaagcttggtgtttctgaacataacttgccaaatcctaataattttggtgagctaactgttcaggctgaagaaagttcaggttcaaaagcaataatggagatgatattccgctgttcggatcttgaaatcaaggatcttctaacaaagagtgatacttttttgctaatatctggaatatcagatagtggaatgcctgttccaatttgcaagacagaagtaagaaagaatgatctcaatcctaggtggaggccagtgagtctgaatctgcaacagattggaagagaaccctctaattgtagagtgctttaacttcagtagcaatggcaaacatgacctagtcggcaagatagtcaagtcagttgcagaattggaaaatatgtaccataggaagaatggtgaaaatttctttgttcctgccagcaatgcacatgaatgtcacagtaaggaggtgttgaagagccagctatatgtagagaaatatgttgagagtaacagacatactttcctagattatatttctgttgggtgccagttgaattttatggtaggcgtagatttcacagcttcaaatggaaatccacggcttccagattctttgcattatattgacccctcaggtcggccaaatgtatatcagaaggcaatactggaaattggtgatgttctacaatattatgacccaccgaagcgtttccccgcttggggctttggagcaagacctattgacggtcctgtttctcattgttttaatttgaatggcagcacttatcaacctgaggttgacggaatacaaggaattatgtcagcttatatcagcgctcttcgtaatgtatcattagctggtcctaccctctttggtcagttgataagcaccgccatggcgatagctagccaatctcttgctgagaatcaacataaatacttcattttgttaatagtcactgatggcgtggtaactgattttcaagagactattgatgcgatcataaaggcatcagattttcctatatccataattgttgttggagttggaggggctgatttcaaggaaatggagtttctagatccaaacaaaggagagaaactggaaagctcaaccgggagagttgcatcaagggatatgatacagtttgccccgatgaaggatatgcacggcactgggatatccacacttcaatcacttcttgctgaggtaccagggcaattcatgacatacatgaggacaagagaaacccaaacagacagttagtacatgcatgctgccttcaatcagtacaagatgcaccttggaatattctttgttaatatcattttcgtccttcccgttacatagtggtgcaagtttcaagtcatgggtgtgagatagatagtatggacgtgtcaagtgtaggtgagacatcgatctcctggagacgccaacatcaaattggttagctgagcttgtttaaaatcgtcgccgttaaaaaaaaatgctgcttgttaagagaaatgaggacctccaccagcccaccttaattccatggcatctttttttttattattattctgtgtcaagttggattcctaggctgtaccgcccatctttctctacctgtttgtaagatatgactttaggggtttcggcctttattatccctagtaggcccattggaataggaacttttttggcattgcacattagaattttcaagtgttggcatggctgtttagttctatggtggtgactcgtgacctgtataatataatttagacaatggaatatacagcatttgtggtacagccatgtgacaatgtcagattaagatttgaggcatctggttgcaatacgtttatgtatcgttttctcttttaactatgtatagcaccgatggaacctggagtctgaactagaaattggcagtggctgttctcggacagtttccggaagagaaacccctagctactatgcaagacggtaggactacaaaggaacaactagacccccggcccaaattgcatcctggggaatgccgagggcggagggagatcgatcgatgctccggttccacgactatgtgcgtggtccttgtagaaaagaaaagaaaaagtatgcgtaatctgggtgaaagcaccagcagagtagttaatttggttcagacgttcagtggacaatcgaatcgagcaagcagtggaaggaatccatttcgatacgctgtggaggcaaaggcgccactccaacgatcccagcgatatctacgagaggaacttttcagaagatcttacgtggacaaacatgccaataagccaatcaggcttcggttacggtctcactcaggacatttccctgtgtccacccaacatccc

SEQ ID NO: 54805 - DNA, 2456 bp, Zea Mays
agacaaccctgcaggttgccggcgagttcctacctcccaggttatcaccaaacgggacagactgctgactctgaagcttggtgtttctgaacataacttgccaaatcctaataattttggtgagctaactgttcaggctgaagaaagttcaggttcaaaagcaataatggagatgatattccgctgttcggatcttgaaatcaaggatcttctaacaaagagtgatacttttttgctaatatctggaatatcagatagtggaatgcctgttccaatttgcaagacagaagtaagaaagaatgatctcaatcctaggtggaggccagtgagtctgaatctgcaacagattggaagagaaccctctaattgtagagtgctttaacttcagtagcaatggcaaacatgacctagtcggataccctttgtaattcgacagcaagatagtcaagtcagttgcagaattggaaaatatgtaccataggaagaatggtgaaaatttctttgttcctgccagcaatgcacatgaatgtcacagtaaggaggtgttgaagagccagctatatgtagagaaatatgttgagagtaacagacatactttcctagattatatttctgttgggtgccagttgaattttatggtaggcgtagatttcacagcttcaaatggaaatccacggcttccagattctttgcattatattgacccctcaggtcggccaaatgtatatcagaaggcaatactggaaattggtgatgttctacaatattatgacccaccgaagcgtttccccgcttggggctttggagcaagacctattgacggtcctgtttctcattgttttaatttgaatggcagcacttatcaacctgaggttgacggaatacaaggaattatgtcagcttatatcagcgctcttcgtaatgtatcattagctggtcctaccctctttggtcagttgataagcaccgccatggcgatagctagccaatctcttgctgagaatcaacataaatacttcattttgttaatagtcactacatcaaactattttccaggatggcgtggtaactgattttcaagagactattgatgcgatcataaaggcatcagattttcctatatccataattgttgttggagttggaggggctgatttcaaggaaatggagtttctagatccaaacaaaggagagaaactggaaagctcaaccgggagagttgcatcaagggatatgatacagtttgccccgatgaaggatatgcacggcactgggatatccacacttcaatcacttcttgctgaggtaccagggcaattcatgacatacatgaggacaagagaaacccaaacagacagttagtacatgcatgctgccttcaatcagtacaagatgcaccttggaatattctttgttaatatcattttcgtccttcccgttacatagtggtgcaagtttcaagtcatgggtgtgagatagatagtatggacgtgtcaagtgtaggtgagacatcgatctcctggagacgccaacatcaaattggttagctgagcttgtttaaaatcgtcgccgttaaaaaaaaatgctgcttgttaagagaaatgaggacctccaccagcccaccttaattccatggcatctttttttttattattattctgtgtcaagttggattcctaggctgtaccgcccatctttctctacctgtttgtaagatatgactttaggggtttcggcctttattatccctagtaggcccattggaataggaacttttttggcattgcacattagaattttcaagtgttggcatggctgtttagttctatggtggtgactcgtgacctgtataatataatttagacaatggaatatacagcatttgtggtacagccatgtgacaatgtcagattaagatttgaggcatctggttgcaatacgtttatgtatcgttttctcttttaactatgtatagcaccgatggaacctggagtctgaactagaaattggcagtggctgttctcggacagtttccggaagagaaacccctagctactatgcaagacggtaggactacaaaggaacaactagacccccggcccaaattgcatcctggggaatgccgagggcggagggagatcgatcgatgctccggttccacgactatgtgcgtggtccttgtagaaaagaaaagaaaaagtatgcgtaatctgggtgaaagcaccagcagagtagttaatttggttcagacgttcagtggacaatcgaatcgagcaagcagtggaaggaatccatttcgatacgctgtggaggcaaaggcgccactccaacgatcccagcgatatctacgagaggaacttttcagaagatcttacgtggacaaacatgccaataagccaatcaggcttcggttacggtctcactcaggacatttccctgtgtccacccaacatccc

SEQ ID NO: 54806 - DNA, 2526 bp, Zea Mays
cctgaatgtcgcactgctatcaacagttttcgacatcttgctcctcctcagctccgataccaattgttggaaactgcgccggagagacaaccctgcaggttgccggcgagttcctacctcccaggttatcaccaaacgggacagactgctgactctgaagcttggtgtttctgaacataacttgccaaatcctaataattttggtgagctaactgttcaggctgaagaaagttcaggttcaaaagcaataatggagatgatattccgctgttcggatcttgaaatcaaggatcttctaacaaagagtgatacttttttgctaatatctggaatatcagatagtggaatgcctgttccaatttgcaagacagaagtaagaaagaatgatctcaatcctaggtggaggccagtgagtctgaatctgcaacagattggaagtaaggagaaccctctaattgtagagtgctttaacttcagtagcaatggcaaacatgacctagtcggataccctttgtaattcgacagcaagatagtcaagtcagttgcagaattggaaaatatgtaccataggaagaatggtgaaaatttctttgttcctgccagcaatgcacatgaatgtcacagtaaggaggtgttgaagagccagctatatgtagagaaatatgttgagagtaacagacatactttcctagattatatttctgttgggtgccagttgaattttatggtaggcgtagatttcacagcttcaaatggaaatccacggcttccagattctttgcattatattgacccctcaggtcggccaaatgtatatcagaaggcaatactggaaattggtgatgttctacaatattatgacccaccgaagcgtttccccgcttggggctttggagcaagacctattgacggtcctgtttctcattgttttaatttgaatggcagcacttatcaacctgaggttgacggaatacaaggaattatgtcagcttatatcagcgctcttcgtaatgtatcattagctggtcctaccctctttggtcagttgataagcaccgccatggcgatagctagccaatctcttgctgagaatcaacataaatacttcattttgttaatagtcactgatggcgtggtaactgattttcaagagactattgatgcgatcataaaggcatcagattttcctatatccataattgttgttggagttggaggggctgatttcaaggaaatggagtttctagatccaaacaaaggagagaaactggaaagctcaaccgggagagttgcatcaagggatatgatacagtttgccccgatgaaggatatgcacggcactgggatatccacacttcaatcacttcttgctgaggtaccagggcaattcatgacatacatgaggacaagagaaacccaaacagacagttagtacatgcatgctgccttcaatcagtacaagatgcaccttggaatattctttgttaatatcattttcgtccttcccgttacatagtggtgcaagtttcaagtcatgggtgtgagatagatagtatggacgtgtcaagtgtaggtgagacatcgatctcctggagacgccaacatcaaattggttagctgagcttgtttaaaatcgtcgccgttaaaaaaaaatgctgcttgttaagagaaatgaggacctccaccagcccaccttaattccatggcatctttttttttattattattctgtgtcaagttggattcctaggctgtaccgcccatctttctctacctgtttgtaagatatgactttaggggtttcggcctttattatccctagtaggcccattggaataggaacttttttggcattgcacattagaattttcaagtgttggcatggctgtttagttctatggtggtgactcgtgacctgtataatataatttagacaatggaatatacagcatttgtggtacagccatgtgacaatgtcagattaagatttgaggcatctggttgcaatacgtttatgtatcgttttctcttttaactatgtatagcaccgatggaacctggagtctgaactagaaattggcagtggctgttctcggacagtttccggaagagaaacccctagctactatgcaagacggtaggactacaaaggaacaactagacccccggcccaaattgcatcctggggaatgccgagggcggagggagatcgatcgatgctccggttccacgactatgtgcgtggtccttgtagaaaagaaaagaaaaagtatgcgtaatctgggtgaaagcaccagcagagtagttaatttggttcagacgttcagtggacaatcgaatcgagcaagcagtggaaggaatccatttcgatacgctgtggaggcaaaggcgccactccaacgatcccagcgatatctacgagaggaacttttcagaagatcttacgtggacaaacatgccaataagccaatcaggcttcggttacggtctcactcaggacatttccctgtgtccacccaacatccc

SEQ ID NO: 54807 - DNA, 2575 bp, Zea Mays
tccctgcactcacctcacgaattactcgctggaccactgctccatctttggaggtgtcgtcgccgggcttcctgaatgtcgcactgctatcaacagttttcgacatcttgctcctcctcagctccgataccaattgttggaaactgcgccggagagacaaccctgcaggttgccggcgagttcctacctcccaggttatcaccaaacgggacagactgctgactctgaagcttggtgtttctgaacataacttgccaaatcctaataattttggtgagctaactgttcaggctgaagaaagttcaggttcaaaagcaataatggagatgatattccgctgttcggatcttgaaatcaaggatcttctaacaaagagtgatacttttttgctaatatctggaatatcagatagtggaatgcctgttccaatttgcaagacagaagtaagaaagaatgatctcaatcctaggtggaggccagtgagtctgaatctgcaacagattggaagtaaggagaaccctctaattgtagagtgctttaacttcagtagcaatggcaaacatgacctagtcggcaagatagtcaagtcagttgcagaattggaaaatatgtaccataggaagaatggtgaaaatttctttgttcctgccagcaatgcacatgaatgtcacagtaaggaggtgttgaagagccagctatatgtagagaaatatgttgagagtaacagacatactttcctagattatatttctgttgggtgccagttgaattttatggtaggcgtagatttcacagcttcaaatggaaatccacggcttccagattctttgcattatattgacccctcaggtcggccaaatgtatatcagaaggcaatactggaaattggtgatgttctacaatattatgacccaccgaagcgtttccccgcttggggctttggagcaagacctattgacggtcctgtttctcattgttttaatttgaatggcagcacttatcaacctgaggttgacggaatacaaggaattatgtcagcttatatcagcgctcttcgtaatgtatcattagctggtcctaccctctttggtcagttgataagcaccgccatggcgatagctagccaatctcttgctgagaatcaacataaatacttcattttgttaatagtcactgatggcgtggtaactgattttcaagagactattgatgcgatcataaaggcatcagattttcctatatccataattgttgttggagttggaggggctgatttcaaggaaatggagtttctagatccaaacaaaggagagaaactggaaagctcaaccgggagagttgcatcaagggatatgatacagtttgccccgatgaaggatatgcacggcactgggatatccacacttcaatcacttcttgctgaggtaccagggcaattcatgacatacatgaggacaagagaaacccaaacagacagttagtacatgcatgctgccttcaatcagtacaagatgcaccttggaatattctttgttaatatcattttcgtccttcccgttacatagtggtgcaagtttcaagtcatgggtgtgagatagatagtatggacgtgtcaagtgtaggtgagacatcgatctcctggagacgccaacatcaaattggttagctgagcttgtttaaaatcgtcgccgttaaaaaaaaatgctgcttgttaagagaaatgaggacctccaccagcccaccttaattccatggcatctttttttttattattattctgtgtcaagttggattcctaggctgtaccgcccatctttctctacctgtttgtaagatatgactttaggggtttcggcctttattatccctagtaggcccattggaataggaacttttttggcattgcacattagaattttcaagtgttggcatggctgtttagttctatggtggtgactcgtgacctgtataatataatttagacaatggaatatacagcatttgtggtacagccatgtgacaatgtcagattaagatttgaggcatctggttgcaatacgtttatgtatcgttttctcttttaactatgtatagcaccgatggaacctggagtctgaactagaaattggcagtggctgttctcggacagtttccggaagagaaacccctagctactatgcaagacggtaggactacaaaggaacaactagacccccggcccaaattgcatcctggggaatgccgagggcggagggagatcgatcgatgctccggttccacgactatgtgcgtggtccttgtagaaaagaaaagaaaaagtatgcgtaatctgggtgaaagcaccagcagagtagttaatttggttcagacgttcagtggacaatcgaatcgagcaagcagtggaaggaatccatttcgatacgctgtggaggcaaaggcgccactccaacgatcccagcgatatctacgagaggaacttttcagaagatcttacgtggacaaacatgccaataagccaatcaggcttcggttacggtctcactcaggacatttccctgtgtccacccaacatccc

SEQ ID NO: 54808 - DNA, 2621 bp, Zea Mays
aattggtcttggtgagtgtgggatatccactccctgcactcacctcacgaattactcgctggaccactgctccatctttggaggtgtcgtcgccgggcttcctgaatgtcgcactgctatcaacagttttcgacatcttgctcctcctcagctccgataccaattgttggaaactgcgccggagagacaaccctgcaggttgccggcgagttcctacctcccaggttatcaccaaacgggacagactgctgactctgaagcttggtgtttctgaacataacttgccaaatcctaataattttggtgagctaactgttcaggctgaagaaagttcaggttcaaaagcaataatggagatgatattccgctgttcggatcttgaaatcaaggatcttctaacaaagagtgatacttttttgctaatatctggaatatcagatagtggaatgcctgttccaatttgcaagacagaagtaagaaagaatgatctcaatcctaggtggaggccagtgagtctgaatctgcaacagattggaagagaaccctctaattgtagagtgctttaacttcagtagcaatggcaaacatgacctagtcggataccctttgtaattcgacagcaagatagtcaagtcagttgcagaattggaaaatatgtaccataggaagaatggtgaaaatttctttgttcctgccagcaatgcacatgaatgtcacagtaaggaggtgttgaagagccagctatatgtagagaaatatgttgagagtaacagacatactttcctagattatatttctgttgggtgccagttgaattttatggtaggcgtagatttcacagcttcaaatggaaatccacggcttccagattctttgcattatattgacccctcaggtcggccaaatgtatatcagaaggcaatactggaaattggtgatgttctacaatattatgacccaccgaagcgtttccccgcttggggctttggagcaagacctattgacggtcctgtttctcattgttttaatttgaatggcagcacttatcaacctgaggttgacggaatacaaggaattatgtcagcttatatcagcgctcttcgtaatgtatcattagctggtcctaccctctttggtcagttgataagcaccgccatggcgatagctagccaatctcttgctgagaatcaacataaatacttcattttgttaatagtcactgatggcgtggtaactgattttcaagagactattgatgcgatcataaaggcatcagattttcctatatccataattgttgttggagttggaggggctgatttcaaggaaatggagtttctagatccaaacaaaggagagaaactggaaagctcaaccgggagagttgcatcaagggatatgatacagtttgccccgatgaaggatatgcacggcactgggatatccacacttcaatcacttcttgctgaggtaccagggcaattcatgacatacatgaggacaagagaaacccaaacagacagttagtacatgcatgctgccttcaatcagtacaagatgcaccttggaatattctttgttaatatcattttcgtccttcccgttacatagtggtgcaagtttcaagtcatgggtgtgagatagatagtatggacgtgtcaagtgtaggtgagacatcgatctcctggagacgccaacatcaaattggttagctgagcttgtttaaaatcgtcgccgttaaaaaaaaatgctgcttgttaagagaaatgaggacctccaccagcccaccttaattccatggcatctttttttttattattattctgtgtcaagttggattcctaggctgtaccgcccatctttctctacctgtttgtaagatatgactttaggggtttcggcctttattatccctagtaggcccattggaataggaacttttttggcattgcacattagaattttcaagtgttggcatggctgtttagttctatggtggtgactcgtgacctgtataatataatttagacaatggaatatacagcatttgtggtacagccatgtgacaatgtcagattaagatttgaggcatctggttgcaatacgtttatgtatcgttttctcttttaactatgtatagcaccgatggaacctggagtctgaactagaaattggcagtggctgttctcggacagtttccggaagagaaacccctagctactatgcaagacggtaggactacaaaggaacaactagacccccggcccaaattgcatcctggggaatgccgagggcggagggagatcgatcgatgctccggttccacgactatgtgcgtggtccttgtagaaaagaaaagaaaaagtatgcgtaatctgggtgaaagcaccagcagagtagttaatttggttcagacgttcagtggacaatcgaatcgagcaagcagtggaaggaatccatttcgatacgctgtggaggcaaaggcgccactccaacgatcccagcgatatctacgagaggaacttttcagaagatcttacgtggacaaacatgccaataagccaatcaggcttcggttacggtctcactcaggacatttccctgtgtccacccaacatccc

SEQ ID NO: 54809 - DNA, 3973 bp, Zea Mays
ctcgtccctcttatcccgtcgcccagatctaattctgtttaacgccttcgtctccgcggcgtcagggcgatcccgccgagggtataagctggtatcatggcgtccagcgcagtagcaccaagatggttaaggggtaaggtgaaggctgtgacatctggggattgtcttgtaattatggggtgcacaaaggctgagatcgaacctgagaagtccatcaccttatcctaccttatggccccaaggctggctcgtcgtggtggagttgatgagccgtttgcatgggaaagcagagagtttctgaggaagctctgcatagggaaggaggtcacattcaaagtggattatacagctcctaatattggacgagaatttggaactgtttttctatgtgataagaatgttgcatactcagtagtttctgctggatgggcaaaggtaaaggagcaaggctccaagggtggcgaacaaaacccgcaccttggtgagttgttgaggttagaggaagttgccaagcaacagggtgttggtcgttggagcaaggaacctggtgctgctgaagagtcaataagatatcttccaccatctgcaattggtgaagcaagtggttttgatgcgaagggttttgcggttgaaaataaaggcaagagtttggaggccattgttgaacaagtacgcgatggcagtactgttcgtgtgtatttagtccctagttttcagtttgtccagatatatgttgctggagtacaggccccatcaatggggagacgcccatcggcacctactgtaattgctgaaactgatgatactgctaatgacacgaacggtgaagattctgagggaacacctgcccaactgactacagcacaaagacttgttgcatctgcagcttctgctgaaattccaccagataggtatggaagagaagccaagcacttcacagaggctagagttctcagcagagatgtgcgtatcgtggtggaaggcacagacagctttagtaatataattggttctgtgtattaccctgatggagagactgcaaaggacttggcccttgagcttgtcgaaaatgggcttgcaaaatatgttgagtggagtgctaatatgcttgatgttgaagtaaaaataaagctgaagaacgcagaactacaggctaaaaaggatcaattgagaatctggacagggttcaagccacctgtgacaaactcgaagcccattcatgaccagaaatttactggaaaagtggtagaggttgtaagtggggattgcattattgtggctgatgattctgctccatatggcagtccttcagccgaacgtcgggttaatctgtcaagcattagggcccctaagttgggcaatgctcgtacagatgtgaagcctgaccattttgctcgtgaagctaaggagttcttgcgcatgaggttgattggcaagcaagtggctgttgaaatggaatattctcgaaggatcagcaccgtggatggacagagtgttgctccaacagcaaacattgctgatacaagagtattagattatggttcagtttttctgggttcaccatcacagactgatggagatgacatatcttctgctccgagctctgccagccagcctggagttaatgttgctgaacttttactctcacgaggctttgctaaaacatctaaacacagggattatgaggaaaggtcgcactattatgatgctctattagcagctgaatcacgggctgagaaagcaaagaaaggagtgcattctcaaaaagaatctcctgtgatgcatataacagatttaacaactgtatctgcaaagaaggccaaagatttccttcccttcttgcagaggaacagaaggcattctgccgttgttgaatatgtttttagtggccatcggttcaaactaacaattcctaaggagacttgcagtattgccttctcattatctggtgttcggtgtcctggtaaaggcgagccatactcagatgaagctattgctttgatgaggagaaggatactacagcgtgatgtggagatagaggttgaagcagttgacagaacaggaacattcataggttcgttgtgggagtccaagaccaacatgggctctgtacttctggaagctgggctggcgaagctgagttcttttggcttggataggatgtcagatgctcatgtcctaacaagagctgaacagtttgcgaagcaacaaaagattaagatatgggagaactatgtcgagggtgagaatgcttcaaatggatccgcacctgaatcgaaacaaaaggaaatcctcaaggttgtcgccacggaagttcttggtggtgggaagttttatgttcagacagtgggtgaccagagggtggcttcaattcaacagcagcttgcatctttgaaacttaaagatgcaccagtcattggtgcctttaatcctgtgaagggagagatagtcctctcacaatttagccttgacaactcctggaacagagctatgattgttaatggacctcgctctgtagaatctctaaacgacaagtttgaagtattctatatcgactatggcaaccaagaggtggttccctacagtcgtctacgacccgtggacccatctgtttcctcttctcctgctcttgctcagttatgcagccttgctttcataaaagtgcccagtcttgaggatgactttggtcaggaagcagcagagtatctaagtgaatgtttgctcagtagctcaaagcaatatcgggcaatgatcgaagaacgtgatgcttctgggggaaaatcaaagggacaaggaacctgaaatgttctcattgttactcttgttgatgcggagacagaaagtagcataaatgctaccatgcttgaggaaggccttgctcggcttgaaagaagcaagagatgggacactagggagaggaagacggctctccagaacctggaacagttccaggagaaggcaaagaaggaaaggctccggatctggcagtatggcgatgttgaatcggatgaggacgagcaggccccagctgcaaggaagcctggaggtcgtcggtagagctccccaaatgtgagactctgctgggagttatagatgcaacttagagggtaccttatttattcggttagaaaacagaacttagcgaggcgaaactttctcggtttgagcacttttgatattccgttttttacatcgtaagcttataaggttaaaggtacattgttttttctctgaacacaataaaggtcgtctatgcgctgcagttctttgtgtagtcagaatataatatttgttgatactaagaaatgcagtgaattaaagttaatattgcatttaattattctcgtgcaataatgatttctctcgtacgcatttactgattgctttgtggcttgattactgactgctttgttgcttgatgataacattcttcgaaactttgctttgttccttgatgatagcatttttctttggccgcttgctttgtcaagtgaaaattatttgcaatacatacttcgccactattgattctctcttgtaggcttttaagtttagctccaaacaacaaaattttagagctctagtttagagttctaaatttgagttaaagctctaaatagttgctgttgggcctatgcttcgtcgccgaaggtcttctaggaagaagcggctttcggctgaagctgtttgtataagatggccgaaggtccctcttcatgaagcttcggtattacaaaccgacttaaagatagaatgaccttttagtccataaaggtctgagtcaatgttgtaaacttttataaggggcatacttgtaatccctcacaggctgcgccctgtgcctataaatagtgaacagtattcctttactgttcacggattctagtaattgcaatcgcatattctggaattcaaccttttgtcaaggcagaggtattattgtattcaacgattggatatattaagaaaatat

SEQ ID NO: 54810 - DNA, 712 bp, Zea Mays
tgcggtccggagaaacagttagcaggtacttcaaccttgttttagatgctctatgtgtcatgtcacgtgacctcattaccatgagaaccacagagaaccacagggacacaaccaaaggtctcgtaggttgttagaggatgctctatttgagtcatgggtattgaagcatttaagtgatttggacctgtgaatcgactaggttgatccaagcaggaggtgaatgtgtgatggttggttattttgcatttcttctaggttgatgcatgacggttcatggagaaggctggtggttgtgatagctatcacacactcttttggttaataattagatactctttttgttgagcaatgtgaacctttaatggtgtttatgggtcttgtggagttgtgatggggctattatgaagatgctatggcctgttatggatgattggacatgttatgggctctatatattaatctgttagtttggtttcctcatattcatcatgtcatggggctattatgaaggttcttgcagctgctaaagtgcatctgtgatatttgtaaatgagttattggtaactgaaatgaaggaaagggatctgagattggctttcttggtgagaactggccatgaaaattgagggacggtggtataattgttgcatgcatatatgcttttaggaattgttccattgaatttgtttagtaaaaaatctgcagtccttag

SEQ ID NO: 54811 - DNA, 678 bp, Zea Mays
atctctcgtcatctcctcctccaagcacggatcttctcgtcgtctcctccaagcacggtgatgtccctcgtatttctgccacccggttttcttggctcccctgatcaggagcactgaaattctatctcaaccggttctgccgactggataacttgaattctaaaggttgatccaagcaggaggtgaatgtgtgatggttggttattttgcatttcttctaggttgatgcatgacggttcatggagaaggctggtggttgtgatagctatcacacactcttttggttaataattagatactctttttgttgagcaatgtgaacctttaatggtgtttatgggtcttgtggagttgtgatggggctattatgaagatgctatggcctgttatggatgattggacatgttatgggctctatatattaatctgttagtttggtttcctcatattcatcatgtcatggggctattatgaaggttcttgcagctgctaaagtgcatctgtgatatttgtaaatgagttattggtaactgaaatgaaggaaagggatctgagattggctttcttggtgagaactggccatgaaaattgagggacggtggtataattgttgcatgcatatatgcttttaggaattgttccattgaatttgtttagtaaaaaatctgcagtccttag

SEQ ID NO: 54812 - DNA, 1279 bp, Zea Mays
atctctcgtcatctcctcctccaagcacggatcttctcgtcgtctcctccaagcacggtgatgtccctcgtatttctgccacccggttttcttggctcccctgtattcttcttcgctcctccgcgtagatctgcccgtcgtttcttcttcgattgtgcgggccgacggcaccacacacgcacccacccccatcctgcagcagatccgcacggcaccacacacgcagatccccacggcaccctacagcagacctctgcatttcacagtccccaggccgctaggggctagatggctagtcggagcgtcgggctctgccgctaggggtagcgtcaggctctgccgtcacatctaggagacgcttggtgtgaaggagatgtctgtacgtgccatggcatctaggagcttggatggctggtgtgaaggactagtacgttgtctgttgaatgctagtgatggctggtgtgaaggagcagcagcaagccaagtactactactctgaaactttgtaaaaatatatcaggttcctgttttagctggccgctagctgatgcaaaggtgtgctggatcaggaacctgttttagcagctggaatgtaggaaagaatatttcttattttagcagctggaatgtaggaatgcatagttcttctaatagttctctccctcagagcctaacgatttatttttttcttgtgcttgtgcaggatcaggagcactgaaattctatctcaaccggttctgccgactggataacttgaattctaaaggttgatccaagcaggaggtgaatgtgtgatggttggttattttgcatttcttctaggttgatgcatgacggttcatggagaaggctggtggttgtgatagctatcacacactcttttggttaataattagatactctttttgttgagcaatgtgaacctttaatggtgtttatgggtcttgtggagttgtgatggggctattatgaagatgctatggcctgttatggatgattggacatgttatgggctctatatattaatctgttagtttggtttcctcatattcatcatgtcatggggctattatgaaggttcttgcagctgctaaagtgcatctgtgatatttgtaaatgagttattggtaactgaaatgaaggaaagggatctgagattggctttcttggtgagaactggccatgaaaattgagggacggtggtataattgttgcatgcatatatgcttttaggaattgttccattgaatttgtttagtaaaaaatctgcagtccttag

SEQ ID NO: 54813 - DNA, 1060 bp, Zea Mays
atctctcgtcatctcctcctccaagcacggatcttctcgtcgtctcctccaagcacggtgatgtccctcgtatttctgccacccggttttcttggctcccctgtattcttcttcgctcctccgcgtagatctgcccgtcgtttcttcttcgattgtgcgggccgacggcaccacacacgcacccacccccatcctgcagcagatccgcacggcaccacacacgcagatccccacggcaccctacagcagacctctgcatttcacagtccccaggccgctaggggctagatggctagtcggagcgtcgggctctgccgctaggggtagcgtcaggctctgccgtcacatctaggagacgcttggtgtgaaggagatgtctgtacgtgccatggcatctaggagcttggatggctggtgtgaaggactagtacgttgtctgttgaatgctagtgatggctggtgtgaaggagcagcagcaagccaagatcaggagcactgaaattctatctcaaccggttctgccgactggataacttgaattctaaaggttgatccaagcaggaggtgaatgtgtgatggttggttattttgcatttcttctaggttgatgcatgacggttcatggagaaggctggtggttgtgatagctatcacacactcttttggttaataattagatactctttttgttgagcaatgtgaacctttaatggtgtttatgggtcttgtggagttgtgatggggctattatgaagatgctatggcctgttatggatgattggacatgttatgggctctatatattaatctgttagtttggtttcctcatattcatcatgtcatggggctattatgaaggttcttgcagctgctaaagtgcatctgtgatatttgtaaatgagttattggtaactgaaatgaaggaaagggatctgagattggctttcttggtgagaactggccatgaaaattgagggacggtggtataattgttgcatgcatatatgcttttaggaattgttccattgaatttgtttagtaaaaaatctgcagtccttag

SEQ ID NO: 54814 - DNA, 847 bp, Zea Mays
gctagcctcaaacgccacctaaagttagacatgccacacttctgtgggcaagtgtttggttcgtgactaactttaggcagccacaaaaagtgtggcgaggttccctgagcttgccatactttttttcgccgcatctggggcgctcgttttcgatgccccagcaccgctacgcgccgcacttcgcccccttctctccctctcatgccgctggttgatctctcgtcatctcctcctccaagcacggatcttctcgtcgtctcctccaagcacggatcaggagcactgaaattctatctcaaccggttctgccgactggataacttgaattctaaaggttgatccaagcaggaggtgaatgtgtgatggttggttattttgcatttcttctaggttgatgcatgacggttcatggagaaggctggtggttgtgatagctatcacacactcttttggttaataattagatactctttttgttgagcaatgtgaacctttaatggtgtttatgggtcttgtggagttgtgatggggctattatgaagatgctatggcctgttatggatgattggacatgttatgggctctatatattaatctgttagtttggtttcctcatattcatcatgtcatggggctattatgaaggttcttgcagctgctaaagtgcatctgtgatatttgtaaatgagttattggtaactgaaatgaaggaaagggatctgagattggctttcttggtgagaactggccatgaaaattgagggacggtggtataattgttgcatgcatatatgcttttaggaattgttccattgaatttgtttagtaaaaaatctgcagtccttag

SEQ ID NO: 54815 - DNA, 1264 bp, Zea Mays
atcaggtaggcgcggcgcggaccgcaacacgccagctttcttgctcttgtctctaagcagcagcagcttcctgtctctccagccaccattccattctcgctccttggtaatgaggctggctagccagctaatgcagctccgaacctgttttgttggtggtcatttaaccatgcatgcttcgatcgatggattggtgcatgcatggattattgcatagtgtgatgcatgtggcgcatcagtgcatggttagatgaccatcagcaaacatgttcttgaggcatgcaagttctctagctacacatatcagagatcgatcaccactgcggcgccatggctacttaattgaaatggagcgtgtgtttcatatggagatcggtgcactcaccttgtagctttagcttgcatccccttcgctaacagagagttctatctggttaagtaaagatctggcgtgtggcagtgctcattctcatgacgatatgcagatgcagtgtatatcaatcgtatccaatcagcatgcaagtggtctaaacaatgtaacacctaaatgctattttcaccgtatataagttttctcaatagtgagcttgcaacccattacccatatttgaatctgggtatacggtatggataatggttttattcaatagaaatatgtagactgcactctcagttaatcatcttctagtagcaatggaaaaatcagatgagtcaagttttgttttagtttcggatttctgatttagaggatgtttggttcgatgaaactaaacttaatctctcttttttagtctctaaattttcaaaaatagaactaaaagaggggatgaaatctgatttgttcccctttagtctccatatttaagggtgtttggtttctagtgactattttttagtccttccatttattccattttagttactaaattaccaataccaaaactaaaatagagttttagtttacatatttagcaatttagtgactaaaatagaataaaataaagtaactaaaaattaatccctataaatcaaacactcccttaataatttagggcccaaaatagactaaaagagattacctaaagttttgtcccacggaaccagacagccccttaggccccacatattgatcttacatagtactccctccatttcaaattataatttgtttgacttttttatgccacgtttgatcggctcgtcctattcaattttttccaaaaaaatcaaagctacatttaaagtatattatatgctaagcaat

SEQ ID NO: 54816 - DNA, 1396 bp, Zea Mays
ggtttattcccggggaatatgccctcgctcctctggcatcatccgcagcatatatcctccgtctcgtcttccacctcggatcaggtaggcgcggcgcggaccgcaacacgccagctttcttgctcttgtctctaagcagcagcagcttcctgtctctccagccaccattccattctcgctccttggtaatgaggctggctagccagctaatgcagctccgaacctgttttgttggtggtcatttaaccatgcatgcttcgatcgatggattggtgcatgcatggattattgcatagtgtgatgcatgtggcgcatcagtgcatggttagatgaccatcagcaaacatgttcttgaggcatgcaagttctctagctacacatatcagagatcgatcaccactgcggcgccatggctacttaattgaaatggagcgtgtgtttcatatggagatcggtgcactcaccttgtagctttagcttgcatccccttcgctaacagagagatctgacgacgaaagcgatcatcaatcatatgccacatgctatatttcacaggttctatctggttaagtaaagatctggcgtgtggcagtgctcattctcatgacgatatgcagatgcagtgtatatcaatcgtatccaatcagcatgcaagtggtctaaacaatgtaacacctaaatgctattttcaccgtatataagttttctcaatagtgagcttgcaacccattacccatatttgaatctgggtatacggtatggataatggttttattcaatagaaatatgtagactgcactctcagttaatcatcttctagtagcaatggaaaaatcagatgagtcaagttttgttttagtttcggatttctgatttagaggatgtttggttcgatgaaactaaacttaatctctcttttttagtctctaaattttcaaaaatagaactaaaagaggggatgaaatctgatttgttcccctttagtctccatatttaagggtgtttggtttctagtgactattttttagtccttccatttattccattttagttactaaattaccaataccaaaactaaaatagagttttagtttacatatttagcaatttagtgactaaaatagaataaaataaagtaactaaaaattaatccctataaatcaaacactcccttaataatttagggcccaaaatagactaaaagagattacctaaagttttgtcccacggaaccagacagccccttaggccccacatattgatcttacatagtactccctccatttcaaattataatttgtttgacttttttatgccacgtttgatcggctcgtcctattcaattttttccaaaaaaatcaaagctacatttaaagtatattatatgctaagcaat

SEQ ID NO: 54817 - DNA, 1358 bp, Zea Mays
gtgacgctttcactgcacactacaatcaatcagccggcttttcctctcttcccctcgacagaagcccccaaatccgataccttcccctatccacctcgagtcccttccttccttagcggcggcgcgaaggcggcggagccatgggcggagtcggcgaaggtgacgcgtgggcggatcaggagcagggcaacggcgggggcagccgtggtgttggcggtggcggcggcgaggcgaagcggtcggagatctacacgtacgaggccgcctggcacatctacgcgatgaactggagcgtgcggcgcgataagaaataccgccttgccatcgccagccttctcgagcaggtcaccaaccgcgtcgaggtcgtccagctcgatgaggcctcgggtgacatcgcccccgtcctcaccttcgaccatcagtacccgcccaccaagaccatgttcatgccggacccgcacgcgctccgccccgacctgctcgccacctccgccgaccacctgcgcatctggcgcatcccgtcctccgacgacgccgaggacggcgccgcctccgccaacaacaacaacggctccgtccgctgcaacggcacccagcagccgggcatcgagctacgctccgagctcaacggcaaccgcaacagcgactactgcgggccgctcacctccttcgactggaacgacgccgatccgcgccgcatcggtacctcctccatcgacaccacctgcacaatctgggacgtcgagcgcgaggccgttgacacccagctcatcgcccacgacaaggaggtctacgacatcgcctggggcggcgcgggggtctttgcctccgtctccgccgacggctctgttcgcgtctttgatttacgggacaaggagcactccacaatcatttatgagtctggttcaggtggcagcagcggcggcgcctcctcctcccccccacagggcgcgcggggtcggcatcgatgggatcgacagcgggcggagacactggtttggcggcgtcggcagaccggcatctccggtacccgacaccacctcgctggtttggttcggcaggtaggtcctcgcctagttgggtagctcggtgagcgggttggttggcaataccacctcaccgggttgctcgtcaagcgggttggtcggtcgtctcgccccgtcaggttgttcggtgggcgggttggtcggcagatctgccctgccggattgcttgaagtataggtcagtcggttagtggatcatctttgagaggtcttttaggtcttctttgaacagtcggttctcaggtacccgacataaaggttgtatgctacaacttattttagtaaaacaattcttgccatccacgcttaaacc

SEQ ID NO: 54818 - DNA, 502 bp, Zea Mays
gctgtagctgctgctaaataataaaaccggcggcgatgattgcttccggcggacgcacgagagattctctcttcttaactacagcaacgtggaggtggagcagatcttttctgggatcgaaatgagttgtcgtggtcgaggcggcaagcggcaacggtggcatggagaggaggcggtggcgttcgacgattcgacaagcacggcggtcgactggagaggaggcggtggtggccggtgcgatgcttcccgcaagggatactgctgttctcgtcgtgactcgtgattgtacgttacaggatgtctcttcggcgggaggatcctacatgacatttatgatttagccgacgatgaagctctggattctgacagaggaggagcgttccgagggaaccgtgttgttgtatgcatgaacgtaggtgtcctacaaccaggttgtgggaaaatactaacaggactgatgcaactatggactactacatgctctgcccacttttcattttag

SEQ ID NO: 54819 - DNA, 2116 bp, Zea Mays
agtccagtagcaatactcactcctagtcctggagtatagtcactactacccctagaagggaagcgcatccgctcgatacggggggtggcaggttggcgaggagacgaaaggcacggcgagcgagagcccaacgaccgtccagttccagttccagcggtccgagcgagatcgatcgcccctccgcaaggccgcaacaacagacgcggcaagcgggtacaagggagttcttctggaggcgcgggagatcacgcgagtgtgttgcgcttgaaaagaagaaaaaaacaggcagggaggagggagtcccgttcccgaacccgaactacaagccagcgcaactgctgctgccgccgcccgcccagcaggaggagcgagggcattgcccggccccatcgccgtcgcgccgtcgccgtcgccgcgctgcaggcagaggaggacggcgccggccagcatgggcgggtacgagctcgtcaggagcgacgacgcggcgggcgccgcgggagccgacctcgagtccggctccggcgccagcaaggtcgccggcgccccgccgccctcgccggccccgtcggcgtcgcccgccgcgcggcagcagcgcctcgcctcgctcgacgtcttccgcggcataaccgtcctgcttatgatcatcgtcgacgacgctggaggcttcctcccggcgctgaaccactctccctgggacggcgtcacagtagctgatttcatcatgccgttcttccttttcatagtcggagtctcactaacactagcgtacaagcgggtgccggatagagtggaggcaactaggaaggcagtgcttcgtgccctcaagctgttctgccttggtcttgttctccaaggtggatttttccatggcgtccacagtctcacgtttggtgttgacctaacgaagattcggttgatgggcatacttcagaggattgcaatagcctatctcctagctgcagtatgtgaaatctggctcaagggagacgacgatgtagattctgggtatggtttgctgaggagataccgctaccaactgtttgtaggattggtcctctctatagcgtactctattcttctctacggcatgtacgttccagactgggagtaccagatagcaggccctggttccagttccacagagaagtcgttctctgtgaaatgcggagtgagaggagacaccggaccagcttgcaacgcagtcggaatggtcgaccgtacggtcctagggatcgaccacctctacagacggccagtttatgcgcgcacgaaggaatgcagtatagattatccagagaatgggcctctcccacctgacgctccgtcgtggtgccaggcgccatttgatcctgaaggcctcctcagctccgttatggcgattgtcacttgcttgatcggactccagtttgggcatgtaattatacatttcgaaagcacaggggaagaatcgccagttggttggtcccttccttcagcatgctagctctagccttcgtaatggacttcgtcggaatgcgaatgaataaaccactatacacgatgagctacactctggctactgctggcgctgcgggtcttctcttcgctggaatctatgctcttgtggatctgtacgggttcagaagacctaccatcgccatggagtggatggggaagcacgccctgatgatatacgtgctggtggcgtgcaacatccttcccatgttcatccgtggcttctattggagggaccccaacaacagccttctgaaagtcattggtatcggggcgtgaagccatgaccttctacatgttcaggcccaaacttggacatgcacagcgctctcgcatgtttaagagcaataatctaggtgctcaggccaagttttgctatgcggttagaggaccatagcgcgctcaggtcatgcgccatggggctgcctatattctcagcactgccgagatgcctgttgccacttgcagatgcatggaatccattctcccagccaactttgtatatggtggagttgagcacatgtacatgatatcacacgagtaatatgttgtgattcagatgaaatatatactagtacatatcagtccatattctataataatactacctccggtcttgaat

SEQ ID NO: 54820 - DNA, 631 bp, Zea Mays
tcattgccatttcctctttaagagagattgagctcgagacaggaatgttgtcatatctgtggaaaatcgggcagaaattctcaaagccaccaagtgaagatacatactactctcggacaagaagcatgctgcacaaactgggtcttgaaaagtatgagaagaatttcaagaggggtctcctcaatgatcaaacgttaccactccttacggacagtgctctgagagatgtgaagattcctcctggacccagacttctcatactcgaccaaattaaaagggaccccgagctggttcaagcaaagtagcagtcacaattgtcgacagctggttctttctgggttgcatagggtttgaaagcgatgccgtctctagtttcttaataaactttctaggcaagcaagcaagaatttagttgtgctgtagttaattgttttttggccgatcagtttgcatcgatcctattaaattctgaacaacaggtatttatacgcatcttattcaaatttaaactggcattctctacattatgcaaatatgttggaaacaaggttgatggattaatttggcgtgaccggctgtcgtgtatacttgagtgaatcaacgaggaaataaatattgctttctagaggct

SEQ ID NO: 54821 - DNA, 838 bp, Zea Mays
gtttctctagcctgttccacgatttgacggctttagctggtggacctttggtgcaagcccggaactttgcagtcatgaccggtgcaaacgcaggcatatcttgtgtcatgagaaggatacgagggaaagaggatatccagggcagcatggcagctgctttcggttctggtgctcttttctccatagtgagcggaatgggaactcctaatccagtagcaaatgcagttacaactggtgttgcttttgcagtatttcaaggtggctttttcatgatcgggcagaaattctcaaagccaccaagtgaagatacatactactctcggacaagaagcatgctgcacaaactgggtcttgaaaagtatgagaagaatttcaagaggggtctcctcaatgatcaaacgttaccactccttacggacagtgctctgagagatgtgaagattcctcctggacccagacttctcatactcgaccaaattaaaagggaccccgagctggttcaagcaaagtagcagtcacaattgtcgacagctggttctttctgggttgcatagggtttgaaagcgatgccgtctctagtttcttaataaactttctaggcaagcaagcaagaatttagttgtgctgtagttaattgttttttggccgatcagtttgcatcgatcctattaaattctgaacaacaggtatttatacgcatcttattcaaatttaaactggcattctctacattatgcaaatatgttggaaacaaggttgatggattaatttggcgtgaccggctgtcgtgtatacttgagtgaatcaacgaggaaataaatattgctttctagaggct

SEQ ID NO: 54822 - DNA, 1277 bp, Zea Mays
cttggagagttcaaattcatctcctcccaccacacatccctcatgctgcctgctaaaagaaccatgtctttctctacccctcgtccttggtggcaatgctgccctcaacaaagtggagtactcttccctgatagcaacaagcggatgtgcatgcttctcaagcagctggcttccaccgccgctttagctggtggacctttggtgcaagcccggaactttgcagtcatgaccggtgcaaacgcaggcatatcttgtgtcatgagaaggatacgagggaaagaggatatccagggcaggtgggggttcataattttattttatcttccatacatttcagggagcgttcacagttcactaaagtactcaatgtgtttgatttaatctcactaatgtcaagatgtgcacatcttaataccttcatatatctgaatcaaagctggtaattcttatatttcttttgcgtatttggtgcaaaaatggtatcttgattcaatatgttatttgtagttaatccttggcttaaaaaaatcctagtttattaattagagtgttcctttatgtttgataatgtcatgtttgtatagcatggcagctgctttcggttctggtgctcttttctccatagtgagcggaatgggaactcctaatccagtagcaaatgcagttacaactggtgttgcttttgcagtatttcaaggtggctttttcatgatcgggcagaaattctcaaagccaccaagtgaagatacatactactctcggacaagaagcatgctgcacaaactgggtcttgaaaagtatgagaagaatttcaagaggggtctcctcaatgatcaaacgttaccactccttacggacagtgctctgagagatgtgaagattcctcctggacccagacttctcatactcgaccaaattaaaagggaccccgagctggttcaagcaaagtagcagtcacaattgtcgacagctggttctttctgggttgcatagggtttgaaagcgatgccgtctctagtttcttaataaactttctaggcaagcaagcaagaatttagttgtgctgtagttaattgttttttggccgatcagtttgcatcgatcctattaaattctgaacaacaggtatttatacgcatcttattcaaatttaaactggcattctctacattatgcaaatatgttggaaacaaggttgatggattaatttggcgtgaccggctgtcgtgtatacttgagtgaatcaacgaggaaataaatattgctttctagaggct

SEQ ID NO: 54823 - DNA, 2544 bp, Zea Mays
gcaaacccctccgcctcccggcgcccgcatcgcctctcgcctgcgctgcgctttccttcccccaagatattttccggccgctctaccctgtagctgtagcgcgtgcgcgcaccgccttgccctgcggtccgcagccacgagactgccctgccccgccgccaagtggccagaatcccgccgcggggcccgccgcgatcgcccaccaaaaccaccctcgggctcgggtatactacacagatacatggccggccatctctgagccggtctcccggcagcagcagtccctcgggttgtccacgcggagcgccagccgatggccggccacagtatgtcggttcacccgaagcctataaattcctcgccgccccgcctctcgccgccccgcctctcgccgcccatttccctccgccgcctcctaatcctcaacacccgcgcccccaaccgcgcccgtcgtatgccaccatgcaccgcgcccgccccaccgcgcacgctaatgaccccgatgctccgtacgccgccgccgtcgcgatgctgctggagcccaaactcgaggacgaggagttgccgctgcagcagctggcgtccccgggccccttcgtgtccctggaccagctgatgccggcggtggccgtgccggccgaaccgcgcccgctggaggcgctgctgcaaggcccgcagctgccgcccttcctgtccaagacgtacgacctggtgaacgagccggcgctggacggggtcatctcctggggcgctgccgggaacagcttcgtcgtgtgggacccctccaccttcgcgcgcgacgtgctgccgcacaacttcaagcacaacaatttctccagcttcgtcaggcagctcaacacctatgattgaggcaatcctgaggagtagatcctgtgatgggcaaaggctaatccgtttcacgggacgcgacgctatgcaagggtttccgcaaggttcatgctgacagatgggagtttgctcacgaagatttcctgcgagatagcaagcatctattgaagaggattgtcaggcgcaggtcctccccaacaaaacaaagcagcgttcagcctggctcttcttctggagagtccagcttggaccctgagctccacacgctgaggagagagaagaacgcgctgcttgaagaagtagcaaggttgaaacaggaacaccgccagacaattgagcaaatgagcacgctgaatcacaggctggaatctgcagaggaccggcagaggcagatggtctctttcctggccaagctccttcagaacccgagtttcgtgaggaagctgaagctgcacagggagaagaaggagatcgactccaccagggtgaaaagaaagtttctcaaacatgttcctcatggcagcgtagagtcaggtgaatccagctcacagcacgccggagagaatggttcgtatttcgctgtgagttcccccatggctacaactacaagcgtgcatgacgacatcacggagcttcagaactttcttttggaagatgatgacctcaacttcggcatggattcagaaaacaccgggcttgaaggcaccgaggcaacagatgatattggagaactgattcaggggttcgacacacaagaggaacttgacctcggcagtggagctgagctacaggagatgcctccagcttctggccctcttgctcgagatcccacaatcggcaggttcaagggaaagaatgtgctgtgtccaggactggacgctacctcctccgaaggcgactgcctcagtccattgcctgacaacatggggctgctttcaggcaccatgctagggacggcaggcagcatgatggccgctgacgatgagcaaatatggggcgttgatgcttcggcagccctgcaaagctcttgcagtggcactagccaacaagctttcggtagccatgctagtgatccctatctgatggacatcgccaacaggcctgagagattctgggagcttgatttccaggcactggatgaggctgatctgcagctggacaagtgtgctatcgatgaccctgctcttcagcagcagccaagcatgaagaagctgtagacgaatttccgttgtcagacagacagtatggtggtgcttcatccactgaagtgctacaattaacttatggagattgctatagttacttcggtattttggagcgaggctgatgaactcgcctactatggcacttagtagtagcagcagcagtagtatgtttttgtttcccatttattcacccccggtgtttttgaatggaaacttgtatcctagtgatttcttcagagcagctgttaactgctctggccgattctttttttttttgtttccatttatgtttttgttctgattcttttacttgctagttgctacttgcgaatgtcttgcaatgagtaatgggatttaaaaaaaaatccgttctcagagaaccaagcgatgtactgatgtgctgctgaatgccaagaagtggctgaattctgtttatcagcgtgctatcctgtggacagatatttttgttaaatttatggtcttcctacag

SEQ ID NO: 54824 - DNA, 2761 bp, Zea Mays
aaatatcccggcctctcttcgcccccaagcaaacccctccgcctcccggcgcccgcatcgcctctcgcctgcgctgcgctttccttcccccaagatattttccggccgctctaccctgtagctgtagcgcgtgcgcgcaccgccttgccctgcggtccgcagccacgagactgccctgccccgccgccaagtggccagaatcccgccgcggggcccgccgcgatcgcccaccaaaaccaccctcgggctcgggtatactacacagatacatggccggccatctctgagccggtctcccggcagcagcagtccctcgggttgtccacgcggagcgccagccgatggccggccacagtatgtcggttcacccgaagcctataaattcctcgccgccccgcctctcgccgccccgcctctcgccgcccatttccctccgccgcctcctaatcctcaacacccgcgcccccaaccgcgcccgtcgtatgccaccatgcaccgcgcccgccccaccgcgcacgctaatgaccccgatgctccgtacgccgccgccgtcgcgatgctgctggagcccaaactcgaggacgaggagttgccgctgcagcagctggcgtccccgggccccttcgtgtccctggaccagctgatgccggcggtggccgtgccggccgaaccgcgcccgctggaggcgctgctgcaaggcccgcagctgccgcccttcctgtccaagacgtacgacctggtgaacgagccggcgctggacggggtcatctcctggggcgctgccgggaacagcttcgtcgtgtgggacccctccaccttcgcgcgcgacgtgctgccgcacaacttcaagcacaacaatttctccagcttcgtcaggcagctcaacacctatagtgcctatggagatattgctgcggatttgtttctcttttggttgttaattggtgttgtatcgtgtgagtcatgtataaaactgccctgtaaatggagtgtgtactctgttcttgctttcttccttgagctgaaccgcgtcatgtaacacgcatcaaaactggccgcaccaaattataaattggattaggattgaggcaatcctgaggagtagatcctgtgatgggcaaaggctaatccgtttcacgggacgcgacgctatgcaagggtttccgcaaggttcatgctgacagatgggagtttgctcacgaagatttcctgcgagatagcaagcatctattgaagaggattgtcaggcgcaggtcctccccaacaaaacaaagcagcgttcagcctggctcttcttctggagagtccagcttggaccctgagctccacacgctgaggagagagaagaacgcgctgcttgaagaagtagcaaggttgaaacaggaacaccgccagacaattgagcaaatgagcacgctgaatcacaggctggaatctgcagaggaccggcagaggcagatggtctctttcctggccaagctccttcagaacccgagtttcgtgaggaagctgaagctgcacagggagaagaaggagatcgactccaccagggtgaaaagaaagtttctcaaacatgttcctcatggcagcgtagagtcaggtgaatccagctcacagcacgccggagagaatggttcgtatttcgctgtgagttcccccatggctacaactacaagcgtgcatgacgacatcacggagcttcagaactttcttttggaagatgatgacctcaacttcggcatggattcagaaaacaccgggcttgaaggcaccgaggcaacagatgatattggagaactgattcaggggttcgacacacaagaggaacttgacctcggcagtggagctgagctacaggagatgcctccagcttctggccctcttgctcgagatcccacaatcggcaggttcaagggaaagaatgtgctgtgtccaggactggacgctacctcctccgaaggcgactgcctcagtccattgcctgacaacatggggctgctttcaggcaccatgctagggacggcaggcagcatgatggccgctgacgatgagcaaatatggggcgttgatgcttcggcagccctgcaaagctcttgcagtggcactagccaacaagctttcggtagccatgctagtgatccctatctgatggacatcgccaacaggcctgagagattctgggagcttgatttccaggcactggatgaggctgatctgcagctggacaagtgtgctatcgatgaccctgctcttcagcagcagccaagcatgaagaagctgtagacgaatttccgttgtcagacagacagtatggtggtgcttcatccactgaagtgctacaattaacttatggagattgctatagttacttcggtattttggagcgaggctgatgaactcgcctactatggcacttagtagtagcagcagcagtagtatgtttttgtttcccatttattcacccccggtgtttttgaatggaaacttgtatcctagtgatttcttcagagcagctgttaactgctctggccgattctttttttttttgtttccatttatgtttttgttctgattcttttacttgctagttgctacttgcgaatgtcttgcaatgagtaatgggatttaaaaaaaaatccgttctcagagaaccaagcgatgtactgatgtgctgctgaatgccaagaagtggctgaattctgtttatcagcgtgctatcctgtggacagatatttttgttaaatttatggtcttcctacag

SEQ ID NO: 54825 - DNA, 854 bp, Zea Mays
aaaaaacttgtttaaataacacttgcggcaaaagggatgaactatcttcataagcgtaatcctccaatagtccaccgggatcttaagtcaccaaacctgttggttgacaaaaagtacactgtgaaagtctgtgactttggtctctccagattgaaggcaaacacatttctgtcttccaagactgcagcagggactcctgagtggatggcaccagaagttctacgagacgagccctcaaatgagaagtctgatgtttacagcttcggtgtaatcttatgggagcttatgacattgcagcagccatggagtaatttaaatccagctcaggtcgttgcagcggttggtttcaagggacaaaggcttgagatcccaagcagcgttgatccgaaagtggcggcagtaatcgagtcctgctgggtcagggagccctggagacgaccctcttttgccagtatcatggaatccctgaaacttctcatcaagacattaccacccaatcagctcctcgaagaaaattagttaccacccaagcaacttgcaaattatgtcacctctagagttttctcgatttgtttagatccgatatgcgccaggcctctcaaaccattcgtcttcggcgccacgtattccctgatgagaaatattcaaaactacacctgtcacaaaaggggaaaaactatggttggacaataagattcatgaaaaaaatatgtgatccaaattaagtgtacatctcttttatcaaggaaccaaatgtaagttggtcaaatatatacatataagtactaatatttatggaatatatacttttacaataaaattattaaagatataaatatcgatgctattttcca

SEQ ID NO: 54826 - DNA, 1369 bp, Zea Mays
gtgagttcttaaggcgtgatagtaatatgaagagagagaaaaagtcgaagttgacatgagaagagacagtaaacgaagatttgaaaagatagaatatatccaaagctttagcattgaataggagcacatgaaaacaactatacatgtgcttgaaccttgattttgtggcttctgttggatttcaactataacctgcccctaacttgcttgggactaaaagactttgatgttgttgtatattagtcacataggtcctgctgaacttttttctcatggtatttttgcagcttaacaaacagcgttctgaatatgtcctacaaatggattatggaatgtaataatgtaccctacttatggttgcaattatgagaagtttgcgacatccgaacattgttcttcttatgggtgctgtcactcagccacctaacctttcaattgtgactgaatacctatcaagaggtagcttatacagacttttacacaggcatgctgcaagggaaaatctggaggagcgccgccgcttgagtatggctttcgacgtggcaaaagggatgaactatcttcataagcgtaatcctccaatagtccaccgggatcttaagtcaccaaacctgttggttgacaaaaagtacactgtgaaagtctgtgactttggtctctccagattgaaggcaaacacatttctgtcttccaagactgcagcagggactcctgagtggatggcaccagaagttctacgagacgagccctcaaatgagaagtctgatgtttacagcttcggtgtaatcttatgggagcttatgacattgcagcagccatggagtaatttaaatccagctcaggtcgttgcagcggttggtttcaagggacaaaggcttgagatcccaagcagcgttgatccgaaagtggcggcagtaatcgagtcctgctgggtcagggagccctggagacgaccctcttttgccagtatcatggaatccctgaaacttctcatcaagacattaccacccaatcagctcctcgaagaaaattagttaccacccaagcaacttgcaaattatgtcacctctagagttttctcgatttgtttagatccgatatgcgccaggcctctcaaaccattcgtcttcggcgccacgtattccctgatgagaaatattcaaaactacacctgtcacaaaaggggaaaaactatggttggacaataagattcatgaaaaaaatatgtgatccaaattaagtgtacatctcttttatcaaggaaccaaatgtaagttggtcaaatatatacatataagtactaatatttatggaatatatacttttacaataaaattattaaagatataaatatcgatgctattttcca

SEQ ID NO: 54827 - DNA, 1663 bp, Zea Mays
cttctctcaactgtttaaaacttttcaggataagatgaatacaaaaaatatagcagtcattctaggaatgtctaattgatttaattgggaacccgggattcttatctgaacctgactccctcttgaatggactatcatccatctctgtttcttcaccattgcgcccaccaaaacatgactcagctgataattctgataatttcaagttgtttgccaagaaatatttccttgattgtcagtcgttaaatctcatgttcagtgatccagcagctggaacggttatcgacttagatgaggttatgggatcaaatctaggtctaaactcatcacatgcaacaaacagtgattgtcaagctacctttactcatcttaaggctggtactcgacgcagtagtcaagatgggagttttataatgcagaggagttcccaagaggatactcaatctggactaagtgatccctttagcgatatgtcccttgagatagaagacttgattatcccatggagtgagcttgttctgaaagagaaaattggtgcaggttcttttggtactgtgcaccgtgcggattggaatggttcggatgtcgcagtaaaaattctaatggagcaggacttccatccagagcgtctcaaagaatttttgagagaggttgcaattatgagaagtttgcgacatccgaacattgttcttcttatgggtgctgtcactcagccacctaacctttcaattgtgactgaatacctatcaagaggtagcttatacagacttttacacaggcatgctgcaagggaaaatctggaggagcgccgccgcttgagtatggctttcgacgtggcaaaagggatgaactatcttcataagcgtaatcctccaatagtccaccgggatcttaagtcaccaaacctgttggttgacaaaaagtacactgtgaaagtctgtgactttggtctctccagattgaaggcaaacacatttctgtcttccaagactgcagcagggactcctgagtggatggcaccagaagttctacgagacgagccctcaaatgagaagtctgatgtttacagcttcggtgtaatcttatgggagcttatgacattgcagcagccatggagtaatttaaatccagctcaggtcgttgcagcggttggtttcaagggacaaaggcttgagatcccaagcagcgttgatccgaaagtggcggcagtaatcgagtcctgctgggtcagggagccctggagacgaccctcttttgccagtatcatggaatccctgaaacttctcatcaagacattaccacccaatcagctcctcgaagaaaattagttaccacccaagcaacttgcaaattatgtcacctctagagttttctcgatttgtttagatccgatatgcgccaggcctctcaaaccattcgtcttcggcgccacgtattccctgatgagaaatattcaaaactacacctgtcacaaaaggggaaaaactatggttggacaataagattcatgaaaaaaatatgtgatccaaattaagtgtacatctcttttatcaaggaaccaaatgtaagttggtcaaatatatacatataagtactaatatttatggaatatatacttttacaataaaattattaaagatataaatatcgatgctattttcca

SEQ ID NO: 54828 - DNA, 3018 bp, Zea Mays
gtgccgtgtgccgtgcgcgctgcacccggcactggcagacacccgctcttcgacgcgactccccagtccccactgggccaccagtcctccgtccatcactccatccacgagtcagcgtccgcgtccgcgtcggcgtgtccctctccttcagatgcgaggcctccaagggcgaactagtagttgcttggagacttgcagtgaaaagggcacgcagaaaagcgagcgtctggccgcccgcacgccaggagcgatcgacagatcggctgatgcggagttagcacttagcagtcgcccgccgcgacctcaacctgcaccggcgccgcacgccaagggcggagacgccagatgatgaaggatgcgaagtggcctcacgcggtgtcgagcgccggtggaaggcgaggcccccctgcctcatcatccaacgcgggggcgtcgtacaccctcctcgcgtcctccccgcccagcagcgtcagaaacgacggctgctcgccgcactaccctcccgcccctgcgtccgacgacgacgggctctcctcgttcgacgcgtccgtcgctgccgcgaagctgccgttccagcagctgcacaggaacaggccccaactcggcgtcgcggactggctgccgctgcagcgccaatctagcggtagcagcgtcgggggcgacgacggcgaggtatcctccaccgtttccttcaccatcgccaacgccgcggaatataggtacaagggcgacgcggaccgcgcaccgagcagcagcagcaagagctgggcgcagcaggcggaggaggcctacaacctccagctcgccctcgcgctccgcctctgctccgaggcctccgccgctgcggaccccaacttcctcgactcctccatcgctgccgccgaccacctccagcccattgcatcgcctcaatccctctcccaccgcttctgggtcaatggctgcttgtcctactccgacaaggtctcggatggtttctacttcatccaggggatggatcccttcatatggacgctctgcaacgatttgcacgacggaggccgcgtccccactattgagtccctcaaggctgtcaatcccaccgattctgccatcgaggtggtcatcgtagataaagtggcggactatgacctgaggcagctgataagcatggccattgacgtttctctgaaccgtaccgactccaaggagatcgccactcgactcgctgccgttgtgtccacgaagatggggggatcggtagcagctaccgaggaacacgagttgggtccccggtggagagactctgttgggttcctgaagattagctcagggtctgttgtacttcccatcggaaagttatcagttggcttttgttgccaccgagcattactgttcaagaccctggcggattccatcaatctgccctgtcgcattgtgaagggatgcaagtactgcaaagctggtgctgccacttcttgcttggtgcgctttggtcatgacagggaatgtctaattgatttaattgggaacccgggattcttatctgaacctgactccctcttgaatggactatcatccatctctgtttcttcaccattgcgcccaccaaaacatgactcagctgataattctgataatttcaagttgtttgccaagaaatatttccttgattgtcagtcgttaaatctcatgttcagtgatccagcagctggaacggttatcgacttagatgaggttatgggatcaaatctaggtctaaactcatcacatgcaacaaacagtgattgtcaagctacctttactcatcttaaggctggtactcgacgcagtagtcaagatgggagttttataatgcagaggagttcccaagaggatactcaatctggactaagtgatccctttagcgatatgtcccttgagatagaagacttgattatcccatggagtgagcttgttctgaaagagaaaattggtgcaggttcttttggtactgtgcaccgtgcggattggaatggttcggatgtcgcagtaaaaattctaatggagcaggacttccatccagagcgtctcaaagaatttttgagagaggttgcaattatgagaagtttgcgacatccgaacattgttcttcttatgggtgctgtcactcagccacctaacctttcaattgtgactgaatacctatcaagaggtagcttatacagacttttacacaggcatgctgcaagggaaaatctggaggagcgccgccgcttgagtatggctttcgacgtggcaaaagggatgaactatcttcataagcgtaatcctccaatagtccaccgggatcttaagtcaccaaacctgttggttgacaaaaagtacactgtgaaagtctgtgactttggtctctccagattgaaggcaaacacatttctgtcttccaagactgcagcagggactcttcggtgtaatcttatgggagcttatgacattgcagcagccatggagtaatttaaatccagctcaggtcgttgcagcggttggtttcaagggacaaaggcttgagatcccaagcagcgttgatccgaaagtggcggcagtaatcgagtcctgctgggtcagggagccctggagacgaccctcttttgccagtatcatggaatccctgaaacttctcatcaagacattaccacccaatcagctcctcgaagaaaattagttaccacccaagcaacttgcaaattatgtcacctctagagttttctcgatttgtttagatccgatatgcgccaggcctctcaaaccattcgtcttcggcgccacgtattccctgatgagaaatattcaaaactacacctgtcacaaaaggggaaaaactatggttggacaataagattcatgaaaaaaatatgtgatccaaattaagtgtacatctcttttatcaaggaaccaaatgtaagttggtcaaatatatacatataagtactaatatttatggaatatatacttttacaataaaattattaaagatataaatatcgatgctattttcca

SEQ ID NO: 54829 - DNA, 1341 bp, Zea Mays
aataacccagaaataaaaatcgccgtggaggcgagtcgccgccggcaccgcccggcacggccttcttctccggcgaaggcggagctcgttacggggattccacatccgttaatcggtcccaccggatccctcgccgcctcccacgggccgggccgcgccgtggcgcgcgcgcaggccgagatgcggaagaggatggagagcgacgacgatctgatcgaggaggcaaaactgcgcaccgtctggtgggcgctctgcatcttcgccgtctcctacttcctcacgcgttcttttggtactgtgcaccgtgcggattggaatggttcggatgtcgcagtaaaaattctaatggagcaggacttccatccagagcgtctcaaagaatttttgagagaggttgcaattatgagaagtttgcgacatccgaacattgttcttcttatgggtgctgtcactcagccacctaacctttcaattgtgactgaatacctatcaagaggtagcttatacagacttttacacaggcatgctgcaagggaaaatctggaggagcgccgccgcttgagtatggctttcgacgtggcaaaagggatgaactatcttcataagcgtaatcctccaatagtccaccgggatcttaagtcaccaaacctgttggttgacaaaaagtacactgtgaaagtctgtgactttggtctctccagattgaaggcaaacacatttctgtcttccaagactgcagcagggactcttcggtgtaatcttatgggagcttatgacattgcagcagccatggagtaatttaaatccagctcaggtcgttgcagcggttggtttcaagggacaaaggcttgagatcccaagcagcgttgatccgaaagtggcggcagtaatcgagtcctgctgggtcagggagccctggagacgaccctcttttgccagtatcatggaatccctgaaacttctcatcaagacattaccacccaatcagctcctcgaagaaaattagttaccacccaagcaacttgcaaattatgtcacctctagagttttctcgatttgtttagatccgatatgcgccaggcctctcaaaccattcgtcttcggcgccacgtattccctgatgagaaatattcaaaactacacctgtcacaaaaggggaaaaactatggttggacaataagattcatgaaaaaaatatgtgatccaaattaagtgtacatctcttttatcaaggaaccaaatgtaagttggtcaaatatatacatataagtactaatatttatggaatatatacttttacaataaaattattaaagatataaatatcgatgctattttcca

SEQ ID NO: 54830 - DNA, 2392 bp, Zea Mays
aataacccagaaataaaaatcgccgtggaggcgagtcgccgccggcaccgcccggcacggccttcttctccggcgaaggcggagctcgttacggggattccacatccgttaatcggtcccaccggatccctcgccgcctcccacgggccgggccgcgccgtggcgcgcgcgcaggccgagatgcggaagaggatggagagcgacgacgatctgatcgaggaggcaaaactgcgcaccgtctggtcaatggctgcttgtcctactccgacaaggtctcggatggtttctacttcatccaggggatggatcccttcatatggacgctctgcaacgatttgcacgacggaggccgcgtccccactattgagtccctcaaggctgtcaatcccaccgattctgccatcgaggtggtcatcgtagataaagtggcggactatgacctgaggcagctgataagcatggccattgacgtttctctgaaccgtaccgactccaaggagatcgccactcgactcgctgccgttgtgtccacgaagatggggggatcggtagcagctaccgaggaacacgagttgggtccccggtggagagactctgttgggttcctgaagattagctcagggtctgttgtacttcccatcggaaagttatcagttggcttttgttgccaccgagcattactgttcaagaccctggcggattccatcaatctgccctgtcgcattgtgaagggatgcaagtactgcaaagctggtgctgccacttcttgcttggtgcgctttggtcatgacagggaatgtctaattgatttaattgggaacccgggattcttatctgaacctgactccctcttgaatggactatcatccatctctgtttcttcaccattgcgcccaccaaaacatgactcagctgataattctgataatttcaagttgtttgccaagaaatatttccttgattgtcagtcgttaaatctcatgttcagtgatccagcagctggaacggttatcgacttagatgaggttatgggatcaaatctaggtctaaactcatcacatgcaacaaacagtgattgtcaagctacctttactcatcttaaggctggtactcgacgcagtagtcaagatgggagttttataatgcagaggagttcccaagaggatactcaatctggactaagtgatccctttagcgatatgtcccttgagatagaagacttgattatcccatggagtgagcttgttctgaaagagaaaattggtgcaggttcttttggtactgtgcaccgtgcggattggaatggttcggatgtcgcagtaaaaattctaatggagcaggacttccatccagagcgtctcaaagaatttttgagagaggttgcaattatgagaagtttgcgacatccgaacattgttcttcttatgggtgctgtcactcagccacctaacctttcaattgtgactgaatacctatcaagaggtagcttatacagacttttacacaggcatgctgcaagggaaaatctggaggagcgccgccgcttgagtatggctttcgacgtggcaaaagggatgaactatcttcataagcgtaatcctccaatagtccaccgggatcttaagtcaccaaacctgttggttgacaaaaagtacactgtgaaagtctgtgactttggtctctccagattgaaggcaaacacatttctgtcttccaagactgcagcagggactcctgagtggatggcaccagaagttctacgagacgagccctcaaatgagaagtctgatgtttacagcttcggtgtaatcttatgggagcttatgacattgcagcagccatggagtaatttaaatccagctcaggtcgttgcagcggttggtttcaagggacaaaggcttgagatcccaagcagcgttgatccgaaagtggcggcagtaatcgagtcctgctgggtcagggagccctggagacgaccctcttttgccagtatcatggaatccctgaaacttctcatcaagacattaccacccaatcagctcctcgaagaaaattagttaccacccaagcaacttgcaaattatgtcacctctagagttttctcgatttgtttagatccgatatgcgccaggcctctcaaaccattcgtcttcggcgccacgtattccctgatgagaaatattcaaaactacacctgtcacaaaaggggaaaaactatggttggacaataagattcatgaaaaaaatatgtgatccaaattaagtgtacatctcttttatcaaggaaccaaatgtaagttggtcaaatatatacatataagtactaatatttatggaatatatacttttacaataaaattattaaagatataaatatcgatgctattttcca

SEQ ID NO: 54831 - DNA, 2606 bp, Zea Mays
aataacccagaaataaaaatcgccgtggaggcgagtcgccgccggcaccgcccggcacggccttcttctccggcgaaggcggagctcgttacggggattccacatccgttaatcggtcccaccggatccctcgccgcctcccacgggccgggccgcgccgtggcgcgcgcgcaggccgagatgcggaagaggatggagagcgacgacgatctgatcgaggaggcaaaactgcgcaccgtctggtacaagggcgacgcggaccgcgcaccgagcagcagcagcaagagctgggcgcagcaggcggaggaggcctacaacctccagctcgccctcgcgctccgcctctgctccgaggcctccgccgctgcggaccccaacttcctcgactcctccatcgctgccgccgaccacctccagcccattgcatcgcctcaatccctctcccaccgcttctgggtcaatggctgcttgtcctactccgacaaggtctcggatggtttctacttcatccaggggatggatcccttcatatggacgctctgcaacgatttgcacgacggaggccgcgtccccactattgagtccctcaaggctgtcaatcccaccgattctgccatcgaggtggtcatcgtagataaagtggcggactatgacctgaggcagctgataagcatggccattgacgtttctctgaaccgtaccgactccaaggagatcgccactcgactcgctgccgttgtgtccacgaagatggggggatcggtagcagctaccgaggaacacgagttgggtccccggtggagagactctgttgggttcctgaagattagctcagggtctgttgtacttcccatcggaaagttatcagttggcttttgttgccaccgagcattactgttcaagaccctggcggattccatcaatctgccctgtcgcattgtgaagggatgcaagtactgcaaagctggtgctgccacttcttgcttggtgcgctttggtcatgacagggaatgtctaattgatttaattgggaacccgggattcttatctgaacctgactccctcttgaatggactatcatccatctctgtttcttcaccattgcgcccaccaaaacatgactcagctgataattctgataatttcaagttgtttgccaagaaatatttccttgattgtcagtcgttaaatctcatgttcagtgatccagcagctggaacggttatcgacttagatgaggttatgggatcaaatctaggtctaaactcatcacatgcaacaaacagtgattgtcaagctacctttactcatcttaaggctggtactcgacgcagtagtcaagatgggagttttataatgcagaggagttcccaagaggatactcaatctggactaagtgatccctttagcgatatgtcccttgagatagaagacttgattatcccatggagtgagcttgttctgaaagagaaaattggtgcaggttcttttggtactgtgcaccgtgcggattggaatggttcggatgtcgcagtaaaaattctaatggagcaggacttccatccagagcgtctcaaagaatttttgagagaggttgcaattatgagaagtttgcgacatccgaacattgttcttcttatgggtgctgtcactcagccacctaacctttcaattgtgactgaatacctatcaagaggtagcttatacagacttttacacaggcatgctgcaagggaaaatctggaggagcgccgccgcttgagtatggctttcgacgtggcaaaagggatgaactatcttcataagcgtaatcctccaatagtccaccgggatcttaagtcaccaaacctgttggttgacaaaaagtacactgtgaaagtctgtgactttggtctctccagattgaaggcaaacacatttctgtcttccaagactgcagcagggactcctgagtggatggcaccagaagttctacgagacgagccctcaaatgagaagtctgatgtttacagcttcggtgtaatcttatgggagcttatgacattgcagcagccatggagtaatttaaatccagctcaggtcgttgcagcggttggtttcaagggacaaaggcttgagatcccaagcagcgttgatccgaaagtggcggcagtaatcgagtcctgctgggtcagggagccctggagacgaccctcttttgccagtatcatggaatccctgaaacttctcatcaagacattaccacccaatcagctcctcgaagaaaattagttaccacccaagcaacttgcaaattatgtcacctctagagttttctcgatttgtttagatccgatatgcgccaggcctctcaaaccattcgtcttcggcgccacgtattccctgatgagaaatattcaaaactacacctgtcacaaaaggggaaaaactatggttggacaataagattcatgaaaaaaatatgtgatccaaattaagtgtacatctcttttatcaaggaaccaaatgtaagttggtcaaatatatacatataagtactaatatttatggaatatatacttttacaataaaattattaaagatataaatatcgatgctattttcca

SEQ ID NO: 54832 - DNA, 2433 bp, Zea Mays
aataacccagaaataaaaatcgccgtggaggcgagtcgccgccggcaccgcccggcacggccttcttctccggcgaaggcggagctcgttacggggattccacatccgttaatcggtcccaccggatccctcgccgcctcccacgggccgggccgcgccgtggcgcgcgcgcaggccgagatgcggaagaggatggagagcgacgacgatctgatcgaggaggcaaaactgcgcaccgtctggtgggcgctctgcatcttcgccgtctcctacttcctcacgcgtcaatggctgcttgtcctactccgacaaggtctcggatggtttctacttcatccaggggatggatcccttcatatggacgctctgcaacgatttgcacgacggaggccgcgtccccactattgagtccctcaaggctgtcaatcccaccgattctgccatcgaggtggtcatcgtagataaagtggcggactatgacctgaggcagctgataagcatggccattgacgtttctctgaaccgtaccgactccaaggagatcgccactcgactcgctgccgttgtgtccacgaagatggggggatcggtagcagctaccgaggaacacgagttgggtccccggtggagagactctgttgggttcctgaagattagctcagggtctgttgtacttcccatcggaaagttatcagttggcttttgttgccaccgagcattactgttcaagaccctggcggattccatcaatctgccctgtcgcattgtgaagggatgcaagtactgcaaagctggtgctgccacttcttgcttggtgcgctttggtcatgacagggaatgtctaattgatttaattgggaacccgggattcttatctgaacctgactccctcttgaatggactatcatccatctctgtttcttcaccattgcgcccaccaaaacatgactcagctgataattctgataatttcaagttgtttgccaagaaatatttccttgattgtcagtcgttaaatctcatgttcagtgatccagcagctggaacggttatcgacttagatgaggttatgggatcaaatctaggtctaaactcatcacatgcaacaaacagtgattgtcaagctacctttactcatcttaaggctggtactcgacgcagtagtcaagatgggagttttataatgcagaggagttcccaagaggatactcaatctggactaagtgatccctttagcgatatgtcccttgagatagaagacttgattatcccatggagtgagcttgttctgaaagagaaaattggtgcaggttcttttggtactgtgcaccgtgcggattggaatggttcggatgtcgcagtaaaaattctaatggagcaggacttccatccagagcgtctcaaagaatttttgagagaggttgcaattatgagaagtttgcgacatccgaacattgttcttcttatgggtgctgtcactcagccacctaacctttcaattgtgactgaatacctatcaagaggtagcttatacagacttttacacaggcatgctgcaagggaaaatctggaggagcgccgccgcttgagtatggctttcgacgtggcaaaagggatgaactatcttcataagcgtaatcctccaatagtccaccgggatcttaagtcaccaaacctgttggttgacaaaaagtacactgtgaaagtctgtgactttggtctctccagattgaaggcaaacacatttctgtcttccaagactgcagcagggactcctgagtggatggcaccagaagttctacgagacgagccctcaaatgagaagtctgatgtttacagcttcggtgtaatcttatgggagcttatgacattgcagcagccatggagtaatttaaatccagctcaggtcgttgcagcggttggtttcaagggacaaaggcttgagatcccaagcagcgttgatccgaaagtggcggcagtaatcgagtcctgctgggtcagggagccctggagacgaccctcttttgccagtatcatggaatccctgaaacttctcatcaagacattaccacccaatcagctcctcgaagaaaattagttaccacccaagcaacttgcaaattatgtcacctctagagttttctcgatttgtttagatccgatatgcgccaggcctctcaaaccattcgtcttcggcgccacgtattccctgatgagaaatattcaaaactacacctgtcacaaaaggggaaaaactatggttggacaataagattcatgaaaaaaatatgtgatccaaattaagtgtacatctcttttatcaaggaaccaaatgtaagttggtcaaatatatacatataagtactaatatttatggaatatatacttttacaataaaattattaaagatataaatatcgatgctattttcca

SEQ ID NO: 54833 - DNA, 1777 bp, Zea Mays
aataacccagaaataaaaatcgccgtggaggcgagtcgccgccggcaccgcccggcacggccttcttctccggcgaaggcggagctcgttacggggattccacatccgttaatcggtcccaccggatccctcgccgcctcccacgggccgggccgcgccgtggcgcgcgcgcaggccgagatgcggaagaggatggagagcgacgacgatctgatcgaggaggcaaaactgcgcaccgtctggtgggcgctctgcatcttcgccgtctcctacttcctcacgcaccctggcggattccatcaatctgccctgtcgcattgtgaagggatgcaagtactgcaaagctggtgctgccacttcttgcttggtgcgctttggtcatgacaggaacggttatcgacttagatgaggttatgggatcaaatctaggtctaaactcatcacatgcaacaaacagtgattgtcaagctacctttactcatcttaaggctggtactcgacgcagtagtcaagatgggagttttataatgcagaggagttcccaagaggatactcaatctggactaagtgatccctttagcgatatgtcccttgagatagaagacttgattatcccatggagtgagcttgttctgaaagagaaaattggtgcaggttcttttggtactgtgcaccgtgcggattggaatggttcggatgtcgcagtaaaaattctaatggagcaggacttccatccagagcgtctcaaagaatttttgagagaggttgcaattatgagaagtttgcgacatccgaacattgttcttcttatgggtgctgtcactcagccacctaacctttcaattgtgactgaatacctatcaagaggtagcttatacagacttttacacaggcatgctgcaagggaaaatctggaggagcgccgccgcttgagtatggctttcgacgtggcaaaagggatgaactatcttcataagcgtaatcctccaatagtccaccgggatcttaagtcaccaaacctgttggttgacaaaaagtacactgtgaaagtctgtgactttggtctctccagattgaaggcaaacacatttctgtcttccaagactgcagcagggactcctgagtggatggcaccagaagttctacgagacgagccctcaaatgagaagtctgatgtttacagcttcggtgtaatcttatgggagcttatgacattgcagcagccatggagtaatttaaatccagctcaggtcgttgcagcggttggtttcaagggacaaaggcttgagatcccaagcagcgttgatccgaaagtggcggcagtaatcgagtcctgctgggtcagggagccctggagacgaccctcttttgccagtatcatggaatccctgaaacttctcatcaagacattaccacccaatcagctcctcgaagaaaattagttaccacccaagcaacttgcaaattatgtcacctctagagttttctcgatttgtttagatccgatatgcgccaggcctctcaaaccattcgtcttcggcgccacgtattccctgatgagaaatattcaaaactacacctgtcacaaaaggggaaaaactatggttggacaataagattcatgaaaaaaatatgtgatccaaattaagtgtacatctcttttatcaaggaaccaaatgtaagttggtcaaatatatacatataagtactaatatttatggaatatatacttttacaataaaattattaaagatataaatatcgatgctattttcca

SEQ ID NO: 54834 - DNA, 2419 bp, Zea Mays
aataacccagaaataaaaatcgccgtggaggcgagtcgccgccggcaccgcccggcacggccttcttctccggcgaaggcggagctcgttacggggattccacatccgttaatcggtcccaccggatccctcgccgcctcccacgggccgggccgcgccgtggcgcgcgcgcaggccgagatgcggaagaggatggagagcgacgacgatctgatcgaggaggcaaaactgcgcaccgtctggtgggcgctctgcatcttcgccgtctcctacttcctcacgcgtcaatggctgcttgtcctactccgacaaggtctcggatggtttctacttcatccaggggatggatcccttcatatggacgctctgcaacgatttgcacgacggaggccgcgtccccactattgagtccctcaaggctgtcaatcccaccgattctgccatcgaggtggtcatcgtagataaagtggcggactatgacctgaggcagctgataagcatggccattgacgtttctctgaaccgtaccgactccaaggagatcgccactcgactcgctgccgttgtgtccacgaagatgggctaccgaggaacacgagttgggtccccggtggagagactctgttgggttcctgaagattagctcagggtctgttgtacttcccatcggaaagttatcagttggcttttgttgccaccgagcattactgttcaagaccctggcggattccatcaatctgccctgtcgcattgtgaagggatgcaagtactgcaaagctggtgctgccacttcttgcttggtgcgctttggtcatgacagggaatgtctaattgatttaattgggaacccgggattcttatctgaacctgactccctcttgaatggactatcatccatctctgtttcttcaccattgcgcccaccaaaacatgactcagctgataattctgataatttcaagttgtttgccaagaaatatttccttgattgtcagtcgttaaatctcatgttcagtgatccagcagctggaacggttatcgacttagatgaggttatgggatcaaatctaggtctaaactcatcacatgcaacaaacagtgattgtcaagctacctttactcatcttaaggctggtactcgacgcagtagtcaagatgggagttttataatgcagaggagttcccaagaggatactcaatctggactaagtgatccctttagcgatatgtcccttgagatagaagacttgattatcccatggagtgagcttgttctgaaagagaaaattggtgcaggttcttttggtactgtgcaccgtgcggattggaatggttcggatgtcgcagtaaaaattctaatggagcaggacttccatccagagcgtctcaaagaatttttgagagaggttgcaattatgagaagtttgcgacatccgaacattgttcttcttatgggtgctgtcactcagccacctaacctttcaattgtgactgaatacctatcaagaggtagcttatacagacttttacacaggcatgctgcaagggaaaatctggaggagcgccgccgcttgagtatggctttcgacgtggcaaaagggatgaactatcttcataagcgtaatcctccaatagtccaccgggatcttaagtcaccaaacctgttggttgacaaaaagtacactgtgaaagtctgtgactttggtctctccagattgaaggcaaacacatttctgtcttccaagactgcagcagggactcctgagtggatggcaccagaagttctacgagacgagccctcaaatgagaagtctgatgtttacagcttcggtgtaatcttatgggagcttatgacattgcagcagccatggagtaatttaaatccagctcaggtcgttgcagcggttggtttcaagggacaaaggcttgagatcccaagcagcgttgatccgaaagtggcggcagtaatcgagtcctgctgggtcagggagccctggagacgaccctcttttgccagtatcatggaatccctgaaacttctcatcaagacattaccacccaatcagctcctcgaagaaaattagttaccacccaagcaacttgcaaattatgtcacctctagagttttctcgatttgtttagatccgatatgcgccaggcctctcaaaccattcgtcttcggcgccacgtattccctgatgagaaatattcaaaactacacctgtcacaaaaggggaaaaactatggttggacaataagattcatgaaaaaaatatgtgatccaaattaagtgtacatctcttttatcaaggaaccaaatgtaagttggtcaaatatatacatataagtactaatatttatggaatatatacttttacaataaaattattaaagatataaatatcgatgctattttcca

SEQ ID NO: 54835 - DNA, 4962 bp, Zea Mays
ctcacttccatcttcatccatttcgtcaaagaacttcaggttggggagatgggaggaaaaacaacagatacatagtcatattgttgttaaacaccaaccccaatcagatggcatgaattaactatatcagtaccttagagagttgaatagaagtggttgaattccgccgtaatcaagcaccatttcaggtcgacgcacaaagagcacgagctcacctgaagttccgcgggcggagagcacataggtgatagatgatgatccatatacacacaatctactgagtgacattatgcctgctgatcttgagttgtcacctactgacaagcatatctttattgaggagataatgtcaaatttactgtattattatggcatgggtaatgtcgtgaaggatattttgttgcaacgctactttggaaagggagtacgtggaggctcagttgaacctgaatcagatattgtgcaggcttgtagaagctttctaaatcaacggcagtgcattaatgtgtggcgatttatccaaactatcaatgagagaaaagacttgacagagaacctgaagcagctacagtgcaggacacttatttttgttggtgagaattcccagttccatgctgaagctgtgcacatgactgcaaagcttgataggcgatatagcgctcttgtggaggtacaagcttgtggctcggttgtgacagaggagcaaccacacgcaatgctgataccaatggagtactttctcatgggatatggactgtacaggccaagccagataaactgtagccctcgtagccctctgaatccgttttgtatatcaccagagctcctctctcctgagagcatgggggttaagctaaagccaatcaagacacgagccaaccttaaagcataggaataggtgatgagaatgcgtaggaactgatgcgcatcccttgatttttttgtgctgaagtgacatagctgttgtttccgtgatgtacataagacaagaggttagtcgggttagggttcggtgggtcgtcgattccattgatttctagactttaaaacagttgtacattgtcacagatttatttgttgaagggagaagaaataataaggggagatgagatgttgccaaaagttagttcctctacgtttccattttatcttgtaagttagactggcgaatcattgcggctttctaaataagttctgatggcagtcaattgttgcagaagcttctctcgtgttagcatggataatatatcttgtgaatcatttctattctcattttatatatctatgctttccattcctacttttgcaaataatcttctatctgtttgctggtaaatttgtttttccaattcaaaatatcttgtgactcatttatattgagcatgtgtttacaaataatgttctcatcggctcatgtggtcttttaagccctgcctctacatggacttcggcctcgcttccgctgtcaccacgctctggacctgcaccgatgtcacgcacctcgcgcacgtgctcctgcagttccgcctcgcctggtgcggcaagctaatccgttatacccgcgccgtcgccacacactacgtctgctccgtcaagggcctctgctttgacctcttcatcattagaggtggaaacagagctttcaatgcatgctagaggtgcacgatgtgatcaatattatccatgcttgataaatgatgacaatggtgatggtcatgatatatggtcaacattgtattgatctttttccgagttttaggctatcatgttgtttgctggaatggagatatttcattgttcacttggttcttgtgatagagacatagagttaattaccttatttcggtgctttcttagtaccttttctgatatttgagttgtaaataatacttccccaattgtgctgtcattataactcaatgacattattaaaatcatatatagaaatcaatatgttactaatggttgcaatgtaatggtgaaataactagcttaaaataacaaaatttatatatgggtaggatcacaatggattctgaaacattttctcataacaatataacacacatttgtacataagttgtcgtattattatacgtttccattgcaacgcacggacactcatctagttagtcccacaaccgtggcctcttctctgtttcccattccccctcttctttgttctgtgcctcgtttcccattcccatatcttctgtgcctcgtttcccattcccatatcttctctgctgccattcccattcccatgtatcgtctgacaggtgggtcccacaaccatggcctcttctctgtttcccattcccatacctctgtgccgcgtttcccattcccataccttctctgtttcgctccgcgtatatgaccaaattttaccaaaaaagttatctgtgtggggtcacagccataaccaactaagactacacaagttgtatacgcactgcaacttataagaggtgtgtacgcagtttagtggccgatgtggtactaagtttagcttgcaaatacgaagcacacgcgtcctgagaggcccatctgcttgttatggcccagaccaagtaccagtattgtagcaaccgctctctcccgggtcagcgcctcagcggactcccccctccggccctcccccaatccccacccccgctcgtcgtctcccccgtccgtctccatgacctcctcctccagctctccctgctaccgcgtgacgaaaccgcccatacaacaaccgtgctgccgctacaacctcactctgcatagcgcgaactatgactccatcaagccgaccatggacgaggaggaagagcgcgagatcgggcctgggcagcacggacatcacgtgttccaagtgcgcgacggcgagggacctgctctgctccaaccgggtcatcgcgtcgtcctagacatgtccctcaggccgcgaatgcttgctagggtagcagaggcgcggttgggtttgctaatcgctattctgatgctgattccaggactgccaaagatggacagagcgcaaaatttgtccaggatcgatgaggcaaaggggatcattgataagatgaaggttaagttcccagataaaattgagggatggaaggaggtgaaggaagtgggcgagctaaggggcgcgcgagaggacgtcaggtagatgctcaaggccacctcctgccatcccatcttggtatggtagttctttctgctcatgccgaggctccctacggttggagcgtgcaagtgattctactgtgtgatgttgtttattcatcgtttcatctagccacccagggtttatgcatctctacaaagtgtctcatgtctcgtgcaattgatgaactaatactccgcaatcttttgtattgggtaatttaggaacttgtataatttagttggtcgtttgtttactcagctgaccacacatcagtttatgcaacaaaaataggtttgggaaatgtgttagtgccccagctgcactatttctctttgtttatgctaaatcaatttagggccttttgctttactattctcctctttatgatccagcatcagccactattttattggaactttctgcagacttcaaaacaaggaggcttccccaatattcagtctacgcaacatgttcccagtacaagcatttcatcgggtcttcctctcccacaacaattgcctgtatactctcagccaactctgccccttgggccttttaccagcctggttggctatccatatttgcctcagaactattacttaccttcatcgccattccagcaagcgtactcaagtaatgggcctttccatcaatctgctgctcctgccatgcctggagctggtatgaagtatccgatgccacaatacaagagcagccctcctgcttcgaccctaccacaaccatcatcactctctggttacggagggttcggaagtgcaaataatatccctagaaatttcagccaaaatcagggtgctgccgctgcacccacaactttgggattcgatgaagctttaggcacacaattcaaacaccccaatcattatgcagcactacagcagagtgataattcagcaatgtggcttcatggaggcgctggttcaagaacaatttctgcagttccgcctggtaacttctatggtttccagggccaaagtaagcatggtggcttccgccaggcacatcatccatctcagtacggtggtcttgggtacccaagcttctaccagtcgcagaccagtctgccacaggagcacccccagagccccactgagggaagcttgaacaatccctacggggtaccatcccagccttcacaccagctctggcagcacatatactaaaccttatgtgctctcctgggagatgcctctacgctgccaggctacctgcaagtcttcttggcacgcagcgccgtgaagagagcagactagctaaacccaacagcaatgaagtgtgttgtttttctttctttctttttttctccagctgtgtgttctggaactaaattaggctgtcgtggtttttactttatagtgagtggtgttgcagtcttgcagaggtgctatcttgtaacggtaaagtcctaactcatctaacatatctgcttttcatacccctgtaatgtgacattttgttcttgatgcctagaagcttctacgtgttgtagctactttagtaagggtgataagaatgttcatcttctgcctatgggatgcatgtgatggttgactctctaatggaaaataccactatattattgcttaatcagattagcatgctggctgcattagttgtacctctataattaaatgactgatggtatctacagaagcagtaaactatcctttgctgaatcttgcatttatctgatgattcactcacctccaaggctccttgctgcatcttttaggctaccagcaaagtactgccgaagaatctgcaaactaacggtcttctcggcc

SEQ ID NO: 54836 - DNA, 1791 bp, Zea Mays
aatagaagtcgttttctggggggagctccatcgtcgggaagaggggtcatggctcaccacggacaaaaggttcgtgatttccatcaccacgctcccacagagatgctaataacgaagctgtcccaattagacggcacactgagcttgcacagtcaggattttgacagctgttgtcaacgaaggcgagaatggtgtactctaagctcagcaatttccagaaaaaatcgttaacttgcaagttagtttcaatatttctagcatattccaatcacagcatcgtccagcgcacacccatccaatttaggggcttcttgttgtgctctcaggccccagtaagaactccaatccctagatctcttttcgtgtgttaagttgtgcttaagaactgctgatgcagacattaggttagggcaaggattttggttaattggaataaggcagcgctttaaccttagttcctcagtttcagctttaacatgtgttgtctccatagtatatgctctgattaacatggcggagaggatttgtgaggtgaattacttgtaagatgttatctaagtggggggacagggaaagggaactgtggctccattgaggatgatagtgttatgaatttcttctcctactttagagctctgttctatattgttcttcggtaaatcggttgttgcattacttataaggtatgcctaatttactgttcttggttaggcaccatagatcctgtcattgtttgagtgcagtaaaccatgtaaattctctcttataagttgtccttttaattatactaataatcgattgtccaaatttgtttagacaccatattattttgtcattatttgagtacagaaagaagtaaactctcttacttataaatgtgctaataattctctatctaaatttaggcacttgaaatataccaactcgcatataagatataaattatattaacgatgccacgccaaatgtgtacttccctaggtcgaaaagcaaggtcctgtcatcacaaactcctagcaaatttagcgatatgtcatgagaacaagacaggacaacattacagcctcagaggttagaggaatgtgtttggggtgagtaatttttttgtgttgtttcctctatccatggccatggaggagcaaaggaggccacctagctcgaagatagcgccagtgtccatgaaggcgtcctctgcaaatgcgacgcttcaaggcatgaagaacagaagccattttcgaagggacaggaaaactgcgctgcaacaagacgtgtggacaagctgaggaagaagttgtggcacgagaagaacgtccactaagctctaaagcaggcgttctcgaggccgctctgcctcgcctccctattgtctcaagtcaatgtccttctttgcttttcgatcaatttcacaagcaagaagcaacctaaccaataatctattgcccttccgaaggactcgatacactttctgatttctgcctcttctgaattgttcctagacattggagcttctggccccgttgtaagtggaaaatccttgtacttaaaggttgcaatgtagtggccccgttgtaacgcacgggcactcacctagtgtcaataagaagtacaagctcttgtctgctggtaaaagaaaaacatcttgactggacagtgacattaatataataaaaacggtgtttggctgctatggaaaaatgccagccgactttcttttaaaaaaaatatgctagccgatgtatttttgttggactctatggaaagatgtttttcttttaccagcagacaagagct

SEQ ID NO: 54837 - DNA, 2861 bp, Zea Mays
ctcttaaccattgttctttctttctgtctccagcaagatctatgggaggaatacattgatctgatcatgtagtgcatgtgcaatgatacctgtgaaatagaagtcgttttctggggggagctccatcgtcgggaagaggggtcatggctcaccacggacaaaaggttcgtgatttccatcaccacgctcccacaggtagtttatgatcaagctggtgtgggaggctcaccacggacaaaagacggcacactgagcttgcacagtcaggattttgacagctgttgtcaacgaaggcgagaatggtgtactctaagctcagcaatttccagaaaaaatcgttaacttgcaagttagtttcaatatttctagcatattccaatcacagcatcgtccagcgcacacccatccaatttaggggcttcttgttgtgctctcaggccccagtaagaactccaatccctagatctcttttcgtgtgttaagttgtgcttaagaactgctgatgcagacattaggttagggcaaggattttggttaattggaataaggcagcgctttaaccttagttcctcagtttcagctttaacatgtgttgtctccatagtatatgctctgattaacatggcggagaggatttgtgaggtgaattacttgtaagatgttatctaagtggggggacagggaaagggaactgtggctccattgaggatgatagtgttatgaatttcttctcctactttagagctctgttctatattgttcttcggtaaatcggttgttgcattacttataaggtatgcctaatttactgttcttggttaggcaccatagatcctgtcattgtttgagtgcagtaaaccatgtaaattctctcttataagttgtccttttaattatactaataatcgattgtccaaatttgtttagacaccatattattttgtcattatttgagtacagaaagaagtaaactctcttacttataaatgtgctaataattctctatctaaatttaggcacttgaaatataccaactcgcatataagatataaattatattaacgatgccacgccaaatgtgtacttccctaggtcgaaaagcaaggtcctgtcatcacaaactcctagcaaatttagcgatatgtcatgagaacaagacaggacaacattacagcctcagaggtaataaccttcgttttctatttgcttcagccaacttgatttaccagcttatcttcttccactttctgcccatttcctattgattcagtccttctactcagctttggaggttgtctgtttacaaatacggaattgtccccaatactgtttttatgatgttaacaccatgaaccgagtagcagtttatgcccatgagaatgcttcaatgccccatttgggtcttgtgggcaaatgatcggatggtgcataacttcgatgtagcttatttgatcagcttataatggaacgatgggaagactttgatccaccacagcgcttgggatgttgagctgcaatttgaattgacaattatttgacaacaactaaaatacattttttcttgcttctgctcttgcagtctttgtaaattcaggtgtcagtgttggattcaaattacttttaaaaaaatagaggttagcattccactagaatatatggtcacatgtggctacttatttcctgcattcaaaatgtagtcacatgagtagtggtgaactgatgatgccatatgtggctacttatttcttgcattgaaaatgtggagctaaagtgtgtatgttttgttacacaaacgttggtgttgttgtgctccttttgctgaagcactgccttttacggttagcgacactcaatgttcgatcacttgtacaaaacaagatatgtattttcttttgagcaattcttttaaaatatatggggcaatgaagagcttcatattgtgttgaacctcagtctataatatttagttgcaagtgagagttttatacttacgacatgctacattttgttatccttatagttggttagcctattgtagaaggtggttgaacttgtactttgagaccaaatatatattgcatacttgatattatactattatttgagcttgtcttattgtactcttatctgttcttatgaaggttagaggaatgtgtttggggtgagtaatttttttgtgttgtttcctctatccatggccatggaggagcaaaggaggccacctagctcgaagatagcgccagtgtccatgaaggcgtcctctgcaaatgcgacgcttcaaggcatgaagaacagaagccattttcgaagggacaggaaaactgcgctgcaacaagacgtgtggacaagctgaggaagaagttgtggcacgagaagaacgtccactaagctctaaagcaggcgttctcgaggccgctctgcctcgcctccctattgtctcaagtcaatgtccttctttgcttttcgatcaatttcacaagcaagaagcaacctaaccaataatctattgcccttccgaaggactcgatacactttctgatttctgcctcttctgaattgttcctagacattggagcttctggccccgttgtaagtggaaaatccttgtacttaaaggttgcaatgtagtggccccgttgtaacgcacgggcactcacctagtgtcaataagaagtacaagctcttgtctgctggtaaaagaaaaacatcttgactggacagtgacattaatataataaaaacggtgtttggctgctatggaaaaatgccagccgactttcttttaaaaaaaatatgctagccgatgtatttttgttggactctatggaaagatgtttttcttttaccagcagacaagagct

SEQ ID NO: 54838 - DNA, 1878 bp, Zea Mays
ctctcttaaccattgttctttctttctgtctccagcaagatctatgggaggaatacattgatctgatcatgtagtgcatgtgcaatgatacctgtgaaatagaagtcgttttctggggggagctccatcgtcgggaagaggggtcatggctcaccacggacaaaaggtagtttatgatcaagctggtgtgggaggctcaccacggacaaaaggttcgtgatttccatcaccacgctcccacaggattttgacagctgttgtcaacgaaggcgagaatggtgtactctaagctcagcaatttccagaaaaaatcgttaacttgcaagttagtttcaatatttctagcatattccaatcacagcatcgtccagcgcacacccatccaatttaggggcttcttgttgtgctctcaggccccagtaagaactccaatccctagatctcttttcgtgtgttaagttgtgcttaagaactgctgatgcagacattaggttagggcaaggattttggttaattggaataaggcagcgctttaaccttagttcctcagtttcagctttaacatgtgttgtctccatagtatatgctctgattaacatggcggagaggatttgtgaggtgaattacttgtaagatgttatctaagtggggggacagggaaagggaactgtggctccattgaggatgatagtgttatgaatttcttctcctactttagagctctgttctatattgttcttcggtaaatcggttgttgcattacttataaggtatgcctaatttactgttcttggttaggcaccatagatcctgtcattgtttgagtgcagtaaaccatgtaaattctctcttataagttgtccttttaattatactaataatcgattgtccaaatttgtttagacaccatattattttgtcattatttgagtacagaaagaagtaaactctcttacttataaatgtgctaataattctctatctaaatttaggcacttgaaatataccaactcgcatataagatataaattatattaacgatgccacgccaaatgtgtacttccctaggtcgaaaagcaaggtcctgtcatcacaaactcctagcaaatttagcgatatgtcatgagaacaagacaggacaacattacagcctcagaggttagaggaatgtgtttggggtgagtaatttttttgtgttgtttcctctatccatggccatggaggagcaaaggaggccacctagctcgaagatagcgccagtgtccatgaaggcgtcctctgcaaatgcgacgcttcaaggcatgaagaacagaagccattttcgaagggacaggaaaactgcgctgcaacaagacgtgtggacaagctgaggaagaagttgtggcacgagaagaacgtccactaagctctaaagcaggcgttctcgaggccgctctgcctcgcctccctattgtctcaagtcaatgtccttctttgcttttcgatcaatttcacaagcaagaagcaacctaaccaataatctattgcccttccgaaggactcgatacactttctgatttctgcctcttctgaattgttcctagacattggagcttctggccccgttgtaagtggaaaatccttgtacttaaaggttgcaatgtagtggccccgttgtaacgcacgggcactcacctagtgtcaataagaagtacaagctcttgtctgctggtaaaagaaaaacatcttgactggacagtgacattaatataataaaaacggtgtttggctgctatggaaaaatgccagccgactttcttttaaaaaaaatatgctagccgatgtatttttgttggactctatggaaagatgtttttcttttaccagcagacaagagct

SEQ ID NO: 54839 - DNA, 2737 bp, Zea Mays
ctctcttaaccattgttctttctttctgtctccagcaagatctatgggaggaatacattgatctgatcatgtagtgcatgtgcaatgatacctgtgaaatagaagtcgttttctggggggagctccatcgtcgggaagaggggtcatggctcaccacggacaaaaggtagtttatgatcaagctggtgtgggaggctcaccacggacaaaaggttcgtgatttccatcaccacgctcccacagagatgctaataacgaagctgtcccaattagacggcacactgagcttgcacagtcaggtacatgatcccttgtcactgtaccagtttctgtgcttctctctcatgaaaacaactgttgggattatttgtttctgaagatcagtgcatttattagttctctcatgaaacacaacactatgatttaaatgctcacattttgattactgtgtaaacaatgggacatacaagatttttttaggtttttgtagctcattattatagtatgtgttattaatatgatgtagcaggcaacatagtatcctgcgattcctaattagttgatgcctaagggtttttgtagcttatgcaactaagaaaacttcttcaggctagaaaaaaactttgaagtgtgggacatggtgcttagaaagtgtggcaagcatcgaatttacattgatgtagtccatggtgtaggatttttagatggcaaacacatcataatttgtgtttacaattgtttattaggaggcacattgaccattgcttccttccaaaatttatatgttgcagtttacttccttaagaaactaactgaagcattatgaggagctgtagcaaatcgacaatccatctgctattgctaataatcatgctattttggcaatggcaaaatttatatgttgtagactacaacaaacaatgtctatgaagtcgttgacatctggattatattctattagtgctgatctggatcaattcttgtttattaggagacttcaaatgttttctctcccctataaaaacactttgtttcatttgcttataattaactgctgcactgtccatggattgctctctcattctacttcctatgattttaggattttgacagctgttgtcaacgaaggcgagaatggtgtactctaagctcagcaatttccagaaaaaatcgttaacttgcaagttagtttcaatatttctagcatattccaatcacagcatcgtccagcgcacacccatccaatttaggggcttcttgttgtgctctcaggccccagtaagaactccaatccctagatctcttttcgtgtgttaagttgtgcttaagaactgctgatgcagacattaggttagggcaaggattttggttaattggaataaggcagcgctttaaccttagttcctcagtttcagctttaacatgtgttgtctccatagtatatgctctgattaacatggcggagaggatttgtgaggtgaattacttgtaagatgttatctaagtggggggacagggaaagggaactgtggctccattgaggatgatagtgttatgaatttcttctcctactttagagctctgttctatattgttcttcggtaaatcggttgttgcattacttataaggtatgcctaatttactgttcttggttaggcaccatagatcctgtcattgtttgagtgcagtaaaccatgtaaattctctcttataagttgtccttttaattatactaataatcgattgtccaaatttgtttagacaccatattattttgtcattatttgagtacagaaagaagtaaactctcttacttataaatgtgctaataattctctatctaaatttaggcacttgaaatataccaactcgcatataagatataaattatattaacgatgccacgccaaatgtgtacttccctaggtcgaaaagcaaggtcctgtcatcacaaactcctagcaaatttagcgatatgtcatgagaacaagacaggacaacattacagcctcagaggttagaggaatgtgtttggggtgagtaatttttttgtgttgtttcctctatccatggccatggaggagcaaaggaggccacctagctcgaagatagcgccagtgtccatgaaggcgtcctctgcaaatgcgacgcttcaaggcatgaagaacagaagccattttcgaagggacaggaaaactgcgctgcaacaagacgtgtggacaagctgaggaagaagttgtggcacgagaagaacgtccactaagctctaaagcaggcgttctcgaggccgctctgcctcgcctccctattgtctcaagtcaatgtccttctttgcttttcgatcaatttcacaagcaagaagcaacctaaccaataatctattgcccttccgaaggactcgatacactttctgatttctgcctcttctgaattgttcctagacattggagcttctggccccgttgtaagtggaaaatccttgtacttaaaggttgcaatgtagtggccccgttgtaacgcacgggcactcacctagtgtcaataagaagtacaagctcttgtctgctggtaaaagaaaaacatcttgactggacagtgacattaatataataaaaacggtgtttggctgctatggaaaaatgccagccgactttcttttaaaaaaaatatgctagccgatgtatttttgttggactctatggaaagatgtttttcttttaccagcagacaagagct

SEQ ID NO: 54840 - DNA, 1934 bp, Zea Mays
ctctcttaaccattgttctttctttctgtctccagcaagatctatgggaggaatacattgatctgatcatgtagtgcatgtgcaatgatacctgtgaaatagaagtcgttttctggggggagctccatcgtcgggaagaggggtcatggctcaccacggacaaaaggtagtttatgatcaagctggtgtgggaggctcaccacggacaaaaggttcgtgatttccatcaccacgctcccacagagatgctaataacgaagctgtcccaattagacggcacactgagcttgcacagtcaggattttgacagctgttgtcaacgaaggcgagaatggtgtactctaagctcagcaatttccagaaaaaatcgttaacttgcaagttagtttcaatatttctagcatattccaatcacagcatcgtccagcgcacacccatccaatttaggggcttcttgttgtgctctcaggccccagtaagaactccaatccctagatctcttttcgtgtgttaagttgtgcttaagaactgctgatgcagacattaggttagggcaaggattttggttaattggaataaggcagcgctttaaccttagttcctcagtttcagctttaacatgtgttgtctccatagtatatgctctgattaacatggcggagaggatttgtgaggtgaattacttgtaagatgttatctaagtggggggacagggaaagggaactgtggctccattgaggatgatagtgttatgaatttcttctcctactttagagctctgttctatattgttcttcggtaaatcggttgttgcattacttataaggtatgcctaatttactgttcttggttaggcaccatagatcctgtcattgtttgagtgcagtaaaccatgtaaattctctcttataagttgtccttttaattatactaataatcgattgtccaaatttgtttagacaccatattattttgtcattatttgagtacagaaagaagtaaactctcttacttataaatgtgctaataattctctatctaaatttaggcacttgaaatataccaactcgcatataagatataaattatattaacgatgccacgccaaatgtgtacttccctaggtcgaaaagcaaggtcctgtcatcacaaactcctagcaaatttagcgatatgtcatgagaacaagacaggacaacattacagcctcagaggttagaggaatgtgtttggggtgagtaatttttttgtgttgtttcctctatccatggccatggaggagcaaaggaggccacctagctcgaagatagcgccagtgtccatgaaggcgtcctctgcaaatgcgacgcttcaaggcatgaagaacagaagccattttcgaagggacaggaaaactgcgctgcaacaagacgtgtggacaagctgaggaagaagttgtggcacgagaagaacgtccactaagctctaaagcaggcgttctcgaggccgctctgcctcgcctccctattgtctcaagtcaatgtccttctttgcttttcgatcaatttcacaagcaagaagcaacctaaccaataatctattgcccttccgaaggactcgatacactttctgatttctgcctcttctgaattgttcctagacattggagcttctggccccgttgtaagtggaaaatccttgtacttaaaggttgcaatgtagtggccccgttgtaacgcacgggcactcacctagtgtcaataagaagtacaagctcttgtctgctggtaaaagaaaaacatcttgactggacagtgacattaatataataaaaacggtgtttggctgctatggaaaaatgccagccgactttcttttaaaaaaaatatgctagccgatgtatttttgttggactctatggaaagatgtttttcttttaccagcagacaagagct

SEQ ID NO: 54841 - DNA, 3819 bp, Zea Mays
cctctcttaaccattgttctttctttctgtctccagcaagatctatgggaggaatacattgatctgatcatgtagtgcatgtgcaatgatacctgtgaaatagaagtcgttttctggggggagctccatcgtcgggaagaggggtcatggctcaccacggacaaaagtagtttatgatcaagctggtgtgggaggctcaccacggacaaaaggttcgtgatttccatcaccacgctcccacaggttacaattattttcttgaattttccattcgattatatcactttctaaatcccactggttatgtacatgagcaagatttttatacttaaataaatattgcttgctgtttccttggattgtaagagatgctaataacgaagctgtcccaattagacggcacactgagcttgcacagtcaggtacatgatcccttgtcactgtaccagtttctgtgcttctctctcatgaaaacaactgttgggattatttgtttctgaagatcagtgcatttattagttctctcatgaaacacaacactatgatttaaatgctcacattttgattactgtgtaaacaatgggacatacaagatttttttaggtttttgtagctcattattatagtatgtgttattaatatgatgtagcaggcaacatagtatcctgcgattcctaattagttgatgcctaagggtttttgtagcttatgcaactaagaaaacttcttcaggctagaaaaaaactttgaagtgtgggacatggtgcttagaaagtgtggcaagcatcgaatttacattgatgtagtccatggtgtaggatttttagatggcaaacacatcataatttgtgtttacaattgtttattaggaggcacattgaccattgcttccttccaaaatttatatgttgcagtttacttccttaagaaactaactgaagcattatgaggagctgtagcaaatcgacaatccatctgctattgctaataatcatgctattttggcaatggcaaaatttatatgttgtagactacaacaaacaatgtctatgaagtcgttgacatctggattatattctattagtgctgatctggatcaattcttgtttattaggagacttcaaatgttttctctcccctataaaaacactttgtttcatttgcttataattaactgctgcactgtccatggattgctctctcattctacttcctatgattttaggattttgacagctgttgtcaacgaaggcgagaatggtgtactctaagctcagcaatttccagaaaaaatcgttaacttgcaagttagtttcaatatttctagcatattccaatcacagcatcgtccagcgcacacccatccaatttaggggcttcttgttgtgctctcaggccccagtaagaactccaatccctagatctcttttcgtgtgttaagttgtgcttaagaactgctgatgcagacattaggttagggcaaggattttggttaattggaataaggcagcgctttaaccttagttcctcagtttcagctttaacatgtgttgtctccatagtatatgctctgattaacatggcggagaggatttgtgaggtgaattacttgtaagatgttatctaagtggggggacagggaaagggaactgtggctccattgaggatgatagtgttatgaatttcttctcctactttagagctctgttctatattgttcttcggtaaatcggttgttgcattacttataaggtatgcctaatttactgttcttggttaggcaccatagatcctgtcattgtttgagtgcagtaaaccatgtaaattctctcttataagttgtccttttaattatactaataatcgattgtccaaatttgtttagacaccatattattttgtcattatttgagtacagaaagaagtaaactctcttacttataaatgtgctaataattctctatctaaatttaggcacttgaaatataccaactcgcatataagatataaattatattaacgatgccacgccaaatgtgtacttccctaggtcgaaaagcaaggtcctgtcatcacaaactcctagcaaatttagcgatatgtcatgagaacaagacaggacaacattacagcctcagaggtaataaccttcgttttctatttgcttcagccaacttgatttaccagcttatcttcttccactttctgcccatttcctattgattcagtccttctactcagctttggaggttgtctgtttacaaatacggaattgtccccaatactgtttttatgatgttaacaccatgaaccgagtagcagtttatgcccatgagaatgcttcaatgccccatttgggtcttgtgggcaaatgatcggatggtgcataacttcgatgtagcttatttgatcagcttataatggaacgatgggaagactttgatccaccacagcgcttgggatgttgagctgcaatttgaattgacaattatttgacaacaactaaaatacattttttcttgcttctgctcttgcagtctttgtaaattcaggtgtcagtgttggattcaaattacttttaaaaaaatagaggttagcattccactagaatatatggtcacatgtggctacttatttcctgcattcaaaatgtagtcacatgagtagtggtgaactgatgatgccatatgtggctacttatttcttgcattgaaaatgtggagctaaagtgtgtatgttttgttacacaaacgttggtgttgttgtgctccttttgctgaagcactgccttttacggttagcgacactcaatgttcgatcacttgtacaaaacaagatatgtattttcttttgagcaattcttttaaaatatatggggcaatgaagagcttcatattgtgttgaacctcagtctataatatttagttgcaagtgagagttttatacttacgacatgctacattttgttatccttatagttggttagcctattgtagaaggtggttgaacttgtactttgagaccaaatatatattgcatacttgatattatactattatttgagcttgtcttattgtactcttatctgttcttatgaaggttagaggaatgtgtttggggtgagtaatttttttgtgttgtttcctctatccatggccatggaggagcaaaggaggccacctagctcgaagatagcgccagtgtccatgaaggcgtcctctgcaaatgcgacgcttcaaggcatgaagaacagaagccattttcgaagggacaggaaaactgcgctgcaacaagacgtgtggacaagctgaggaagaagttgtggcacgagaagaacgtccactaagctctaaagcaggcgttctcgaggccgctctgcctcgcctccctattgtctcaagtcaatgtccttctttgcttttcgatcaatttcacaagcaagaagcaacctaaccaataatctattgcccttccgaaggactcgatacactttctgatttctgcctcttctgaattgttcctagacattggagcttctggccccgttgtaagtggaaaatccttgtacttaaaggttgcaatgtagtggccccgttgtaacgcacgggcactcacctagtgtcaataagaagtacaagctcttgtctgctggtaaaagaaaaacatcttgactggacagtgacattaatataataaaaacggtgtttggctgctatggaaaaatgccagccgactttcttttaaaaaaaatatgctagccgatgtatttttgttggactctatggaaagatgtttttcttttaccagcagacaagagct

SEQ ID NO: 54842 - DNA, 2083 bp, Zea Mays
gaatcttctctctcgcaagatctatgggaggaatacattgatctgatcatgtagtgcatgtgcaatgatacctgtgaaatagaagtcgttttctggggggagctccatcgtcgggaagaggggtcatggctcaccacggacaaaagcacttcttttgacccgaatacatgaagccatgaaagtaatggttgaggggagggggaagcaagtacctgatgatcttttgggtcaatacgggtagtttatgatcaagctggtgtgggaggctcaccacggacaaaaggttcgtgatttccatcaccacgctcccacaggtcgaaaagcaaggtcctgtcatcacaaactcctagcaaatttagcgatatgtcatgagaacaagacaggacaacattacagcctcagaggtaataaccttcgttttctatttgcttcagccaacttgatttaccagcttatcttcttccactttctgcccatttcctattgattcagtccttctactcagctttggaggttgtctgtttacaaatacggaattgtccccaatactgtttttatgatgttaacaccatgaaccgagtagcagtttatgcccatgagaatgcttcaatgccccatttgggtcttgtgggcaaatgatcggatggtgcataacttcgatgtagcttatttgatcagcttataatggaacgatgggaagactttgatccaccacagcgcttgggatgttgagctgcaatttgaattgacaattatttgacaacaactaaaatacattttttcttgcttctgctcttgcagtctttgtaaattcaggtgtcagtgttggattcaaattacttttaaaaaaatagaggttagcattccactagaatatatggtcacatgtggctacttatttcctgcattcaaaatgtagtcacatgagtagtggtgaactgatgatgccatatgtggctacttatttcttgcattgaaaatgtggagctaaagtgtgtatgttttgttacacaaacgttggtgttgttgtgctccttttgctgaagcactgccttttacggttagcgacactcaatgttcgatcacttgtacaaaacaagatatgtattttcttttgagcaattcttttaaaatatatggggcaatgaagagcttcatattgtgttgaacctcagtctataatatttagttgcaagtgagagttttatacttacgacatgctacattttgttatccttatagttggttagcctattgtagaaggtggttgaacttgtactttgagaccaaatatatattgcatacttgatattatactattatttgagcttgtcttattgtactcttatctgttcttatgaaggttagaggaatgtgtttggggtgagtaatttttttgtgttgtttcctctatccatggccatggaggagcaaaggaggccacctagctcgaagatagcgccagtgtccatgaaggcgtcctctgcaaatgcgacgcttcaaggcatgaagaacagaagccattttcgaagggacaggaaaactgcgctgcaacaagacgtgtggacaagctgaggaagaagttgtggcacgagaagaacgtccactaagctctaaagcaggcgttctcgaggccgctctgcctcgcctccctattgtctcaagtcaatgtccttctttgcttttcgatcaatttcacaagcaagaagcaacctaaccaataatctattgcccttccgaaggactcgatacactttctgatttctgcctcttctgaattgttcctagacattggagcttctggccccgttgtaagtggaaaatccttgtacttaaaggttgcaatgtagtggccccgttgtaacgcacgggcactcacctagtgtcaataagaagtacaagctcttgtctgctggtaaaagaaaaacatcttgactggacagtgacattaatataataaaaacggtgtttggctgctatggaaaaatgccagccgactttcttttaaaaaaaatatgctagccgatgtatttttgttggactctatggaaagatgtttttcttttaccagcagacaagagct

SEQ ID NO: 54843 - DNA, 2877 bp, Zea Mays
gaatcttctctctcgcaagatctatgggaggaatacattgatctgatcatgtagtgcatgtgcaatgatacctgtgaaatagaagtcgttttctggggggagctccatcgtcgggaagaggggtcatggctcaccacggacaaaagcacttcttttgacccgaatacatgaagccatgaaagtaatggttgaggggagggggaagcaagtacctgatgatcttttgggtcaatacgggtagtttatgatcaagctggtgtgggaggctcaccacggacaaaaggattttgacagctgttgtcaacgaaggcgagaatggtgtactctaagctcagcaatttccagaaaaaatcgttaacttgcaagttagtttcaatatttctagcatattccaatcacagcatcgtccagcgcacacccatccaatttaggggcttcttgttgtgctctcaggccccagtaagaactccaatccctagatctcttttcgtgtgttaagttgtgcttaagaactgctgatgcagacattaggttagggcaaggattttggttaattggaataaggcagcgctttaaccttagttcctcagtttcagctttaacatgtgttgtctccatagtatatgctctgattaacatggcggagaggatttgtgaggtgaattacttgtaagatgttatctaagtggggggacagggaaagggaactgtggctccattgaggatgatagtgttatgaatttcttctcctactttagagctctgttctatattgttcttcggtaaatcggttgttgcattacttataaggtatgcctaatttactgttcttggttaggcaccatagatcctgtcattgtttgagtgcagtaaaccatgtaaattctctcttataagttgtccttttaattatactaataatcgattgtccaaatttgtttagacaccatattattttgtcattatttgagtacagaaagaagtaaactctcttacttataaatgtgctaataattctctatctaaatttaggcacttgaaatataccaactcgcatataagatataaattatattaacgatgccacgccaaatgtgtacttccctaggtcgaaaagcaaggtcctgtcatcacaaactcctagcaaatttagcgatatgtcatgagaacaagacaggacaacattacagcctcagaggtaataaccttcgttttctatttgcttcagccaacttgatttaccagcttatcttcttccactttctgcccatttcctattgattcagtccttctactcagctttggaggttgtctgtttacaaatacggaattgtccccaatactgtttttatgatgttaacaccatgaaccgagtagcagtttatgcccatgagaatgcttcaatgccccatttgggtcttgtgggcaaatgatcggatggtgcataacttcgatgtagcttatttgatcagcttataatggaacgatgggaagactttgatccaccacagcgcttgggatgttgagctgcaatttgaattgacaattatttgacaacaactaaaatacattttttcttgcttctgctcttgcagtctttgtaaattcaggtgtcagtgttggattcaaattacttttaaaaaaatagaggttagcattccactagaatatatggtcacatgtggctacttatttcctgcattcaaaatgtagtcacatgagtagtggtgaactgatgatgccatatgtggctacttatttcttgcattgaaaatgtggagctaaagtgtgtatgttttgttacacaaacgttggtgttgttgtgctccttttgctgaagcactgccttttacggttagcgacactcaatgttcgatcacttgtacaaaacaagatatgtattttcttttgagcaattcttttaaaatatatggggcaatgaagagcttcatattgtgttgaacctcagtctataatatttagttgcaagtgagagttttatacttacgacatgctacattttgttatccttatagttggttagcctattgtagaaggtggttgaacttgtactttgagaccaaatatatattgcatacttgatattatactattatttgagcttgtcttattgtactcttatctgttcttatgaaggttagaggaatgtgtttggggtgagtaatttttttgtgttgtttcctctatccatggccatggaggagcaaaggaggccacctagctcgaagatagcgccagtgtccatgaaggcgtcctctgcaaatgcgacgcttcaaggcatgaagaacagaagccattttcgaagggacaggaaaactgcgctgcaacaagacgtgtggacaagctgaggaagaagttgtggcacgagaagaacgtccactaagctctaaagcaggcgttctcgaggccgctctgcctcgcctccctattgtctcaagtcaatgtccttctttgcttttcgatcaatttcacaagcaagaagcaacctaaccaataatctattgcccttccgaaggactcgatacactttctgatttctgcctcttctgaattgttcctagacattggagcttctggccccgttgtaagtggaaaatccttgtacttaaaggttgcaatgtagtggccccgttgtaacgcacgggcactcacctagtgtcaataagaagtacaagctcttgtctgctggtaaaagaaaaacatcttgactggacagtgacattaatataataaaaacggtgtttggctgctatggaaaaatgccagccgactttcttttaaaaaaaatatgctagccgatgtatttttgttggactctatggaaagatgtttttcttttaccagcagacaagagct

SEQ ID NO: 54844 - DNA, 2254 bp, Zea Mays
gaatcttctctctcgcaagatctatgggaggaatacattgatctgatcatgtagtgcatgtgcaatgatacctgtgaaatagaagtcgttttctggggggagctccatcgtcgggaagaggggtcatggctcaccacggacaaaagcacttcttttgacccgaatacatgaagccatgaaagtaatggttgaggggagggggaagcaagtacctgatgatcttttgggtcaatacgggtagtttatgatcaagctggtgtgggaggctcaccacggacaaaagacggcacactgagcttgcacagtcaggattttgacagctgttgtcaacgaaggcgagaatggtgtactctaagctcagcaatttccagaaaaaatcgttaacttgcaagttagtttcaatatttctagcatattccaatcacagcatcgtccagcgcacacccatccaatttaggggcttcttgttgtgctctcaggccccagtcgaaaagcaaggtcctgtcatcacaaactcctagcaaatttagcgatatgtcatgagaacaagacaggacaacattacagcctcagaggtaataaccttcgttttctatttgcttcagccaacttgatttaccagcttatcttcttccactttctgcccatttcctattgattcagtccttctactcagctttggaggttgtctgtttacaaatacggaattgtccccaatactgtttttatgatgttaacaccatgaaccgagtagcagtttatgcccatgagaatgcttcaatgccccatttgggtcttgtgggcaaatgatcggatggtgcataacttcgatgtagcttatttgatcagcttataatggaacgatgggaagactttgatccaccacagcgcttgggatgttgagctgcaatttgaattgacaattatttgacaacaactaaaatacattttttcttgcttctgctcttgcagtctttgtaaattcaggtgtcagtgttggattcaaattacttttaaaaaaatagaggttagcattccactagaatatatggtcacatgtggctacttatttcctgcattcaaaatgtagtcacatgagtagtggtgaactgatgatgccatatgtggctacttatttcttgcattgaaaatgtggagctaaagtgtgtatgttttgttacacaaacgttggtgttgttgtgctccttttgctgaagcactgccttttacggttagcgacactcaatgttcgatcacttgtacaaaacaagatatgtattttcttttgagcaattcttttaaaatatatggggcaatgaagagcttcatattgtgttgaacctcagtctataatatttagttgcaagtgagagttttatacttacgacatgctacattttgttatccttatagttggttagcctattgtagaaggtggttgaacttgtactttgagaccaaatatatattgcatacttgatattatactattatttgagcttgtcttattgtactcttatctgttcttatgaaggttagaggaatgtgtttggggtgagtaatttttttgtgttgtttcctctatccatggccatggaggagcaaaggaggccacctagctcgaagatagcgccagtgtccatgaaggcgtcctctgcaaatgcgacgcttcaaggcatgaagaacagaagccattttcgaagggacaggaaaactgcgctgcaacaagacgtgtggacaagctgaggaagaagttgtggcacgagaagaacgtccactaagctctaaagcaggcgttctcgaggccgctctgcctcgcctccctattgtctcaagtcaatgtccttctttgcttttcgatcaatttcacaagcaagaagcaacctaaccaataatctattgcccttccgaaggactcgatacactttctgatttctgcctcttctgaattgttcctagacattggagcttctggccccgttgtaagtggaaaatccttgtacttaaaggttgcaatgtagtggccccgttgtaacgcacgggcactcacctagtgtcaataagaagtacaagctcttgtctgctggtaaaagaaaaacatcttgactggacagtgacattaatataataaaaacggtgtttggctgctatggaaaaatgccagccgactttcttttaaaaaaaatatgctagccgatgtatttttgttggactctatggaaagatgtttttcttttaccagcagacaagagct

SEQ ID NO: 54845 - DNA, 1946 bp, Zea Mays
gtcgccttccgcatggacaacattcgcgacgagatgctacaactacactcatgacagcttcaatagcatatctgcattttttcctcgtcctcagaatcttctctctcgcaagatctatgggaggaatacattgatctgatcatgtagtgcatgtgcaatgatacctgtgaaatagaagtcgttttctggggggagctccatcgtcgggaagaggggtcatggctcaccacggacaaaaggtagtttatgatcaagctggtgtgggaggctcaccacggacaaaagacggcacactgagcttgcacagtcaggattttgacagctgttgtcaacgaaggcgagaatggtgtactctaagctcagcaatttccagaaaaaatcgttaacttgcaagttagtttcaatatttctagcatattccaatcacagcatcgtccagcgcacacccatccaatttaggggcttcttgttgtgctctcaggccccagtaagaactccaatccctagatctcttttcgtgtgttaagttgtgcttaagaactgctgatgcagacattaggttagggcaaggattttggttaattggaataaggcagcgctttaaccttagttcctcagtttcagctttaacatgtgttgtctccatagtatatgctctgattaacatggcggagaggatttgtgaggtgaattacttgtaagatgttatctaagtggggggacagggaaagggaactgtggctccattgaggatgatagtgttatgaatttcttctcctactttagagctctgttctatattgttcttcggtaaatcggttgttgcattacttataaggtatgcctaatttactgttcttggttaggcaccatagatcctgtcattgtttgagtgcagtaaaccatgtaaattctctcttataagttgtccttttaattatactaataatcgattgtccaaatttgtttagacaccatattattttgtcattatttgagtacagaaagaagtaaactctcttacttataaatgtgctaataattctctatctaaatttaggcacttgaaatataccaactcgcatataagatataaattatattaacgatgccacgccaaatgtgtacttccctaggtcgaaaagcaaggtcctgtcatcacaaactcctagcaaatttagcgatatgtcatgagaacaagacaggacaacattacagcctcagaggttagaggaatgtgtttggggtgagtaatttttttgtgttgtttcctctatccatggccatggaggagcaaaggaggccacctagctcgaagatagcgccagtgtccatgaaggcgtcctctgcaaatgcgacgcttcaaggcatgaagaacagaagccattttcgaagggacaggaaaactgcgctgcaacaagacgtgtggacaagctgaggaagaagttgtggcacgagaagaacgtccactaagctctaaagcaggcgttctcgaggccgctctgcctcgcctccctattgtctcaagtcaatgtccttctttgcttttcgatcaatttcacaagcaagaagcaacctaaccaataatctattgcccttccgaaggactcgatacactttctgatttctgcctcttctgaattgttcctagacattggagcttctggccccgttgtaagtggaaaatccttgtacttaaaggttgcaatgtagtggccccgttgtaacgcacgggcactcacctagtgtcaataagaagtacaagctcttgtctgctggtaaaagaaaaacatcttgactggacagtgacattaatataataaaaacggtgtttggctgctatggaaaaatgccagccgactttcttttaaaaaaaatatgctagccgatgtatttttgttggactctatggaaagatgtttttcttttaccagcagacaagagct
